United States Patent Application Publication US 2014/0057251 A1 - sequence listing, part 148

SEQ ID NO: 293192 - DNA, 443 bp, Cannabis indica
agtttgggtctgggttcgggtcccgagtccatgtctgggtggggatcctggtccgggtcccagtttgggtctaggtctaagtttgagtctgggtcttggtccggttatagttttgggtctaggtccaggttcggttatagttctagctccaagtcctggttcatgtcccatttctgggtcaaggtcaacttttgatttcggttcaaatttcgggtcacaaggtacggtttcaggtctgagttttggttcaggtgctggtctaggttcgggttcggggctgtgtcccctgatatgcgttcgatccaagccctggctctagatccagatcttgatctcgggtcctggtctggttccattttgggtgccatgtcatgagctgggtcataggttcaagtccaggtctggggtcgggtactaggtttcggtcctagttccgttgccca

SEQ ID NO: 293193 - DNA, 527 bp, Cannabis indica
gtttataaaaaggaacattactaacttaatctctaaatttagggtcattttatatctcaacctataataattaaagagacaagacttggtatctgtcaaaattcaggtgaaaaactccaaatcagcctttagatatttacgctaggcaaagaaatttgttatcgtttatatagatttattatcgggagaagttgaaaaatattcactttttttatacattaattaaatttacttttaaataaaatttaattcaaatatactcttttttcatgcgtattgtacccaaattatcctcacacactcacataactaaagcataatttcaaacataatagatttgtgttccttgtaaatcgatgtgtagatttgtcaaaaagttgagcaaattttgacttaaaaaaaataaaattatcgtaaaataattgagaaaaaagctaaacataatagattttaaaatagagcataacaattaaaaacatcaagttaaaagtgttaataaataaatataaaataatataaagtagatg

SEQ ID NO: 293194 - DNA, 530 bp, Cannabis indica
attaattttaagtatttctaatttagtccctcaataaattagaaatatcgcttagggtatctacacatttagtgcatgacactttaatacctaataacccataattactaaaatgatcactttattttgggtcaaacttcaaatagcaagacactaatattcatatgaggattttaatccaacatgactattctattttgaaatgaaaagaaagaccattctaatgcatgatgagaaaaaatttaataatttttttatcaatttttgtacgcattttaaattttattctattcatattcttattttcattcccctttctattgttatgttttcattcctctcaactaaacgtcacttaagtatcaagtcaatagtcacataataattcgtgattggtttagattattaatttatatttaaaaatttattaaaatatactataaaaaaataacacttgaatattaacttgacgctcaattataaattaatacttatagaagttttataaatataacttatgtattattact

SEQ ID NO: 293195 - DNA, 580 bp, Cannabis indica
gtcagtgatatatgatgagtaacgagcgtaggtacgagctcacctgattaggtgactcaattttcttggcgacgtactggcttaagtacgggcgtcagtgacatatgtgagtatcgagcgtaggtacgagctcacctgattaggtgatgcaattttcctgacgacgtatcgggcgtaggtacgggcattagtgacatatgataagtaccgggcgtaggtacgggctcgtctgattagacgatgcgatattggtgccagattatggcacgggctcacctgattaggtgatgcaattatatgatatatgggtgcaagtttttggcataggttcacttgattaggtgatgcagttatgcgatatatgggtgcaaggctatggcacgggcttaccttattaggccatgcaatacaggattatcagattaaagcattgacttgcctgattaagcaacgtgatgttatgaagatggttactttatgaggtaatatatacattatttatatgattaaatgaatatgaattctattattggtataatggttttgtattactaaaaatctgtacactgatgcttattcg

SEQ ID NO: 293196 - DNA, 558 bp, Cannabis indica
taaccataaatgatttctaatcatccattgataacaaatcagattatattgaaataggttttatttagggcataaaatcccaacatgaacatgataaaaaatcaagatactgctataacgcttataaagattattggtatatatgtatgtatgatgacaaaaatataccatcatcgtagttccggctagcttgtttactaaaactagttgtgtaaatagttacaattctatgaggactagtatcagatttcattctcctcgtcactctaacatcgttccaaattagtgaaggaagatttttgtcaggcacatatctctttgacacctttaaaatcatttttacacgtacataaatatgcatactttttaataccgagttgtattaacattaaactattgttagaggagttcatgttgttagtgttctgagttgttactacctagtcactgttcataaacaacgaatatagtgagtgttagttagaattagttgtaggtggtaacttatgtgtataccttccttacattgtaatcagttctccatgtagaataagagta

SEQ ID NO: 293197 - DNA, 586 bp, Cannabis indica
aaaggtgaaagtccaacaactttcaaagttaatggacagcgtttaaagctctacttgggaggtcagtttgaccaagccaagtccgccatgatcttggcgccactttgaagtgcaaggctcagcgtccagctgtatgacgataaagacagcgcttctgggaggcaacccaagtattttttgttagacttttgattatgttttagtatgctttagtattgttaatattttcaatttttagattagtaccagacattatttctttttaattgaatcgtgaaaaaaaaaattcgacctggagcccagtagtcgcgactagcctttggcctagtcgcgacctattttccaagtcgcgacctcagtcgcgacttcctgattttccagagaggcaggaaattttatcgtaagctagtcgcgactagccttaggccaagtcgcgacttgctcaccaaaatttctataaattcacactttccccctcattcaaccctacaccaacaaaattcaaatttcaaatcctctcagccgaccctaccctttttccatctcaaaaattcaattttcatctccaatcttcaatcttttcatc

SEQ ID NO: 293198 - DNA, 554 bp, Cannabis indica
ctctcccagtccggcggagattttatatttttatgaacttgtttccgtccccaagaagggggacaaacttaaagacggtttttacggattccgggcccacccttcaaatgatggggtggtcccttataataggcaaactcatgttaaggagtatcgccaccgcttcttcttctcctccgggttccgagctgtggagcacccggagcttctcacagagtgggtcaggattcccccctatgagcggaccgcgcctactcaggtctttctccggagggcccaggtctttgcgacttacgaccgggcggatcttgacgtcgggggcttagtcacgacggagaactgccggaaggccaagctgatcctgccgcaccaatcagtggaggactctaacctttctaaggttatctgtccgaatgtgagggtgcctgccgcggagaagaccttccgggatgaactcatcgccaccgcagagaagaaataccaggaatatctctaccggaaggcccaggagaaggcttattccaaggcccaggcagcttccgggaggccccttc

SEQ ID NO: 293199 - DNA, 606 bp, Cannabis indica
aaacatccctctgtatttgagcccatcagagagcaaatcataaataggcattggactagtttgtggatgtcactgagcgcaacaaccaaaccttagctttagaattcttggccaattggccaaaaagagaggatgacaaggtcaatgttaggggggttacagtgcctgtttccacagctgtcattcatgctgtctatgacctaccgacctttactgtagaagagcaaccactgaaacagcaaattcgagcaaagagcttgaattatgaggacatagctgaaaccttaggttatccaggccttatgtttcatgagtatgatggagaaccgtatcagttgtttaggtgtgaactcaacccggtagccaaggcatggctatactttgttagtgcaaggttggtaccaaacaaacattattttgatgctcagatcgacaggcttaaatttgtgtatgcaattatgaaggggtacaacctgaatgtgggggacatagttagagtgacttttgatatttggttgagggctcttgtggaggtggacttgggcttgctgatattatcaccaccttgtgtgaggcacatggagtaccacaatactcctatgacac

SEQ ID NO: 293200 - DNA, 625 bp, Cannabis indica
ttatttattttttaaattatatatcaccaaaatttcattttttttattttgtaccttaaattgttacattatatcataattaattactttatttttttttaattatcattcaaatattatattttcttactatattttatctatttacagtttcttttctaaatattaaatattaataatatatgagagagagagaggagaagaataaaataggtaatgaaagtaagtattaataaaataatgtttgaacaaggaaacagtaatcactagatgatgtagcaaagtactgtaacatgctttaaaaataaaaaatgaatcaactaatggagagggctttctatttaactgttagagatattattacaatagaagataaatcaaaatatatacaactcaattgtaaaaataatacaaggacaataaaagagatatgattaaatatatgttacaatacacatatatacacaatatatattacatatatatatatgaaaggtagaagagaagattacaacacatgcatgtaatataatatatgtatatataacaagagaataatatatatgtatacactcactcacaaccttgagtgtagattagtggggatcaccatgacttgaacaag

SEQ ID NO: 293201 - DNA, 574 bp, Cannabis indica
ctttcttgcaaactgctttctcgatccccctctctctcagcactcgatccccacctctctctctcagccatcactctcgctctatcactctgcccagaccaccgcccacaccacaaccacccttcctccgcccagaccaccgcccacatctgcccaccacaaccgtaatgcccacaccaccaaaaccacatctacacaccaaaaccatcaccgaaacctctttttcagatccaaacaaaaccccacatccagatctaaacacatcaaagagacttcagattaaagagaaataaaatcgcaactaacggagaaagaaaatcgcaagggtgagagagagggcttactgaacacgaggctcgtgaggtgtggggttttgtcgatgtggggctcgtgagatcggagatctgtcgatctcctccttggtgtcaggcgggactcgtgggggtggagaactgcggtggccgcccaagggagttttgaaaaccctagattgaaaacgagaaagagagaggagatcaagagagagagtgatagacagagagagggttcgtttcagacgaaagaaaaagaaaaa

SEQ ID NO: 293202 - DNA, 501 bp, Cannabis indica
aatttcaggcgagagcagcgaaaaataaagaaagtcggggtaagatgaaatttctaggaggctggggctccaagcctattgtttcacatgttgtcgagggggtaagtttatatttaactatcattcatttaaatttttctagtaaaataacaatactaatatattttctcttgaaaataggctaaccccgacacaggagaactgccaactgcggtggaaacttttcaaaagtttcaccataaaggcaacaattggcgcaacgagttcgcgcaacaagcttacgtaagtttacattttaattcaatttttatttatttctttcaatttattttgtattaaaattaaccatttaacttatttgtttgttttaggagcaaatggttgaaatagcggcaactcaactagcgcccactgaagatgagcccgatgagcctgctgtcgatcctacacagtacccccgagacttacctgttatgacgcaagtactcggagaacgatctc

SEQ ID NO: 293203 - DNA, 438 bp, Cannabis indica
ttaatcaacatacttgtgagtagatctaagatcctggtaaaataaattccaacagacatagcgctctaaaataactcaaaataactctatctatttctccttaaatatctcatttaaattaataaaataacactttaaaatcacttaaaatagttttatctaattttttatttttaattctttttataaatattaattgattaattgactaaaaaaatatatttatatacaattcaaaataaatttctaactaactataataacaatcagtagcaaccaaaaatattattattattataattattattattattattattaggagaattaccccatatactgtttttttaaactttttttttttctaaattagtacggtttgtagtttcttaaagtaggttgttgtcactagttgtcaataggagtttctatacgatt

SEQ ID NO: 293204 - DNA, 461 bp, Cannabis indica
gcactgtgctgatcagataattagaagatgtgtgcctgaagaggagatgtactctattctcaatcattgccatgctttaccatgtgggggacatttcagtgggacaagaactgcagctaaggtgttgcagagcggattcttttggtcaacactttttaaggatgctagtacctttgtgaaggcatgtgatcgttgtcagcgtacaggtaacatctcaaggagaaatgaaatgcctttaacgggaatcttggaagtggaattgtttgatgtgtgggggatagatttcatgggtccttttccttcatcttttagcaatctgtacaacttattggctgtggactatgtgtcgaaatgggttgaagatgcagcaacactagccaatgatggtaaaacagttctcctcttcctttagaagaacatattctgtaacaccctaactaacataggcgtattacgtgatt

SEQ ID NO: 293205 - DNA, 830 bp, Cannabis indica
gaatcttacatatacacgaaattaaattacatggcattgtcacagaaatttaatgtcaaacgactgatgaaaaatttacaacctttatttgcaaataaaacaaaatattagtgggcattagaatcttaatgttgaccatattatgaagattatggtcaataaatcttaatattgacgagaattagaataatggtttttggattttaacataggaattacttatatagatgcacgaattgttaacaagtagactctgtcattttttctgcactctgagttccccttgaccttttaatactctaatatactctaatatatatatatatatatatatatatatatatatgctaatcatttgttatataggttaatacctcattggctggtgctcatatgcggcttcattaatttaagtagaagaaagaagaccaatttgatgaagccagtaatgaaatccttagtacacttgaaaacaaaggtaaaactgttataaatattagattaacttttcatggtagaggaccttcttgattagtttgggctatatgattcaatgctggagatgtgtaggttgagattttaacagataactaacgagtgtaagagtaaggaaaaaacttgttaaaatttcccctgaaaagaagaatattttcaattaggggggccatttcaacaaattttaacccaaaaccattcttcatattcatttcttagtagtacaaattgattgtgactagtggcaaaaaatattccgagattggtccgggccacatttcacaaaggggtaccactatcagaaatgtgagattttcactatttcgattaaaacg

SEQ ID NO: 293206 - DNA, 629 bp, Cannabis indica
atgttactaactgtaggttcgaaatctgtatccaaacaacactattcaactctatgatcggcacagtttgactaagtttctactttttttaatttgaaaaataacttctttagaatgactttatttatcatccaaaaaagaagtcatatgaaaccatgttagattggttacctggagtagcactgatggctgaaatggatggtccataagtaccttgagctggtatgcaacaagttcctctcccagcccaataaagatgaatttcaaggtagttctctgaaacccgagccttaaattccttctggactgctcggagagagactgcaccagcctcctttctgatgtcaaaatcttttatttcaagctttccctgtcataattgcacacaaataaggtagacataaagagcaagaacaattcagttgatggaacattaatgttgaaaaaaaaagaattgaaaatattcttggggacaagacaattaggctgtcattaattacttggataaaaatatcaaacatacgcctgcccaaacttttccagctgctaggatagtcgaaagcagtttctacaaactgaagtttgacagtgtagtttccattctgaagcccccagaccatagtatctca

SEQ ID NO: 293207 - DNA, 523 bp, Cannabis indica
aaagtaattttttgtttttaaaaaatatgtattctataaccatttttgttttttttttaattttaaaaattgataagaaaaatatcactacaaaaaatcttatttttaatcacaacaaaatttgtgactaaaagtaaaaaagttgtaactaattataaatcatcattcttatgttgtgactaaaataggtccatcactaaaagtattagttacaaaaattacaatttgttgtgactcagtataaaaaatcttacttttattattaacatatttatttttatattaggagccgtacacagtaaatcttgaagactagaagaacagcatataaaaagtttatagttaatttcatgtatttttttagaggagatttatttcatgtaatcatcatactacattattattgatgattatattagtggaatttctaaaatttggtaaattaatttttcaatagtaaaattacatttttatgtgataagaatttgatatattttttttttattgattttgacaaataaaa

SEQ ID NO: 293208 - DNA, 802 bp, Cannabis indica
aaaaaaatacgtaatttatttttgtaagatactacgttaaatttgatattttttaagaaaaaaagtccaattatatttttaaaatactatattttatatttataccattatatataaaaaaacaaatttttgggataattaaaaaaaatacaaaaacaataaaaaaaaattataaaaatactgtttgtacagatattttaacatttctaccgttttttagattttatttacataaaatacaattttctttgtgtatttttatgttgtattcttgttattttgttgctgattttttattatttatattattttttatgttaatttgatgttgttttcttgtgtaatctgtagaataccgtaaaaatatataaaaaaaaagcgtaaaaaagtaaattttttacacaaattggtgtttcatgtgattattttcatatataaaaaaacccaattaaatattttggcccaagacccccaattgacttgagacgtgtctggtttggatatgatatgtttattacttatgaattcttaatatcttgtttgataaaataattagtaattacacataaaaataatgatttttagcacttaatatttaatgtaaattttttttagtaattacatgtctaattaccactacaattttttttacttttagtcacagcaaaacttgtggctaaagtaaaatagctgtgactaagtacaaattatcattcatatgttgtgactataaagtctgtggctaaaagtattagtcacaaaaatcacaaattgtgtgactaaatgtgtttttagtcacaat

SEQ ID NO: 293209 - DNA, 599 bp, Cannabis indica
taaggacacatgataaccctgcagatattttcactaaaagtgtaacttgagacaagtttaggcactgtctaaacttattgagcattcaagacatctaatgtcctcaatcatttctttcggataagagattaagtgagtctaatcaggtgggaattgttggcattaaactcacttaacctgtctgtaagtgtcatgttttgtgtggcaaattagatattgcttttgttcagtatttgttgtctctaacatctgttctggagttagttgcatctgttttcactaatatcattttagtgccatgtcagctttctgctagtttgttagggtgtgccagctgtactttgctggttggttagttagtctggtttattatctttagtatataaattcgatcaaaaccgttgtactaactaactctcttctgttagaatcttcttcttgattcttgctctgctagggtcaacattttttctgtttttgttcttgtttgtgcagattgaagttcgagagatcttcctgaggttgaagatgaagttcaaatctgcttgatctgaagggagttcagattctttgctgaaggtagttcagctgtgtgtttc

SEQ ID NO: 293210 - DNA, 481 bp, Cannabis indica
gggctatgtcccaaatccagacaccgagtacaggttttgtccaagctctgggtcaagattcggatcccaatctcgggtccgagtcttgttccatttctggtgccgggtcacgagctgggtcctaggttcaagttcgggtctttgtcgggtaataggtcaatgtccttgttctgtttcccctgtccctatcctgattcatggtccaggtcccggttattgtgtgggtttgcgtccctgtctaggttcgggttccagtcctagtctcggttcgggtttaggtctctgtttttgttttgatctgggcttgggtttgggtttagatctaggtcctggtcctggtcctagtcctagttttgttctagttccatctgcgattcagagttaaagttcgggtttgagttcgggtcagagttcgagtcctggtctaagtttggattcaggtccttatttcagtctaggtccagatcaggctccgggtgtg

SEQ ID NO: 293211 - DNA, 781 bp, Cannabis indica
ccacctcccgtggctccttgtacgatgtgatcaatactatgcctgatgacttgtccgatccatttggacatcggagaagtgcttatttggcactaaccgagcacttacaaagtacagccatgttttcgccaccgggttcaattcacaccggtatagaaagtttggcgacccctctgtgccatcgttgtcgtggaaccttaacccaggaaatcccactgtctcaacaacatccaccaaatcaaactgctcttcctcctcaataattcggaggcgttgctcttccctattgtaatcttggacagagaacatcacattaaaagcatcagcagtagcaggaaccttcttgccccgcacctttacttccccatttcggcggtcgggccaatttgcaagaaattcacaggccatagtaacattagcccgaccccgagcatccacaaagctcccccacttcatcctctctatttgagctcgaattgtctcaaaccgtggttgtcgtctcaaaggattctcggggaattcaataccccgatcttcaatataagccctattcttaattctcatgaagcgattttgggcctctatgttaccaaaccgagttctatcaaaacccgtagttggtgggtttgagacgaaccctcctccacattcctagttctcttaggtgccattgttttttagcaaaaatagaatactttttttttctcttttttttttttctttttcggtaatttcttttctttttttttcctgtaatttttttttcttgtcttttttttct

SEQ ID NO: 293212 - DNA, 534 bp, Cannabis indica
aacatgtgatccttacggttaaggatgtgattttacttcaatgcatatgtttaatttattgatttttcaggtgagattttatagtactgttatattatgtttaacttctctcactgctgtagattcctctctgttgcaagataatgcagagtggaactttcataatagctaaattgtagtggcagctatgtattgctgctgattttaataattttcttataattcttttactgatcatgcctacagatgctcagaggatactttaagagtttgaggggtgtgtgcttctagcttctgagtttggagccagattaggatagaggcttcacattcttttttatgtttgtttgcctaatttagtgttagttttttttttgttcatttagtttggtttgtattggggtaactttttttctgttttccatgttggcaactctgattcatggagtttgttgttgtagttcatagacaatacaattcaagcaaggattatgtaattgaattttttatgattgccattgtaatttttatgta

SEQ ID NO: 293213 - DNA, 535 bp, Cannabis indica
aaaaaaaataatacacaataactcagaaaccggttataatttaaaaataaaacttgttctataacataatgaataaaaataaataacacaaaataacgcaaacccagttataattaaaatatagccggttctgtaacatagtgaataaaaacaaataacacaaaataacttaaaccagttataattaaaatagaaccaattctataacagtgttataatgaaccagttttataacaatgttataattaataaaaataaataacacaaaataactcaaaccggttataactaaaatagaaccggttatatagacataatgaatgagtatttttgaggtagatatggtatgggtgtaattatttggtgggttggagcatgttgaatggatgtttttgtttaagctattttatttaactggtttttgtgtgtgagtttttatcttagttgttttacagaaccagttttttttgtcttaaatttttaactaattgataaatataaacagtttctttatattatatttgagttattgtgt

SEQ ID NO: 293214 - DNA, 581 bp, Cannabis indica
tatataagtatatatactaaattaaaataatagatttataaatttttaaaattgttgaattatatacattcacttatatttttaacattaatttgacacacgtaagaacaaaccaatttattgatgtgtgaggaccatagcctttactaaaataatatcacacttaaaaaatatatgtattttctaatttcataattgtaaagtaaaatagtaaaaaagctccacaaaattaatttagtataagtgattataatttttgtttaatgtggacagtgagcacaaatatctttaggagagttttatttgcactctaaaaatttataaatgcaccatattttaataatttttattttaaataaaatttatatctgtaattatattagttttttttatcaaaattccttcaattcaaattgttaaaaaataaatccatcaaaatattttaaatattataataaaaaaattaaaataaaaaattatatgaaaatctattagaaaaaaaaataaaaaatatatataaatttgaaaaataattatgacttttttttaaataagtactaaaattaacacaaaataatgtg

SEQ ID NO: 293215 - DNA, 413 bp, Cannabis indica
cagtattttttaaaaaatttccgcgtgacattatttttgtaaaagttaacaaaaattctagtatttttgtaagtttcccataacctaagcctgcttgtctgaccattgcttcagcccattacagagttggtgattgggctgggtggtctgtgttccacatgggcctagaaaagtttcagcccatttgacattgcatatttcatttgtagaaggattagtggtgtgatatgaaaatagataaaaaacttaaaaaaaatggtatttagctagaattaaatatggtaaaaaactgttatttacaaaacaaatatttacttctttggacctatttttacagaaatcaaaagaaaattatcatagcacctattactacagtagaacctctatccaagaatacacttgggaccaagtaa

SEQ ID NO: 293216 - DNA, 674 bp, Cannabis indica
tttaaagaccattattgttgacattgttacattgaattataagagggaccccaaattaacaagaatttatactttaaacccatgtaaggaagggaactgttcaactactagtctattttttaatacaaaaatttcaacatctcgtctaaaataaaaacaaagcatttggttgctcaaagtatgttgagcaccaattaaaagaaagaaagaaaatataaccaaagcagatattaaagacaatgaaaactcttttgtgttcactctttaagtttaagtttgaggtaatcaagtattatgttatcatttatctcataagagattttggagtactctctttctaggaatatagatacaattgtggttggccttgttagagtgttggataaaaatttctaatgtggactcttatgtatttgtgtgtattgtgttatataaaatttgactcaaataaaatgattattttagtaattatgggtcattgagtattaaaatattatgtgttaattgtatagatatactttaagatatatttctaatttattgagtaatttattgagtgactaaattagaaatactaaaattaataacttattaagttatataatggtagtggtctccaagaaacaagagtaattctactcttatcttctcctatcaagagagaaaattagaaa

SEQ ID NO: 293217 - DNA, 526 bp, Cannabis indica
actttacacaaaccagattataactattgctcattcatatgtgggcaaattttacattaacaaaataaaaagaaaaaaaaaaaaaaacagctgccgacacaagaagaaaactccatcatagtccacacacaccattattattattattattattatcaataataacaaaattaacccaaaaaaaaattgaaacttgagttgtatatacaaaagggtaatgatttgaaattgaaaattctgttgtgtgtgttttttctaccttgttcttcttcttggtccacagagaacccaagataagatccatgaccatactcggcgagctctagggaagagtctatcagtgtaaggtctggactctctgagagcatcttccatggtttcaacgaagaggttgaggtttcttgggggagggatgtagagagtcaaagaaattgcagagaaagctgctgtgaaaaaaaactgtaacatggttttggtctttgttcagagatgaattgaagattatgagatcatgagagagagagag

SEQ ID NO: 293218 - DNA, 612 bp, Cannabis indica
aagaaaaaggctgctaatccagagggaaagccaaaaggaaaatgcttctattgcaatgaaaagggccactggaaaccctaatggcctaagtttctcgcaaagaaacaaggtatttctttctatgctataaactcatgtgttttagagagttattatccccttgggttattaattctggatctactaaccatgtctgtattcttcttatttcagctccagctgcttaaacttggattgctatcctagcgagttgagtcggatggttggacagaagggtggagattgtccaagattgaagacgaagctcagaatcttttttttatataatttttgaattaattgttttaatttatgaacaattcaatttcaattattggtttgggattttattccctattttcatgttttatgcagacaattcatttaatttttgagaatattaataaagttttctcttttagtaatgaattacatttatgaattgagcttcatatttctttatcttgtgtatgccaataccaattatatttatatgtttataatatttgtatgtgtttgtgttttattattgatacaaaatctatggtaaattattctctgcaaagagataat

SEQ ID NO: 293219 - DNA, 512 bp, Cannabis indica
atcttctttcttcatagacttttcaataggcttgtctacgagtctcttctttggcttctactatgtgttcaacctcaggaccagttgacttggcttctacacccccatcaagtactttaccactcttcaatgagatggcattacattgttctttcagattgacaactgtatcactagggaaactactatttttctgcaaagcactcacaacattggccagttgtcccacttgcacctctatgttcttcatggaagcatctatgttagaaatatgagtttctatgttgtccaaccttgtttcattcttgttaaacctcctatttgattctatcataaaagtattcaaaatatcttctaatgatttcttttcaagttgttgttgggcattaaatccaagaggtggttgcaagacatttttagtattaccataagaaagattctcatggtttctcaaccccatatgatagtagttaggcattggatttcctgtagttgttattgtaaggtttatt

SEQ ID NO: 293220 - DNA, 627 bp, Cannabis indica
caaacacacatacaagtcgataaaaatcatgaaacctacgtactaaatgcaatatcgcgaattatgtcgctagtatatcgccaacacgtcgtgaaaaccacggttatcataaaatccccaacttttctagacgatatcgcgttatgtcgtgaacatagtcgcgatacgtcgcaaattttgcacaaaaaccagaaaatataccaaaacaatgaaattcaaacgaaatcaaacaaattgaacataaactaactacattactttacaatgaagcacaaacaattaaaaagtaatgaaacaacaaaaaagtttagaaaaatacctttttttattgttttggatctgggtttcgtttgggggtgtcgcgaattggggtttctcgatctcgtctccggtggtagcgatgtcctctgctggtcgtctggggtttcacgatttcttcttcgaagagttcgcgatgtcgtctgagattggtttcgcgatttcctctggacgtctggggtcgggtggtgagggggtggtccgtcagtggagaagaaatggggtgtcgtgggtggtccggtgagtgagggggtggtccgtgaggtggtccggtgagtggggtgagtggggtgtctgggttgcgtgaga

SEQ ID NO: 293221 - DNA, 721 bp, Cannabis indica
tctcattttataatagtaggatgaggttgatatttatgttattttaagcttttaaatagtcagaataataaagctgtaaatctgtcaaattacttgtgtcatcaatcaaaacactacaccaaaactctaaattaatttttttttttttttttgaaaaattttatagcatatccttaaagaaagatgtttaatacaaattttaagtaggctaacctaactaactcgtgttaagaaaactctttaaaaataattttgctcttataaatatttctacgtagaaaactcaggctctactttaggctaaatcggactaggtctacgttttggactcacttttattaggaaccaaaataaaaagaataataataaatatacatatatttttaataatttttaaaaatattatttataattataaaaagagcttaaatttttttttagagctcaaattaactcagggcagccttgagaaaactatttggtgtaattttttctttttcttaacaaaaaaaaaagatgattgtattacttttgaaacaattatatacataagtaattacaagtgaaacctcttgtaagccttttgcttccaccctctctattacaacaattccaaatattctcaaagtgatctttgtctttatctcttattttcagagtatgcgtactatgaattcttgttagtactacaaatttcacactttgaattaagctgttaaca

SEQ ID NO: 293222 - DNA, 382 bp, Cannabis indica
gagtgtagagagaaagggtgctttcagtgtggtatgccagggcattacaagagggattgccctcaactcagaattgaagcactgaaggctccagcaaaacccactccagcaagggtgttcgccataactcaggctgatgaagaagccagtcgttgaatggtgacaggtcagctctcgatcaataactttaagatggtaatcttccaaccagacggtgaagaaccatttgtttttgtcggttcagttcagggatctcggatctcggtgatttcggccttatcagctaaagagttatcgtgtgagggatgtctagggtttctggccgtggctgtagacaccactcggcctaaccctattcggccaaaagacattcaggtggtac

SEQ ID NO: 293223 - DNA, 701 bp, Cannabis indica
aatacctctcccaatttaaagcataagtcaccatttgagattttaaactctaaagttcccaactatagtcatcttaaaacctttgggtgtcttgcctatgtgtctaccctaggggctgctagatccaagttctgtcctagagctactgcttgtgtctttctaggatataatgtaggcatgaaagcttataagctcattgatctcaacacaaattgcatattttgttctagtgatattttttttcatgagaacatttttctatttctgtctagtgaatttttaccacttcacatatcagattttttccctactaccattgaatctctcaatactgattccacacatgaaacacctcagtttcatccatcttctgaagcttttcatacagattctatcactgaacttgtgcttactaacattgtgcatcctgctgttactcagcatgaggatgttttgtccctgctcactcagcatactactgagcctgtttcactcaatcggcactcatacctacaggactaccattatctcttgtttgccaacaatgtccaacatcagaactcttcacctgtcactgatcagttatctctgaaatatcaactataccaggttttccccacaattttgtgctcttgtattagctgtatccagccattatgagcctgattttttcatcaagcccgtgggatacctgcttggga

SEQ ID NO: 293224 - DNA, 935 bp, Cannabis indica
tttccacacttagctccatatgctaaagtttttcctttgtgcaggccggtctgaagttggcctacacttactcccgggctaagtctgttgcttccaagagcgcagctctgtccgacaccttgaaggcggaggcagacttggccaagaaggaagctgaggaagccagggcggaagctggagctgttcggttggagttgggcgaggccaacaagaagctgttcgctgctgagaagaagatctccgtgctgacaaaggatctcgaggctgctgatcgttttgaggagaccatcgagatcttatctgctgaggtaaacagtcttcaggatgagaggacttctctgcgagcagttcttcttcggatgaaggaggagaaggacgccaaggtgggggagcttacggccgaagtggacaggttgaaggagaaggtcaatgccttggagacagccggtctcgagctcttctttgatttctggaaggctaatccccgggccaactttgactacttgggcgaggctaaggacatgtaccttgagtactgcgcggcccaagtggcttatggtgggaacgaggcggctgcttcaacctccggccaagctgcttcaacctccagtcaggctgctgatgcttctcctgttcaaacaacagatcctcctgctccagttggcccagaagaaccgaaccaagagcctgggactccagctgtttaaacatttccttttatcttttttttttatatatcttattcggccttcggcccttttctaaggacatctcgaccgaccaagcggtctttaaacttggaattatttttcattttttagtacaatagactgaccgagcagcttttaatcccggtactacgtgctttgtcatccttaatgaatttcattctctatttataattgtcgtgcaattgtgattgttttatttttacc

SEQ ID NO: 293225 - DNA, 500 bp, Cannabis indica
atgggaaactaggaatgataaaataggaaagttgtaaaagtcagaggcttgtttccaattttctatggccggccacttcgcttcccttttatcactttatttttcatttttaaatgtcaagtaattcaaccttaaccctatgtggtattctataaatagaaggtaaaggactcaggtttcacatagaattagatctcattcttttcagagtgaattcctgagccaccactttcctctctctcttttcttctctgtttttcgaaatcccttaagtgagtgagtagtgcccacacacatcaagtggtaactcaatcatagtatgtaagactatggaaaatgagcatcaaagaaggagagaaagagatccagattcagatcttgataatgttaatgccgtgctacagaaaggaatcaaaggctagagatctgaatggaaggagtcataatattacgctgcacctaatgtaaggttttcttaaactcttatgtgtttattttca

SEQ ID NO: 293226 - DNA, 542 bp, Cannabis indica
cgacgtatataccgtagtcgcaaatagttttttattagcgtcattttcaaaacgacgcaaaaaacaatttttgacatctataaactgatgctaaatacttacttttatattttattttatgcgtcggttagaaaatgacgctaaatgttttgttgacttcgcttttagccaacgacaatgagtctatttttttagtgataaacgatatgtagtaacagatatatgataaagcaataataagacacacgaattttatagaggttcagccccgagcagttcgtgttggaaattattttacaggatcttagatctactcacaagtatgttgattaacaccctaaatatgaacttctaaaacgattatgaaataaacacataaaaagtatgagacaccttacattgggtgcagcagaattaaatgtctccttccgttcagatctctaacccttttatcctttctgtcacagagtattatcaagatctgaacctggatctccttctctccttctgtagtgctgaaactccttcttgtttaatgtctt

SEQ ID NO: 293227 - DNA, 561 bp, Cannabis indica
ttataattaattaattctaaaaaaaaaaatgtttacctattatagtaacctgttattacaggtcaaagaaaaatgtaaccatgatgattacaataaaaatatgaccattaaatagtcacacatatatatatatatatatttctcttgaatcaatgaataaacacatacactttaattactgttttgattggacatgtcacttttgtgacaatttttatttatttttttttttttttacttaagttttatgatgaaaagttgaatcaccttttaatacatatttttatttgtattatttttttttaaatttagacaacaacacatgtgatctcatcattctcaagaaaaatatacatgtttatttatatatatatataaatatatatatattcctctttaattaataggtaaccacacacacattatttgtctttcattgtttttgagctctctctccacttcatcttcttcttcatttttttggccctaattttatttcttatttcagtttcttcttcttcattctttttttctatttttttctttagtttttaaagtttt

SEQ ID NO: 293228 - DNA, 928 bp, Cannabis indica
tgagtgttggatagagtatcaaacgaaaaacaagcaaatatgccgaccaggagtacgcaacagattaaagaacgactatgtttaaagaaaagtcaaaactcaagaagtcagaaagttttcttgagttagggcaaaaaagttcatgaagcttggaataagcaagatggaagacagacgcaatgcagttcaaaagtaagccctatggctgaaatccaacataaggacatggaaaagaagagtcgcagaagtttctaaccctagggtttcctaagcattctttctacagcatagttacattcaaagcataaacatgcaaaggaaagcataaagggaatcagaaacttactcaaagattcaaatatccgagttcaagcaaaccagcaatcgtctgtaggcacttcggcaactttgaagccagaaaactctctttcttcgctctgaagtttacttaacaacgaagggtgataaaatgagtaatgtgccagtacaatgagtatttataggcaaaagaggtaactgcatacaaaggaaccttagatgcctcgacttcccgcctcaaaagcgaatatgggaaatcaaaagtaatcgagtgcaaccgtcaaccgtggagagagaaattcagattttcaaaatattaattgttagagcattaattagccaaaaactgaagggacgcccagtcagcttcacatcgagtcttgaatggtcatgctcgacacgtgtccccatccaaaggcagagccagcttgaaataagtctacacgcaacctcggaggtcccgtacagacttgggggcaaatgttatcctaaatttggcactctaacgtggcatcacgagaatggtgacacgtggctccacttggagcatctggtcagaacgatatgccgagcaggatgcctcgctggcacatccagaatggaatattca

SEQ ID NO: 293229 - DNA, 649 bp, Cannabis indica
aaatggaagatttttattattattatttttttataaggataaatggggattctaatttgtaattgaatcggtaggctgtgcattctaaacataaaaaaacttttataaacaataatgttaaatcaacttcggagctaataattcttatatgtcgtcgaacctaactgtaattggaatcgaaagtaggaagacaaaaacaatttacttgcataaattataacaataagcattaattagattacacttttgtcttgttgtaaagagaagccacatggccatgtcatagtttaattaacggaataatataattagataatcttttttgtaataatagattgcaaaagatatcaatcttcttttttctttttttcttttttaaatcaccccaaattactcacacgagtaatataaaagaaaatttcacattatatactttttttttttgaaaaaaaagaattgttatgaaaaaaagagagtcttttacaacaacagaacgaatagttgagagaaaaccctcaaattaagtatgaaattccgtattttaatattcccagtttaattatttaattaagtgattaattaaatgcggaataatgaaactgatactgaaaacagtgtttccgtagttacagaatacaactctgtaact

SEQ ID NO: 293230 - DNA, 651 bp, Cannabis indica
taagtagttgttaatatttttactaaataagtaaaatattataaatcattcttttcttatttttcaattatttctaaataaaaaatgaaataattttttattattttataaaaggaaaaagaataaaaaatgaaacaaaaataaaaaattaaaataaaaaaaaaattattttcttatttgttaaaaaacttaaaggatttttttttttttaaatttttaatatttgacatgtagagtaagtgtaatataatattcattattttttatttgtaccaaatgagtgcaatataaaatatactattgtgttataaaaattataaattttttaaaagaaatttataatagtaagtatcaaaatcaactaaactacatgacagtgatgttaaaattttaaaacttattaatatatttattaatattagttctattacataggttattaaaatctatttattattgattatatataaaaaaaaaaatgtatgttaattattaaattattagagtgtttaccttaatattaatagactgcaatattttatattaaacttttaacattttatagtagatcatactaaattgagagattttttttttatatatatttcaacagcgttatagctgctaccattaactatcatttatggttat

SEQ ID NO: 293231 - DNA, 415 bp, Cannabis indica
tgtgcctccctccgcctggcctcttcctcattggccttggcaagggcctcccggcgctcagcatcctcttggtacgtccgcctttcaacagtcaaatcctgaaggatcttcatgacttcgtccatgcccccaaaatcggacaagacgaagccatggttaataaggttcttgaaaaggcagcaagcctcggcagcaagctggaaaaggatacaagtatgagtaaaagtccttaagaaaaaataatgaggaaaaaagaaaactacgaaatacttaccacagtcagggagtggctgagatcctggacttgaaagatggagttcaaggatgcacaagcagcgaaccgcttgggtgcacaccgggtaagctgagacgcaaactcgccggtcatctccgcggcaaagggagccagggtggg

SEQ ID NO: 293232 - DNA, 659 bp, Cannabis indica
aggctatgctaaaaactaacctagtccaatgcatgtaatattcttgttaattttaacctacgcacgtggaaacacgtccaaatcaattattttactcattcagctattaaaattattactaagtaaaaaaaaaaaaactattaaaactctcgagttaatttttttttgttttttcgaatctccatcatatgaattaaaaaaagaaaaaaaaatctccatcattttcaatcaacaatttttgtaaactctaaaaattgaaaaaagaaaaagaaaaatctctttaagaaacagtaacgtgtacgactttgtcaccgaagagagatatagattatatctgttcccatcgtttggagccgaccattgtgtaataggggtctctcttttctctctctctctaaaaaggaaaaaggaagacccttcttatttctttctccctcttctgattctttttctttatttttttttctgggcttttcatttctagtaattggagctcaatcgaagattttctaggtgagtttcggattcctcttgctccattttctacataaatgtttttctaggtgaattagggtttttgaatgggttgtccgtcaatttttgggattcctttcctttcatcgatgatttttgttccatttcggttcaatttttgggta

SEQ ID NO: 293233 - DNA, 702 bp, Cannabis indica
cggccttagtgtgaatttttgcccaatattttattcttttttaatccatataattcaaatctaagccctagatgaaacactgtaaaaggaacatgatgctctcatctcatccaacactttcaacttgccaaaatctagtttataactctgtcagacaactagtagataaaagacaccttctatagtgattttcgagcctcgttcattgttcttcatagtgagcccatagcgatagagtgtcatgcccacacatagcaagtcaagtactcaatcatagtgcggaagacgtgggtaaccaacccaaaggagagaaagagatccaagctcagatcttgataatactctgcgacataaaggaacaagggttagagatctagttatggaaggagtcattaatattccgctgcaatcaatgtaaggttttctaaaactcttacgtctttaatttcattattttagagatattaatatttaggatgttaatcaacatacttgttagtaaatctagatcctggtaaaatattcccaacagaaggttggctagacctgtgttgaattacagaccctggctggacactcccaagcatgggttttggctctagttggccaggcctacactagacagtcatccatggctagccagacctgcattggggcaggggcctggctgcccaatactcctccatggctagctagactgca

SEQ ID NO: 293234 - DNA, 721 bp, Cannabis indica
acctttaaatattatttagttttttttttttgtaaattgatttgacttttttatattatattagtgtaaatgtacatcccaacatcccaatatcaatcactgatacaaaaaataataatatatatattgtttatattattttgtttttgtttgacttgtgatattttcttttgtgaatattaattattaatgaaaaggagtataaattataaatcttgcttgatgatgctacatctacccttccacgttaccaatgttattgtatatatgcattatatatatatttaggacaatctttaatcctaatttatatttatcctttctttatatatatatatatatatgaaaatgcaacaaaaatatttatctaaatatacatatttcataaacagaggattttcattggtagtaacataatagtactattcgtcaaatttgaatcactctcaataactctatcaaaataactatttttaattgaggtatttattgatttcccttcctattattatgaaaatttttctaccttcaacaagacaatgaatagagcaaaaaagaatgacaaaaataattaaaagaccaaataaaaacaggacataaaaatgaaattagacaaacaatctacttataatgccataagaattgcaaaattcaatttgacataagaaaggacaaaaacatttcaatataatcaaaagatatttattataaaatatactta

SEQ ID NO: 293235 - DNA, 509 bp, Cannabis indica
  modified_base (180)..(180): a, c, t, g, unknown or other
agctttctacccagcttgggtcacagatccgtattggtgcccaagctgaacaagaaatggcgagtgtgtattgatttcacagacttcaacaaagcatgccgcaatgactgttttccacttccaaggatcgatcagctcatggatgcaacaacaaggcatgaaatattaagctctttttanggacgcttattcaggctacagtcaaatcaaaatgcatccaccagaccaagaacatacaagtttctggacagatatgggtctatattgttacaaatgaatgtcgttcggtctaaagaacgctggagcaacataccaaagattggtaaacaaaatgtttaaagaccaaatcgggcaaaatatggaagtgtatgtggaggacatgcttgtcaaatccaagaaggctggggggcacatagatgacctggacgaatacttcaaggtcctcaaaaaagtcaacatgaaactaaatccctcaaagtgtcctttgaagtcagctcgggaaagtttct

SEQ ID NO: 293236 - DNA, 1021 bp, Cannabis indica
ctgttagtttaaaattgaacagatttatttggattgaaattattgaacttagcaatttcataaatcgaatacttcttaactacctaaaaattttaaaagtcgaaatttaaggaaaataacctaattaacctttattttctatttttctaaaatatttacagctgacacattacatgcatttctattaattaagaattttttttaatattatacttaaaattaattttatttataaaaatagatttcaagaaaattatttgcataaatatcgatgtaccacgtcagtataaataccaaaaactaaaatatttactgaaaatgaaaaaaatgtgaaaaatctcgtttttagaaatttcagtgttttgcaattttttttttaaaagcaaccttttaattgcttttattgcaaataatataacaattagttactttttattaaaaaaaaattgattcaagataatttttaggcaaatagaaattctttaatattttattaagaaatatgtaaccaaatttaaaaagtgaaaatcaaaaaaagaaaaaaaaaaatgtatttttagcaacttattttcgacatgtgaaaagtatatgtttttttaccatcaatatatagaaaatagaaagtaactttttaatttcttgggattttttagttttacacttcaaaactatttttcttgtacttttatggaattccacaaactcctatagcaactaacggaacaacttaaatcgcaacccaaatccatatagcaacacacatagaaaccaccggagcaacccaaatcgtaaatttgaaaaggaaaaagttaaaaaaataagtatataggataattctcctagtttcttttatactttattttttttaaagtctaggtaaatggaaattcttttatacttcattaagtagatatgtaacaaaattttaaaaagtaaaaattttaaaaaaaccctaattaaagcaatactacatatataaaaatatacttttaagtctattatgaaaattagtataatagta

SEQ ID NO: 293237 - DNA, 625 bp, Cannabis indica
aagttgagatagaatgagttgaaaacgcctgaagcgtaaatgaacaatatagaaattattagtaaatgttcatttgatttgccctgaagttgttaaatctagaggtactcatggagataccttaatgttataaagtattaaaatgataaccgtgatgaaaacggtactcgaagagactcctgataactctatgaaaatagagttatttatatctttttgggcattaaatttgttttgttctcaagtatttttagtttattttagtgacttttatttggttttatttagttttgcataaatattatttttagtatttttagattaatttttaattaattttgtaatattttatcaattttatttagtttcccatttttataaatgttaatctcaatgttgtgtatttttgtaaaatgtttaaatgcatatcttagatttatcacatggatcaaagttatggagctaaaatttcatcaaagtgtcattgaaatcactaaagcctaaattaactgataattatttatagtgggctaataattaaaatattgagcttttaattcatcaatttatccaagtgttaccaaaaaaaaaagaaagaactattttcttttaaaaaaaagatggg

SEQ ID NO: 293238 - DNA, 532 bp, Cannabis indica
ttttactatagtattgatgtaatttttttttttggattatacttgaattggattgtttgggaactccagatcaactttttgagatctgcctttcatggatttaaaaattgaagtcaggacattagttttatgaaaattaaactggatttctggttgaattttagtttcgtagtagttcttctacactttttttatgaattcaaaacagcccctgttttgattgattctggttgtcttttcaggtgaagttgccggaattaatggtggttctctttatggttgaatttttatttcagttgtgttaggttgcgttgttgcgcgatagttgcccagaaagcatggatcctaggttgaaggtgtgtaagtggtatttgtgtaatttattttatttgagctgtatatttgttcatttggccagtttaaaatatttttataatattgttactttttttgttgttaaaattgaaaaaaacaatcctagaaaaaccacataaaatttgatttttttaaaaaaaaattaataaattaacaa

SEQ ID NO: 293239 - DNA, 529 bp, Cannabis indica
attgcacaacaaaatcctcgtcaaagagcaatgaccttagatcggattcatagccagacatttccttcctggtttgcacaaaaggtaagcttattttcaattcctaattttttgtattaacttaatgagttcacaaacatattgagtgtagtaatttatttattacaattgtttttgtcaaagtaggcagaagaattatatgataatcgggataatcgactttctgaagatctatattatctggctaaaggactaaacaatattttcaatcgatttaaaagatatttaataaatagttttcggtttcatacaaaaaaaaaatcgaagagaaattaagaacttaaaatagtggagttattgtgactgccaagactcaaagtttttcaagtagtagggatccaaatcctatttttggtagatgttacattttttgggtatcttaacagatattatcgaactagattattgttcaagaaatcgtgttgtgttatttaagtgtgattggatttcgagtagtggtattaaaaaa

SEQ ID NO: 293240 - DNA, 581 bp, Cannabis indica
aaataaaaattataaaaaatcgtaaaaaatatttaaaaatttcgtataactgtatttttgtaatttttttttttatttatttttgtataattataaagtaatctcttttttttttttctattgtatattatttttagtctttcaaactctaaccccactcttctagcctatattaccctggattaggtacatttataactattttataatttttatttgtatatacctaattaatagaaaaaaaaaaaataagtattttttttttgaagaagatattttataggatttagtagatttgttaagtaaattttatatttataaagaaatatgcatgattaatttttatacatattactatattaatatggcctataaaatttaataacatataaattttaaaaacaattatttgttctttttaatactttttaaccttttttttttagtagttgtagtacttctttattatttatattgtttttttgcttgaaaaaaatacttttttagtaaatattggttacttatatctttttctaatttttagtaaggtatggtaattttctgagggtatttaaaaatac

SEQ ID NO: 293241 - DNA, 490 bp, Cannabis indica
gtggaatgttgggtaaaataatagattaaaataataattgtttaatattatattattaaaaatagatgagaaatgaaaataaatattattattttattatggttatttttgaattatattatatgaatattgttaataatatttttcaattaaggtatttcatatatatatttgaaaacaatagtttgatattaaaatgtaaatataagaaataaaagaattattatttatatattatgattattctttaattatgttataaatgatatttatcccaaaaaaaatctcgttaataatttttgaattatgattatttggtatttttatattaactagatgaaagttacgtggcgagccacatcaatattaattttatataagttctagtgatttttatttaagaaatcagtactaattgtaaattattttataaacgatatgttttatataactaattgttaaaaaatgtcataattgtgtatataaacct

SEQ ID NO: 293242 - DNA, 270 bp, Cannabis indica
gtcaatatcaatggttgatcttaggtctatggatcttaatgctgatatggttagataaaatacattgaagggtaaaatggtaaatttgtccctattcagtatagatcatctatatagaatctttgactattaagattctaacaatggataatcataacctatctatatcaaggtacatataaagcgttctatataattgagattgctattcaattccaaatctatagtggtgcaaggcgaattaataagttagagagttacttggtgaat

SEQ ID NO: 293243 - DNA, 621 bp, Cannabis indica
ccattccgccaaattcccacgatcgccgaacccgaagatattttatttcaaaaatggtatccacgatactcacatattctaataaaatctccgtaattaataaattacgctttatttattcatttactcaaattccactaattaactcataattagcttaagtaagattgtaatcttactctaatatccacagaattacatatttaataaaatatggccaaataaatatcaataaaatttcgggatattacaatactgaaacacagttctaccaaaaaaataataaataaatataacaaaaaaaaaaaaaacgaaacaacaacaaatcaaagaaatagcccaagttgtataagtttattttttttattcttttgatggaaataaaaactgaaaatgttcaagtatggaacataggtaggagattcaagtcttagaaaattaccataacagtggtggttgcatcgaaaagaacaatgagggatagcacggaaacttggtcgacgtatgttgccatggcttcaaacactagcaccccataaaccatatggatgctgcaaaaaatttctggtgacatgatgagcaagattgtgattttgatattagaacttgaaagatgtgtgg

SEQ ID NO: 293244 - DNA, 724 bp, Cannabis indica
agcactaatatttattttttttccacatttaattgttatattttagttattatgataatgagataaatataaagattgaatttaaagttcaaatcatctgtcataaaaaaaatatagtagtttgaactttctattttttataaatatgtatataaattatataatatatagattacatataataaaaccatatatatataaaaaaaactctttactcgggttggtcgggttagttcaggttgattggctgggttaatattattttaaactcgcccaatataaagattgggcgggttatattttcgtcgggtttttcgatttgcattttttgtcaagttatctcagtttggtttgtgcgggttgtttgggttggcagtttacaaaaatttatgtacaaccctactgtagagggtagatggtatataatgtagggtgattctacaatgcacctccttaaaagggattgatgcacctctatttgtttcagcatccagaaaaaaaatttagtctaattttttttcatattcatctacgttatagatatttaagatattttataaaattttgagaaattcggaataatttacaatatagaaaataatgtttaaacaatctattttacacgcgtataaaataaaatagtcacgtgtgcaacacactatttaaacacagttttcggcgtgttaaacttttctgaatttcttaaaattttgtaagatgtctt

SEQ ID NO: 293245 - DNA, 602 bp, Cannabis indica
atattaaattaattcaaaatgataattagaattgaattaggaatagtaatagtatatatacaaaaccatacaaaaaaattggaagtaattacatgaaaaagcatgaaaaatcgaagaaaacgaaaaaattcgaaactgtacggacagttctgcgatcgcaggaaaattcgggttcgggtttggtcctggtatgtgttcgtgtccaggttcctgtccttgtttgggtctggggcagatttcatgtccaggtcttggtccgacttcatattccccggtccaggtcaggtcctagttcaggatgaagtcccaaatttagatcaaggtctgggtttcggggcctaggtccttggtttaggtgccgcatccaagtccggttcctaggtcctagtctagttccaagttcgggttcaggtcctgagtcttggttttagtccaggtcgcggtctgggttcaggtcgagggctcgatccctatctttgtttgggtttaggttcgggtccttgtcagggtctagatccttgtctgggttgcgagtgtcaggatccggtgagggtttaggacaaggtcaggtccaggtcccgatcccggtcctagtccaggtt

SEQ ID NO: 293246 - DNA, 798 bp, Cannabis indica
aatatttacaattacaaaattacaccaactaaaaactcaatgtataacaacaaataatttcatcacttaaaaaaaaatttctaaacaatatactacgaaacgtaaatgaacgtactcggtacgtgaaattttgtactcggtacgtgatattatgtacactaattttactaaacatcacgcagaaacaagtaatgtacacggtactctatataatgtacttaattaccatcccacaaatacatatgatcttatgaatgaaggaaaataccaaaatagcctcaatccgacaacatggacccactgcctacagtgttttcgtaccatcaactgccaggaacagtgaagactgatgtacctttttgtactctaactaacacaaacagtaccattttgtacttttttcgtacctaactattttttaattaaaaaaataaactcccaaccggtaaccacacctacaacaaccggttaccaccaaaatttcaaaaattaaaaaacatttaaaagtacggtgggacccacctgccgtacaacggattccaatccgtgttttgcacatatgggcacaaaatcggctgcctatatatatatatatattaaatattagattttaacacatccgatccgatctaattaatttcagtcatctaattagattagatcagtcttatatatttatttatttaattttgagtttatttaatactttaggtctattattttttagattcagatcagtatacatctaatattttaagtctggattgaattattggattcatccaatccaaaaaaaaa

SEQ ID NO: 293247 - DNA, 547 bp, Cannabis indica
ttggcacttagggacagggctcaggagattgtccaactgctggatgctgctcagaatatcactttgttgacctcgaaggacagctttgtggagtacaagctttatcaggcaaactttttaccccagcctgtaaaggggaggaagaaaaagtccagggctggccaggctgagggagctgagcaagagaaggagctcattcaactcaagcgtgaggctaagttgaagggtgatgcaagagccaagcgtatgcttaggaatattctgagcaagataaggaggctcaggaatattgagagcaagagaggccgctcaagaagaagaaaaccctcccgaccgggcagaggcccatcgaacatactatccggatcagagagccttatctacctgctcggccatccacccctgtagaaggaaaggggaaagctgtcttggaggagcaggaagactcttcagacgatgatgccccatctgtgcttgttcaggaaaatgctcctgctagcgtgtagagtacttcatcttgcatttatttttcttaattttcatgcct

SEQ ID NO: 293248 - DNA, 651 bp, Cannabis indica
attcaacttagtactacaatctttttgctatgggggcgggaattgtgttctataactacaaaagtgtgtttcatattttttattttatttaagagatttttcatatctttatatattataagtgtctatctaagggcatttcttggtttaacataaaagaatattctctctaacaaacctatcttgggagaatattaataattttttttatttattttttaaaaaaatcccgttaacaaataaacctaataattaaacctaaaaaattaaacaatcttttaaatattaataatctctttttaaattaaaaaaatcatcttaaccatatatctctctaacaaacctattttgggagaatattaataatttttttatttatttttaaaaaaatctttattttttattccgatgcataatgtgatgttattctttttaattgctttattaatttcttttctattctaatgtgaagaaatttttggcaatagagagtcatcaaatgtagtccaagtgtttgcactccataatctatatatctatctataatataggtcaatactcttttttttaacctattgattatacacgtataattattaattttaattgatgataaaatttaatttttctatttttctattatataaggat

SEQ ID NO: 293249 - DNA, 578 bp, Cannabis indica
gttgaagtatcttgtcactcggtgttggtacgctacattagtaatatgcgactcaatacgtttttcatcaatcaaatccaaggacaattttaagagttcttggttttcttcttaattgtaaaattcttatctatgagtcgagatgtttacttccacaggtaacactgcctccgagccaaatgctagcgagaaaggagtatgtcccgttgctgtcttctcagtagttctacgagcccaaagtacttgaggtagttcgtcgacccatctacctttggcagaatctaacttcttcttgatagtatccttcaaggttttgttaacaacttccacttgtccattcgcctgaggcctagatactgatgagaagctcttaattattttattcctctcccagaactcagtgaataaatcaccatcaaactgagttccgttatcggatactatcttcatttgaattccaaacctgcagatgatattttactagaatcatggatgtcctgatcgtgaccttaagaaagctaaacaataactaaggttttcatgttgttagttattctaagtgattagggatggaccat

SEQ ID NO: 293250 - DNA, 626 bp, Cannabis indica
taacagtaaataataatacaagaaaatatataaatttaaaaggggatttttttttatgaatggtgaattattcaatatttttaactattacaaatgtccacggaagtagtagtattaagctcattgaaggtacaatctaaacataaaacaaaaaatttttggtaacacaataagcgatcttatttgcatatcgtttaacaaaatatagagaaatatgatttagaaaagagaacaataaacgacaatcttgaactaaaagaccaaacagagatgacataagaatcgtactattgaccgcctgaaccactagtaaagaatctgatacaaagtaaacagaaaaggaaattgatgaagtgaaagagtattaagcaagtgagatgttattggttattaaacttaccgacattaatttttttttaatagaccgacattaattattagttggaatttatatatagtttcatagttattttttattgatgttacttatgtttcttattaatgaacaatataatatttgttagttttgttaatgtttaaaaagtattttgaattattttccttagtaatatatatgagatatatattaattataaattttacatttaattaattaaaattattat

SEQ ID NO: 293251 - DNA, 545 bp, Cannabis indica
tatataataaataatcaaataaattttaagtaaaaataattgattatagagtcttttaatcaaaacagctttttctaaaagttgggttgtaccagctttagcttttagctgtagcttttccataaattcttcaataagttgtttttaactgcttaccaaacacttttttgtcacagcttttttgaaaagcaacttttagctttttcaaaagatgtgccaaacttccaataagccgaactagaatttaccgagtaaattccctaacttattaattccttattgcatccactcatagaacttggaattgcactctcagtcatatagaacgctctatatgttccacgatatagatacgctataaacatttaaccatcgttctaatctcaataatcaaagatcctctatagatgatttacaccgagtagggataaatttaccgtttcactcctcaatgtattttatccttaaaaacttagcttcctgtaaatgatgtttcagtgaactaaaatataatcactgaaacaagagctcttccatttacctct

SEQ ID NO: 293252 - DNA, 643 bp, Cannabis indica
gagagtgttccattgggcccttgataactatgtctccttttgtattaagtcatctccctctttttttagttgtaacttttccaatgttagcagaaattgtaattttgttgcccataatgtggctaagtgggctttcacccaccaattgtacggttccattttgatctcctctataccggaggagctactttgtaatgaccgtgatgtctaacaatttccttgtttaatgcatgaatacgcttaatttcaaaaaaaaaaaaataatctaaaaaaatgataattaattagatattaaaactaaacataactaacataaatgattaaataatgtcacaaattaattggaaaaatatataaattcataggaataatatgtaaaacaaaatttaaaaaagcttctctaattttaacataaaaattagggtactgttgtatgtattatattattgagatgggatgccaccatgcatggaatgggccatttggcccatagcagagagagagagaggagggggtcgacttcagttcacgttccctaatctcatcaccatcaactgacccacacctcactgagcaccacactcttttcttcaacgtgctcacactcacactcactctcactctcacatctctctctctctct

SEQ ID NO: 293253 - DNA, 581 bp, Cannabis indica
aataaagaagaaaaacaactataaaatatgacctgaaacttaggttaaaaatagcctaacacttggaaacataaattcctcacttttaaatgatggtattttatttttttatttaattattattctattaattttaaatagttttatattaatatattatcaaattaaataaagatataatttttgtttatatgtattttttttcaattatgtcaaaataagaaaaagaagagaacaattgaaaagatttaaataataataaatttttcataaactactaagtaaattatattttaaaatttatttttgacttatgttttacgatgtgaacccatgaagttttacacattgaagtaaaatttaaataatcaataaatatttatacaattaaaaaattattaaaattgtaatactacatattcataaatcaataataaaatatagctagtgtttatacttttttttgttattaataatatatatgaataaagtatattttaaatattttttaaaaaagtaaataattataattatacagaatatattatatgagtacttaaaaaaataaaaataaaaaataa

SEQ ID NO: 293254 - DNA, 509 bp, Cannabis indica
ttgtgtgttgtctttttgtagatgaacccaagtgagtcttgggagcccgagcatcaaatcgaccaggagctgcttcaacttctacacgaagtccaccctcgtcttcgtcctaattctccttctagagaaggagattcttctaattccatacccagccataggatcatgactcgtacgaagaaaactacgcgtctggctgacgcttctgatccccaggttgctcggctcgccactctgcctgacaccgaacaggatttggcggtcccaatagaggaggaccatgagggggacgctgaagtccaggaggtttaggagctggacgaggagcgtccgggcagccctcccgctactgagggagaggaagagattgaaccccctaacttaagggagtacaatgaggttgggcaactagtcgatgctgacggggatgtcttggttaagggcgttgactacgtcagtgaggagcttgctgaggcggttcctcacaggaggcagggtgccttgggcgc

SEQ ID NO: 293255 - DNA, 310 bp, Cannabis indica
gtagcaaatttttttagaaaatggattaagatattccttattttatttctaaacattggatgtggattttttttatttttattgttatttatttagatgaaacattacatgtggattggtaacattaaaaaagtgcagaaatatattaaaaaattaacattattttccatttgtcggatgactacgttacgccactaaataattaagtatattcttaattataaatcaagcaataattattttacttgcaattaattttttaatttcaaatttaatggtaaaatcttcatgttagtaaatttaaggtgcg

SEQ ID NO: 293256 - DNA, 496 bp, Cannabis indica
aagtgcatggtacaatacaaatacaagacgaaaaaaaaataatcgtcgagaaccttatcactagtattaatgtcagtggtgtatggtataaagatgacccatacatacttgctagtcaagcaaagcaagtgttttatctcgatgatttattgagagggaaaaattggaaaatagttgagaatgtaaatcaccgacaaatttgggatatcgtggatgatgatgctaacgtcgaaattgatttggtacacgacaccaactcatccaattttgtgttaacagttgatcttggggagttaattttgctacctaatcaacctcctatagacattggcactgaaaagttcgcctgtcaacgaagatgaccgcaacgtggacgacgaagatgctactgaagaatctgacgaagaaattttagttgacctttgtgaagatgatgtgaatgatcatttagttaataatgatagtgatatggatgattaattttcaatcactttat

SEQ ID NO: 293257 - DNA, 518 bp, Cannabis indica
cattgtaccaattttgcccctgtaactttaagatactctccatgtgactctcttatgtctgggtattttgggtacaatacacataaaagaggtatgtttcaaataaatataaaattagagacaaatttagttaattgattaataaaagaggcatttttcaacttaacctttttttaagagaatcaggaatgatggaacattaattgtcagcaaatcagacaagtgaagtgggcccccacttatataactttgcttttttcatttctttcttcttttaaatttaaacaattcttttcatattttgtttgtatacgaagttacgttagagtttgtgtcaaaagagtagaaataaaagttgtatctatacttaccttattaccttattatttcatattttggcacaactctactgtggaaaaaaatagttatagttgtactgtaagaatgtagctgtgctgtgagaaaaaataactgagtatttggtaaatataattttaaaagaaatttgagttaaaaaa

SEQ ID NO: 293258 - DNA, 557 bp, Cannabis indica
cttccccttgtcctgcgtggtcttagccagcttcttggaagaatttgcggcaagagtagccaccacatcgctcttcctcttctgggcgacaacgggcgatgttgtcgctattgcactcttcggcttgattttaaggacgggcgcggacttcaaaaaagtcatctctgcgaggataaataaaagataagtgtaaataaaactcaaggcatcaatttataacatgagataaattacctgagactggtcgagaagtttgcttggagaggcgtttgtctatccgctcttgttgtctctcagacggttctttgtatactggctctctttgaagacttgcgttctctggaatcagctgatgttctcgcagcttggcagtcgtacacagtaatcgccagtcgcgatcttgtaccgggaggctcccaaggatttcggctgtttctctgcgagtcacgtcaagtgccggtcgagctggtctatctgcgagaacaagaaagagcgagttagcataagatctcaaagtaaatcagaaaatgacctaagtaaaaacacgcgacatacta

SEQ ID NO: 293259 - DNA, 575 bp, Cannabis indica
aatatgtccgttttgtttctggattcaataatgtaaattttattgtttggatttcagatttggctcgaagcaatttggggccagatcttaaagttttattttagtgtcgtcggttctaaatcaagacatatagtgcaaaaataaattgtatacctataagtgtcggttcagaactaataccaatatccaaaagtctcattttaaaattaatacaatgaatatactttatatcttggtaagataggtatcgattccataaaataaatataagtgtcagcctaaaattgacactaaggctatgtttggtgggagggagggagagtaggatggatggagaggttagagaggatagagagtaagagggatggagaggattgttgggccagtttggcacaactgtgctgtgggaataagcagctgtagctatgctgtgagaaaaaaacaactgtagcagaactgtagaaaaaaaagctaagctgagtgtttgggtaaattataatttttaaaagtactgtgacttgttaaaaactctattataataatgataatatttttaatctagttcattataatca

SEQ ID NO: 293260 - DNA, 460 bp, Cannabis indica
agaagtacaaaatttacctattacaaattatttataagatctattgacaatcagactatgattaaaatcagatcattcggtctgtcaacaagttaatcatagcaatttagatcaaataaataataggtttgttaaaaaaaaaattgaataaccaatataaaattaaacaaacattgtccatgtaacaaatgtgaaataagatattaatataattaaattattattttaaactaaccaactaaattttaaaaatttagggttgttaaaaacaaccttaaaaatctcaaaatttaaaattcaaaaatgaaaaactaatttaaaatatctaggtgtatttgaattatttttattgaattaaattaaatatcaaataagatcaatgatttgaaaataaaaatgttcaatatcattttcaaatcttataatttaataaaatcaaaataataaaataaaccaattt

SEQ ID NO: 293261 - DNA, 790 bp, Cannabis indica
tcaactttgcttgctggtagatgagacatgttttgatgtagtcaaacacgtcatcctgcatagtgtggtcacgtagtacccgtgctttcaaaagagcatgaatctttttgccactcttgatcggcccgctcacaacgtgtcatgagactcacttagcaacatcctcctctgatcgctcgcctttggaacaaacaaatgaccacctttagcccataataggtcattctctatgcaaaactagattatctttccttttcttgtctagggttataatgttcttggcgattggttccttatctaggttctcctagatgtgctccttgatgggtgtaaccacctggctatctagaatacttgctagcacctttagaactgccaactcggctttacggctcaagacatcggtttcttggtttatatttccagccttgtgctcaaagtagaagttgaattctttcaagaattcttgtcatcgttcttgcttggggttagtttaggctgcatgaggaaataactaacaatagtatcatctgtcctcaccacaaactttgactccaacaagtaatgcctccacatctataaataattaataactgtcagaagatctttcccttacgcaatatattgcctttctgccttagaaagcttacgacactcatatgcgacgacactactagaaaaaaaataattagtaacacttttttttaacttaataaaatgaaaaggtaacacttttacaagtgttgcctcctagagtgttgccaaaaatttaggtataaaacaacacttt

SEQ ID NO: 293262 - DNA, 463 bp, Cannabis indica
attaagagactttatatgtgtaattaataattatattaaatgacaatattatttaataatctattttagttattaaataattagttttggcatttaaatggttagaattggaaaattggcattttctggaaaatagaaataaaattgtggaaactgcaaaatccaagtgaggcccatcacacccatggccgaccacttgtattgcatttcccaattattattttcatttttttaaaatgccaaataattactaacccaaacctagcagctatctataaaaggaaagtggtggctcacaccaaataaggcaattaagagtttactctgtaattcaggaaactgcctctttcagaaagttgagcttcccttttctctatatatagccgcccatcatctcttcttcatgcatgaacaatacacaacaatacaagagagatacaattttgaattccctagtgagaga

SEQ ID NO: 293263 - DNA, 941 bp, Cannabis indica
aaaatttaaatgtataaaaatattaaattacataaaaattaaaatatattatttattattcaatatactaattattatacaaaatataataaaaaaattaaaaaaaatatactaaaaaaatacaaacacatattaataattataaaattttattaaaagatagcatagtatacaaacacttagagtaatgtaaatgtgtatttatttaacttttctatttaatttttagttatgcttattatatataatttatacttaatttaattatattaataataaaataataaatatatatgaaaaaaaattagatttttttacaaaaataaaaaaataatattaaaatacaaaatcttaaagctgaaaaaaaatcataggaaacccctatggagtcggttatttcagttattatgaaataaccgactccgtagtaaccgacaccgtagggtccctacgaagtcgattatttcataataaccgacgccatagggaccctacagaggccgttttttcataataaccgactccatagggtccctacaccatcaactttttttaacccctatagcgtcacctgaaacagcatcgatagcaaattttatcaaaactggcgctgaaaagctttaaaaactgcctctaaagcccaattttgttgtagtggaagcatatagtagtgcaccgacggaaaaagattctttcttcggttatgaatcgaagtaaaaaaaataaaaaataaaatacagaaccattaccgcaccatatagagctagatctaacaactgaaaaattaaaaaaaaaataataaacaaacccaagataaaaatgtttaatctaaaattgatatattgaatctcatcaaatataatacatccaaacaatacatcaaatacaatacatcccaataatatattaaaacaatacatccaaacacaaatatgaaaatg

SEQ ID NO: 293264 - DNA, 972 bp, Cannabis indica
tcacgtttaattatgaaaattatttatagctttcactgtggcatgcccggtattttggaactcggtgtttggctcagtaaaaatcacaacttagtatgttagtagtttgggacagtttattagacattaggaatgtcgggattggccgagaatttagaatttcccaaaaatacccctttagtgttatttatgtgattttagagtgaaggggcaaaatggtcattttgccccattattagtttgtcttttgtgacttaataaattgaaaaataaatgttatttgattttaattattggctgaaataagtgagtaggtggcatttctcttatttttcaaacttagacaaaaatagaaaaatttcaaaggaagctctctctctctcttttcctctccatttcggcctctttgtgcagcaaggaaaaggagattttttcttgtgaatctagtaattttcagcaagtattgtgtgatccttgaagaggtatttctttgtctagttttcttactttgttttcttgaaatttttgatgaaaaagatgagtaatgcatgatgatgttgttgctgttaattgttgttgttgtttccattgttaaaatgttgatttaagtaggtttaattaggttgaattgcatgctagtatttcttgctctagttggatagattttttgttaaaaagcttgaattttcaaagaaaaattgaggttttagtggctgtagtgtttgcatgagttaggttttagtttctgcagtgtttttatgcttgaatgtgagttagaatcatgatttggatgcatgttagttgtttttaaccaagtttgagtttggaactcaaagcttgggctttaatggtgatttttgtttctgtactttctgggtggatttgatgctttagaaatgttctaggggttgtatagaacaggtctggaagttttggttggtttggagttgatttgagcattgtgtgaatttt

SEQ ID NO: 293265 - DNA, 511 bp, Cannabis indica
caaattaatcacaactatttaagtaatcaatggcttaaaaaatataaaaatgtaaccattcaaacttgtttcatatgtctatatatgtaatttcatatgcttataggtaggaaaatgaaatgatcaaaccaaatggggaccaaagggcatgagaagggagtagtgtgggggcgagtggggacaaatgggacttcacgtgatcactactacccaatcagtaattggagataatattatacatgtgctatgcttgcctttcaagacaaacaaacatgtttcaaacatacattacattaatattcatatatacatatatacagtaaaaaatctatttaagaatacaattaaaccaagtaaattatattctaaattgaaagaatataactaaatagaattacagtaaaaaaaaaaaaaaaactcaaaatactaaaaaataatcaatataatgataaagaatctttaatactatatcataagaataatttttgtagtaaatataatatttatacat

SEQ ID NO: 293266 - DNA, 636 bp, Cannabis indica
actttgctaaacatatatctttcggtattcagtgcaactctatgtacactaatatcgctcttactaatatattatctaataggaaataataaagcatgcacgataaatatgtaaacagatatgatactattatactaatcttaccttgatttcgaattctgatgtgtcgttcaacctaagtggaaattgttgcttaatgatttataggcccctaagccacaacatatataaaactgataagtgatacgctaaatcacttttcgaagacttagacttaaaataaaaaatgtctctatcgatagataatatgacaaccctaaatatcgataacataccaaaaaatgagatttctaagaaaataccacaaaaaatggcaagccattttctaaaaacgacaggccattttttcgggtccttggctactaaaaatggtagattgtttctataacaacggtctgtcattttttactgcaaaaaacacaaagaacctcaattctcctagaagtttaccttaaaatctcaccaaatgctccaaaaatacccatttgagtcataaacaacgtaatctaaagtggaaaattcaacatcaaggcactaactcaaaaaatcaaccattaaagagctaagtttgagctt

SEQ ID NO: 293267 - DNA, 744 bp, Cannabis indica
gcatccaattctctacaagtagacaatggaattttggcagtagacatggtatatagagggagactcaaggcaacagactggatcaaggtagccctccctgcaaaggataaaagcttgaccttccatccttcgagtttcttatgcaaactttccttcaatcttagatactcttctctctttcttctcttaaatatgaatgggttacccagatgtctctcatcacctgtgcattctttgacttgtaaagccaagagaaaaacttacacacaagctaaaaccacatactcctgcaacaaggttagctggatagttggaagtaggatttatttaattttaaataaataaatttcgaaaaataaataattaaataaataaatatttaattttgaaaaataaaataaataataatattaatttatttttcgaaaataaaagaaataaaattaattttaaatttcgaaattatatataaaaaatatttaaaatatttaaaattaaacctacaattttgaaaaattaggtttcaactaacctaaatatcatttcaaaatttgctaactacttttaaaaaaaattaaatgctattttataaataaaaatcaaaataaaaaattaaaaaagaataaaataaatatctttttcatattttaaattttatttaaataaataaaataacaaaatttaaaagttaagcaaaatatcttacatctatttaaaattgcatgattatagttatcttatttt

SEQ ID NO: 293268 - DNA, 626 bp, Cannabis indica
aataaccgttaattacacctttaaacctcactacaacaaatattttcattctaaaatatatatttttttttgaaaaggcataacatatattataaaatacataataatttatcaatataaaaaaatattaattataattaattatttagcctatattgtaataacatatttttcttataattttttagtttaaattttagaaatttgagtttctataataatattataattaattttgttttataagatacgaaaacaattttttttcttacttatttttataattaagtaattcttgtattaaatgaaaattttaagagtttgtaatttttgtggtggttagtcttacatcattatttgttaatctatattaattattgcattaggtaaactataaaaaagagaatttatatataaaaaaaaagtacaaaagagaggaataaaataaaattggtaagtgctataaaatttggatcatcgtatattggatatttgtaatagcaacaaatgtctttttacttttttattttaactttttctttattttggttttctatagagttttgacattagtagctaactttttttctctctcataaaaatatgatgtttgctgactcaatttt

SEQ ID NO: 293269 - DNA, 662 bp, Cannabis indica
ccggaattccggttcctcgcaggcagaactcaaaaattcacacattgctcaaatccaatccaaacaataccaaaacttccagacctgctatttagaccctaaggaacaattctaaagcataaaaaccaagcttcatgcaaccaaaccaaaaccaccattaaagcatcaagctttgagttctaaactcaaacttgatcaaacaccactaacatgcattcaattcagcccaaatctacttaatcatgcataatttaacctctgaaaatagcagcaaacaactacagcaagcagagcaacagattcaacatatttctttgaaaaccatatttttgagctaaaaacttccaatcttgaatcaaagcaaaaaccatgcattaacaagctctaatctacttaaaataacaaagttaaacccctgaaaataacatcaaaacacagcagcaactagacaaccaaatcaagcatgcattactccatttcatcaaaaattcaagaaaactaagaagacaaaagtaagaacaatacctaaagcttgagttgcacacaaattagcttgaaaacccaaagaaaattccaagttcttgctgcttcaaaggggccgaaaaagagagagaggtttgagagaaaaaggctttttcatttaactttgaaaatttctaatt

SEQ ID NO: 293270 - DNA, 521 bp, Cannabis indica
gctatcgaaggactagggcccttcgacacaacatatttaaccccaaaacgtcttgtacgacgtaccggaggattcggaaagatcagaatcatccaccgcggcctgaaaaaaacaggaaaaaaaaagttaaaaaaaaattgaaaaacaacattcacaaacattaacaaagaacaataatataaacatataaacacctttttttttttcggccacgtgtttcccttgatagagggttgagcctctttttcaactggaactttagaactagttccagattcaacatgttcgacaaaatcttcgtcagaaggatcaacattaaccttgaaacacaaaatagaaaccggttaaaaaaacataccaaaacaacatttttaaaaaactcataaagaaatttagaaaccggttataataataaaacaacaaatgttaaaaaacaaagaaaagaaaccggttaaaaaagggtgtaaaaactcaattacataaaatcaacatttgaaaacccatttcttaaacaaaaaaaa

SEQ ID NO: 293271 - DNA, 753 bp, Cannabis indica
ggcccatggtccccatactagttgagaccatactgcttgtaagactcagataattgattttaattaatcaattataattctaaaattagactatgtctagtttatgaattttcactaagcaagggcttaattgtgaagaaaagagattctaggttttatttattaattaagagactttattaagtctaattaataaatatattaaatggaaattttatttgataattaattttaattattaaataattagttttggcatttaagtggttagaattggaaaaatgacatttttgagaaaataaggaaaaattgataaaagtgggaaaaatacccaagtggggcccactaactatggccggccacttgcaagggtttttccacttaatttttctattattttaatgcctaattaatcctaacctaaacctaggtggttgcctataaatagatagtgatggctcacacttaaagatgaagaaatttcttgccttcagaaaaattgagccatttattctatacctatattcgaaccagccctctcttcttttcttcttcatattttcataccttgagtgatagagttagtgtccacacacatcaagtggtatctcaatcatagtgtgtaaggctgtgaagaatctagaatcaagagaaggacattcgatcagatcttggtgatactctggtacagacaggataccatgtgtagagatctgagcggaaggagtcattaatgttccgctgcacccaatg

SEQ ID NO: 293272 - DNA, 503 bp, Cannabis indica
atcacagaagcccaaatcaccattaaagatcaaagtttgagttcttaaactcaaaccttgctcaaacaccaccaaaatcaacaagcttcacataattcaacttaagtcacctcaatttaacttcagaacacaaattcaaacatcgattcccaacacagaacgctaactcagaattcacacactaaaaccttgcttgaacttaggaaaatcaaaagaagagagactaagaggttataccttgaattaaagcactcaaattcttctaggattcactgaaatgagttgaaaaatgcacaatccctagctggtttcttgatggttcaaaagagagagaattgatgagagagagtgaaattttttaggttttttctaactttctctttttaaaaagattaataaaaacttaatatttaataaataaaatccttaaaatcagagtacttatgcccactaaaagacaagataaggactctaaagaaaatgactattttcgccccttaaca

SEQ ID NO: 293273 - DNA, 594 bp, Cannabis indica
atatatatatgatctttcttcttcttcttcttcttcttctttcttctttcttctttcttgtttgttgttatatatgttgataatatttgttgttgtgagtctaaaatgtttagaaaaaaaatgaagaagaaagagtgagatttatagttaggaatagttgttgattgtgatgcttattattatgaggaacaaaaaagtcttactacatctgcctacctctctctcataattcaatttcattaattaattaattaacctcatttctagggtttaattgagtaaaactcacactctttcttactttttggattagttcattaatatatattaattaatccaaatatatataacaatgaatatataataacacaagtagacaaaaagacaacacgatttttcttctactttataattttaaattgtgtaatattactttttttcataatatatatgtataattaattaatttaatatgtttgaaatgaatgttggagggtatatattgatcagaagaagcatccatcctcttattttgtcattattatccttgaaatgtattccattacataattcatattatcttaattaattaat

SEQ ID NO: 293274 - DNA, 804 bp, Cannabis indica
agaaactaaaaggaggtgcaagagctataccttggcttggatttactacacaagtagctgagaaagattaaatttctgtagaaaaatccaaccctaacagcccaagaaaaccgaaagagagagagagagcttgaaagagagagtaattttccaaacttttctaattttcctaattttttgaataaatgaaataaacattggttttactacattactttcagccaaagcaatataagaaaaatgattaaacttatttaattaaatccacaaaaggacaaaaatttatggggcaaaatgaccattttgcccctcccacactatgaatcatgaaatggctctaaagggtattttgggaaattataaattcccgactgatcccgacattctcaatgtctaacaataccgtcccgctatactaaaatactaggacgtgattctactgagccatacaccgcgttctaatgttgtcgggcactgatcaagaaaaaatatgagatttcactatatgccatataatatgcattctgaattcaaataaatcatcataaataaataatttaatattaataaataattttcataattaaacactaattatctgctagtttccaaatttaaactaagcggtctttacacggttgctcacgcagaaagaaacttttcaaaattgaagctgatcaaatcttatctacggtcaacgatgtcccaagaaagattgagtggtttggctatgttatctattgaaaaagatatagctagaaaacttgattatacaagtttaattagtacatttgcatcacaaaa

SEQ ID NO: 293275 - DNA, 639 bp, Cannabis indica
ttttaattttttatgagttgttttgggttgttggtatatagattttgttgcacggtatatttttctattgtgttgtatggtatattattattcttagatgatatttattttttattatgatatgtataatagtggtatataattttattagcataataaatatattttaatgtatgtatataattttattgccatgttacatatatttaattattatttttatattttttgattgtatgattatttatttaaataatatttaattagtttttattttattataagcaatggtcatggtatatatattttaattgtcgtatataatttggttagtacagtatacatacatatatatatatattagtaatctatatttttatatttatttattttttatatatatattttggtgaatggtatatgtatattttgttatacggtatattaatttttttaaataatatttaagttctattttctattgtacttttgctgacataatatataattttattagcatcctatattattttttattttttatttgtttgttattattatatatatttctattgtaaggtatatattttatattatatggtatataagttttattgtatagtatatcatttttatttt

SEQ ID NO: 293276 - DNA, 525 bp, Cannabis indica
agaaaaatttttaagtgagagcatcatatttactgttatagatgagggcatttgtcaaatatttttattggttgaatagacagggtgcatggctttaccatgagttggggagtatgtgatttttttttttgaaaatatagagagagaatatttatttatttattcttgcaaggtaatagagacattgtaatctacataagatcctttataaacgttggtatttcaggaaaaaaaaatcaattttatgatttttaatggaaagatatcaatattatgtaaaacttttgctattaaaaacatataataatatcattaaaaaaatatataattataattctttaagttttgggtctttttttcatatatatatatatatatataaatatatatatacatattaaatttatttttggtgtctgtaatatatataagttttttgtaaggttggtctttttgcttttgtttttttggttttttttcttttttcaaattaataatgaaaaggaggatataatagaagaattg

SEQ ID NO: 293277 - DNA, 524 bp, Cannabis indica
aagtttgtaataggtttattctattttgactatttttttttatactatatttaataataagtaaagtcttttctcactttcagagttggaaaaagaagaggtacccttcactagtagctgcagattatttgaatgtgtagaggttgaaggaaagcttctcattaggtattattattattattattattattattattattattattattattattatctctaatttaatgtattttctaatatacatatatgttccattagtattttgcttgcaatatattgtaggatataattactcaaatattatccttttattttatttatttcgtgttctgttttgttgaacatgatctgtacacaaaagatatataatatttgacaaagactatatacatatatatatatataatgttatatatatatgtaggaaaataactggtttggaagaattgccactaaaacctggcgagttagtcctggtatgtctcccatctcttgttcatgtgtgctctttttattattat

SEQ ID NO: 293278 - DNA, 438 bp, Cannabis indica
ataaaaaaattgttttttgttttttttttttttgttttttgtgttagtttattttttctaattaaataatatttggagtttataaagttatgtttatttatttattttttgatgtaagaattgtatttcaatagaaaattcgtccactaactcattagaaaataataaatatatagaaacaatagaaagaaaatatatttattttagtatagtataaattggctatgtctatttttatatttacaattataataaacatactaataatataaaatactttgtatatatatgtttattttgttttctatttattaaacatactaatttaataaacaaaataataatattcacatatgtttattatatcactctatgtgtatcatgtttatttttagaaattttaaacaattgatttatatttatatacattaatgttta

SEQ ID NO: 293279 - DNA, 646 bp, Cannabis indica
tttttttttttaattttttttttctaaccgatggaacaatctcagcccatatgatataaaagtgagagatttttctaattagatagaaaaattaagcataaaaactttaattttttttttacttttaccctattcatgggtaatacccattaaaaatagcaccctaatatactcgaagcatatttaatactcctagttaattagacaactccatactagttcattgtcctcaatcatgttattaagactttttcttaattcataatttgaaatttattacttgttaaatctcattatacaagtatccttaaattttaacaattaaataattattgtatttcataaatatattgtactataaatacaatttcaaatgtttattcaatactttattggcatccacaattatcatgttaaatcattaaatctctatctaataacattatagttaactaattattttccattgatatcaaccaatttattctcttaagaatatttgaaagggaataattattattttatcttgaattaaatatagaagagtcctaccgtcaacctcctgctacaacctcttagtcaacctccacgcccgaaaacacatgctagaatatttttttctcaaatttttttcacagggatgttt

SEQ ID NO: 293280 - DNA, 653 bp, Cannabis indica
ggcaaaaggtgagataatgatgtcgaggttgcaactcaaaagattaatgtataatttttattgtctttgtttggtttcaaagacttattttgttttgtttatatatttttttgatgtatttagtaagaagaattatacaaccttaaatggtttatgtctctcactttttctgtttataattagttaattttcaattttaatttagttattatatggttcttaaaaaaaaaactatatcattgaattaagtcttacatttattagttgtatttgagttttataattgaaatttgttttagtttcatgtttattaagttttacaattacgttattttttagttgtttttatgttgttcaatacatgatatacttacagttttgtttaactattaatcgtattttaacggttcattgttttattaattttgtcatcttaatattttttaggtgcgtgataagacctctgatggtgtttacaagttgaaccttctaaagaaaaatattacaaggcttataacttatttttttatttgtcttgtttgaaacgttctctgcttgtagttcattcatttgaagaaaaaaatcatagtagaaagttgttttatagtttgtttaatgttgttttgatgttgttttaattgctgcaggacttg

SEQ ID NO: 293281 - DNA, 565 bp, Cannabis indica
aatgatttttttcatttaatgattaatttaaaataaaggaactaaaatatattattattagaaatcgaattaattagaaaatctagatagataatattcttgcttgaagtatttttttagtaaagattaatttattttaatgtatttcgaaaattgtatattttatactttaattttttttttgaaatacaatatatatatttatagaaagttttaatttgagttgccaattaatttaaattaatacaacttaaattaagtaattttcttaatatttattggaaaattaatactaagatggaaataattcatttattttcttaaccatctaagtttcattttataaatattaaattaaatttatttagagttttattctaaatttaaaatttaataaatatatatttaaaataaataaaagtttagaagaaaatacattttaaataatgagctttattattattaagatattcgatctccattgttggtttaacatagctatgttttagtgagtaatcctccctaatggaggaatgttcattagcagttagcaccgtttaatctc

SEQ ID NO: 293282 - DNA, 641 bp, Cannabis indica
gaaagtaaaaagtttttattgtatacactgtatcataagagtatatatcttacactataataaccacacgatctaaaattaatggttaaaaaaagtactctaccggtaaggaacttttgctaagtcctatcataatcttgccctatatacatatatatcaagttaaatttgacttaaaatatattataaagttatatttagtcctgtttttttatttgtactccaatacacagtgcaaattagatataaaaataaatactaccattaatatttattaaaaatatataaaataattaattttatttatattattttaatattttataaatataaaaaaattcttaacaaatagtattaatgagaaataaatatataattaaaaatgtgatatttattgtgagctaaaaaaaagcattgataactaattctagagtgataactttattactggataataatatatagggtaacatcatcttggatcttgtgttttacaaaagttaccaattagaccttctgttttgttaaatgacaaaatagaccttgtattttccaaaatggtacaaataggaccctgagcttaatttttgacaacattttatttaatataaccaactcgaaaatacgaacagatacagaaa

SEQ ID NO: 293283 - DNA, 798 bp, Cannabis indica
ttttttgatagaaaacttcatctcaatgagcacattagactcctttatatagtgtttagatgatcactctaaggattcaaaataccacctcatttctctcccataaatgagtattacattttgtaacaactatatcatcataattttgaaatccttaaaccaaattgtgtaacaacccttttattacactaataatatgtgatcaacacaagagttacaaatgacaacaaattgtaactcctctccaagttacaacatgtaggttacaaaagtgtaggttataaaatcataggttacacatttatttaccatacacttaatatatattattcacatatatttatcacattttaatctactttattattatattataaaataatataacagaaaatacagtctttttatgatgtattcttattaattttttgttaattttttgttatttgtatgatatttaatgttgttattttgatgttatttagatgttattttcattttacttttatgtagttttcttgttgtttctatgaaaatccgtaaaaatgtaaaaaaaaaaaactgtaaacgtaaaaatatatttttttttacaaaaaaattaagtgccttatataattattctaaaaaaagaatacaacgaaaaatttagttgtttatgtagatatgaatcatcagttacaccacggtaggtatctatttatatatatatataaagaataattagcttttttagtccctctacttatgacactatactatgatgccccttaatttataagtgtaggttaaaaatacccc

SEQ ID NO: 293284 - DNA, 496 bp, Cannabis indica
aagagggtgatgatcaatacacaaatgttggaaaagtgctcaaagaaagcattgctgctttacttatagattcaatcccattataaattaaaaaccattatataatacttaactaaattacttaatctgtccattatattgtgacaactgaatactattatgtttttatgaatcagtacttttatggttaaataaacttgtatcttctctttactattaataaaattagttaattattataatttgtttttaaattttttattatggtgaaatctttatgtagttgtggggactaaactaaatttattattgtaaatattatatgttttaagaataacttaaataagggtttttttcataaatatacaagaaaaataacataattgcaaaaaatgtgcaaaaaaaattattttaaaaatttatacattttgaaaacttattacatgaaatcatacattttaatcattaaataataaaatatgtttattaaaaactc

SEQ ID NO: 293285 - DNA, 452 bp, Cannabis indica
tgaggatggaaggctgtactgaacttcagtttggtacccatagctcgttgcaaactctgccaaaattttgaagtgaacttttgatctctatccgaaactatggatttcggcacaccatgcagtcttacaatctctttaacatacaggtctgcatactgatccactgacaaggttgttttaaatagtagaaagtgagcagacttcgtaaaccgatctaccacaacccaaattgaatcgaataaacctgtggttctaggtaacccaaccacaaagtccatcgtgatatcttcccatttccattcaggtagggttaaagacttcaacaaccctgccggtctctgatgttcagtcttgatctgctgataggttaagcatctcgatatgaattctaccacattcttcttcattccgctccactagaagtagggtctaagatcttgatacatcttggt

SEQ ID NO: 293286 - DNA, 819 bp, Cannabis indica
ttcatgtctgcatattccttacgatataaaatgcaatcgttcggacatgcatgaattttttcatacttcaatcctatagaatttaacgtttttttcacttcataagtagattccgggaagcagttggcaaatggtaagatatctttaaaagcagctaaaaattgagtaaaacatttatcgctcactccattttctgcttttatgttgtaaaactttaccattgttggtaatcttagttttttacaaccatcgaacagaggtttatcagcatcactaagaaaattatcgaatttctcaggatcattaagaaattcctcctgtgcttcgttaagcaagtccaatggataatcatcgaaatcattaccctcgatatcatctaccccccgctttcctaatggatatggatcattaggtaaatgttcgccatggtaataccaattagtataacttctattgaaacctcgtaaatacacatggtccttaatcattgtaatattccctttagatacattacaacaatctacacacggacaatgaatacgatcgtgatttttagaattctttaaggcaaactctaaaaatgcatcgaaccctacttgaaatcgcagtgtgtctctctcctcacgcatccatgatttatccataacaaaaatcctatccaaaaaaattcagtatttagtaactaattatagctagttactaattacacaatgtaactaactaagtttctcacaatttattcatattaatttataaattactcaaattctcgttttagattagttcatattattaggttgttttgttgattagaatatt

SEQ ID NO: 293287 - DNA, 586 bp, Cannabis indica
cttattacgatatatcgtttatcgcttatcaaaaagactcattgtcgttagataaaagcgaagtcaacattttggtgctttcattgagagcagagtcacagattgctctttcgacaggatggtgcaaactcgtagaggcctgtccgacccagaaaactcacagatgttggattcgacgttgcaggacccagggagtttgagggttccacccgctgtcaatcctaaacagacgggaagcgtggtgaatggtgggagaactcatgttacttaaactgcgcctggtgtgcaagagaccagaaacaacggttccgcacacagcaaggacgttcataacatgactgttccacaaggcatcaacacccagatgaccatcggagacgcaaccgaattgcaaaacctccgcgctgctcttggactcatgcaaggtcacaacaataccctgcatcacgatcaggaggaattacgtgccgcagtaaacctcgcgtttgatgaacagaggcgtatgttcgccgagtggagggagaaagagatggaggcaccattaaagggctcaccatgtagagatcgaagatcgtagtcggcatgc

SEQ ID NO: 293288 - DNA, 605 bp, Cannabis indica
gaattagtggatgaatttaccctggttcggggaacccaagcactagtcggctgagatgtgttctcagtgcagatgaagcttgtaaaattctagtgttgaatctttgattttgttctttttatattcaagcttaaatcaagataaaatcaatctaaatatgaaaaagataggttagacaataacttgagcttacactcataattaaataatattctcacgacaattttaccgtctctatcggtcattaattatttacaaaaaaaaaaaaaagactttaagtgtattgtgtgaattttccaaaaactaattacataactaatgctaaaaaaataatgacatgattataaacttctctgtgtcaacttttttcttttgctacatgtatatatatcaaaacattacaataccgtacggtacagtaaacttttacctagccaaaaaataaaaataaaaaatacaaatagagaaaaaagaagaagagaaacccaaagcagaataagtcgtgctactgggttcaatcttgttgagagtacgtatccaccactataatcaaagtaggtcactatcactaacatcctttttaggcaaagcatcattactataag

SEQ ID NO: 293289 - DNA, 666 bp, Cannabis indica
acatactttctcagcattgatacgtgaaaaacattatgcactgctgacaatgctggaggtaaagctagtcgatacgctacttgtccaaccttttcgagtatttcaaatggccctatgaatctaggacttaacttgcccctctttccaaagagatttaacacttttcattggtgaaatccataggaaaacatgttctcctacctgaaactctatgtctcagcgcttaggatcagcataactcttttgcctactttggcaagtaagcatccgtgccttgatcttttcgatggcatcactggtcttttgaactaactcaggacccaaaaactttctttctccagtttcatcccagtgaataggtgatcgacacttcctaccatacaacaactcatagggagccatccctattgtactctgatagctgttgttataagaaaattctattaaaggtaggtacttactccacgaaccttcaaaatctaacacacaggctcgtaacatgtcctctagaatttgaatcgtcctttcagactgaccatctgtctgggggtgaaaagctgtactaaacttcagcttcgtaccaatggacttctgaagactttgccaaaatttggaagtaaattttggatctctatatgaaactatggatttcggagctccatggag

SEQ ID NO: 293290 - DNA, 491 bp, Cannabis indica
aaacactctcactggtttcaatgggttcattgcaaacattgttaaggatttctatgctaatctcactgatgattttcttgatgagaattctagactatttcggagagtatatgttagaggacattggttttctttttctgaaaaggacattgctcaagctttgcaacttcccgagaatgtctccaatgcagtgatgtctatggatcgtgaattgatgctctctgaactcacgggtgcacgatctgaattgaaatcaggagagagtcttcaaatcacccatcttacatttgctcatgcatctcttatgcggtttgctcttagcaattgggttccaaactccaacaagaccgtggtgtctcaagatgtggcctcattcttataccgcatcacctctggagcttcaattgacttggcctcccacattttgaaccagattgtttcattccgaagaggtaaaaagccaacctttaagtcttgttttccaaatctaa

SEQ ID NO: 293291 - DNA, 439 bp, Cannabis indica
ttttacatgttaaaataaaaacttatattatctcttatattaagacatggaaaataataagagaacacgaattatgttgattttgaattaagtgaaaaattgataggaagagattataaatatgaagaaaaattacttatatttagtaataacattattcgttgttttatcgttgttttaaagttgtaaacatgttgtttaatttcgttgttttttgagcatgttgctttgacgttgtttgtatgttgagtttcagtggtcaaaatctgtaaatttcctaaattatatatacagttattttaatgtttttatatcgttgctaacactaacaactattacttttttaaaatatatatatataattataccaatacttgatgtagaaattaaaaatataataatagttgtttcttaatgtactaaaaatataaacaaatta

SEQ ID NO: 293292 - DNA, 655 bp, Cannabis indica
aaggcatggagttaaatccttgacctggagccccatcttctcgtaagcagtcttaaacaaaatgtttgaagaagccccattatcgatcatggttctggacaccattttgtttgctatctgggcttccacgactagcgggtcattgtgcggaaatcttatctggacagcaccttcgtcgttgaatgttatggttggctctcctgcgcgtggaactttgggcttcctctcttccacggctaggatgacttcttcttgctcatattgagctgttcgggcatatctttctcgagctttgcccatgtctccagcgatgtgcgggcctccaatgatgacttgcaagtgtccatctattggcggaggcatcagatcctggttattctgaccttggttggccttgacgtacttctgtaagtgcgggttgtttttcttgatcagaagttctatttccctcttcaagttgtagcattcgttggtgtcgtggtcgtagtctccatggaactgacaaaattttgtcatgtcccttttgctggtatctttcttcatgggcccgggcttcttgtacggaattaacgactgagttgctatgtacacactctctatatcttcggtcaagatggtgaatgtagtgtgtttggcctgatcacggggagtctgt

SEQ ID NO: 293293 - DNA, 706 bp, Cannabis indica
gagtaaaaataaataagcctgaaagaaggcggtaagcttatggaataagttggtatggcgcaaggccgacaaatacaaggaaattaatgaaataatcctgaagcggaagcatagccccagtcatcaaatgcgtctggctccaagctccgaagcctccgtaattgtgattgggcgtctccgcgtcacggggcggccggtggtacgtcccggaagtcgcaggcttgatgccggccaccaccacaatttgctccagctggtgagggcaagttaaggtagagtgaagctcggccgcttcccatcccgtggcacgtggcctatacccctcctgggcgacgggacccaccattacctcttccagggtggccaggcgctttcctcccttcttggaagatttggaaccggatgaagacattctggttctgaaaaagatttaaaattccagcagtcaggccccataccaaaccctaagtcaaaaagggaatgggggtcccctaaccgctggaaagaggccccctcggacggttgtcaacaagaaagccttagaaggttttcatggacaaaagtcgggtgcaagaatcttacagatagtgacattacacgtaagcaaagaaaagaaagaaaaagaagggtaaaaatcgagaaagacaaagtcttctctgtacccttgaaggtcatcacgtaaagaacagatgggcctttggaaaaa

SEQ ID NO: 293294 - DNA, 1361 bp, Cannabis indica
ttttttttcaattccaatcacaatgctaaaaattacaccaaattttatacttttattattccattattttattaatataataggaatattttaacaaatttttacatgaaaaatacaaattgacactctatttacaaaaatactttcataaggtgtgagtaacaattttatctttaatgagtttttatttaccgaaatatcacttacacatctattcatttcagcccaaatatccatttttccttgttttctctcttttttcattcattttttatttttaaatttagcattcaatttctttttccttttctttctcagtttttcattttaaaccaccttccagccattaccatttcgaaacccacaaaaaccacctcccacctttaatattcgtcatcttcttcttacaactgtcttctttatcagtttttttatatatctttcatttcgtatatataataactatttcctgtggctctgcttctccatctctattgccaaaaaaaaaactttaaaatatgtcataatcagttggtaacaaggctaaagagaaacgtccagtcatcaacgatgatgaccctaattttgctccccagtggcttaaggtggtcgtcgtccagtgaagaagaagtcaaaagtttcttggccctaaaaaaattctaactccgacggctagaagggaaagaagaagtcaacttcaagataactgtgatgaaaattgtagtgcaacagttatatctgttacgagccaactaatataaaattacaaaacaactaataattctacatttaatacaaaacgaatattacaacaatcatgtcttatctgttcaggtcgcgtatttgacaatttcgaatcttatttataatactatgatataatagtagcaaaatcattattcaactaacgtgcaacttaattgcaactaaaaatgttaaatgtgaatgcgtatctataagaaactaattttcagtttttttttttttgtcattgatcgaaaattaattgtaccttgatagtaatatgtggagaaacaacggttagacctctgtaaaccaactttatatcaactaatttagtatattaataaaactaaatatgctataaaagtttctttaaagagctttgtattgtattgacgaaatgaaacacttgtaaatatgataaaatccatcatatcgttatcaatttgtaataattgatatgtcagttacagagagttagcaaaatatttacgcaactgttatgaaacattaaaaactagaacagttttttcatgtacgtaactctatctacacgtctattcgtgatttaatatgaataaattcatcattagaaatttaaaaaacagcgaaaatac

SEQ ID NO: 293295 - DNA, 537 bp, Cannabis indica
ctaagtttttactcgtcctcgagtaaaacactaaataaacattaaacaagtcaatctccaaaacatgagtaaatttcaagtagcttcaataacatgattatgaaaaaattcacttatgcatataatccagaatttcagttcaattacacccttgacagatttcaatttattttcatttagctcatgaaaccatagaatgcaattactaacaattaaaccactttatgcatgccaattacaatcatcaatccactaacccaaaattccatatgcttgcaatacttactattctccactaatatagattaatgcacaactaagaatcagaaggtctttctaggcttgtaatgttaggcttagggtaaaggtagttgaaatggtcatttaggcttgtctataccataagcttctccaatcatgccaatcccaatacccctttttctaattacatgagagatatatttttttttttttcaacaagattgcaacaactttcatttattttttttctagatttgacactggttgtcagatttt

SEQ ID NO: 293296 - DNA, 574 bp, Cannabis indica
ttgttctggttcaggtcccaggtcccatttcagagtttggtttcgggatccagactggggtgtagttctaggtcctgaccctggttctgtctccctagtctggttccatgtttgggtttgagttcaggtttgggttcgggtcccgagtgcaggtttgggttaggatagtccattccccaattcgggtctaggtctgatttgtagtccgggtcctggtccggttacggttttagatctaggtccaatttcagttatgctcccaagtccaagtcctagttccaatcccggtcaacttccatttttggttccaattttgggtcacagggtacgggtttcggtccacttttggatttgggcctgggttcaggtccgggtatgggttcgggtccttgtcagggtacgggtccagggctgggtcccaaatccaaacacagactacaggttttgtccaagccctgagtccagatctggatcccaatctcggtcccaatctagttccatttctagtgccgggtcacgagctgggttctaggctcaagttcgggtctgggtcgggtactaggtcccggtccta

SEQ ID NO: 293297 - DNA, 580 bp, Cannabis indica
tagagctcttatatatgcaattactgtttttctatatgtttcttatggtaggttatgcgtctctggtcgttaggaaactataaatgtttggaagaatattcaacaccagactcaacctctgtagttgacttcgattttgatgaatataaggtaacttgaatacatcagcaaatcattgtagttcatgattttctttcctatgttagtgacattgtttgtgtttcatagattgttggattacttggcactcgtatatgtatatggaggcgagatggggcaagaagtgtatttcctccttgtgagggtaccttttccaagggtttatgcatgcggtatggtgcttcatcctctcatttttacttggtcatttgataaaaatattgtaaaaaattatgaaaattttagttagaaagataattcatgatcactggcttatgttaagtccgaaaatgtgcatcacttggaactaagcagcttcgccttttacggtattattgcttctgaccctttctctgtcatgtctaaatttgtgttcttatctatttatagatacttggatcctgaggctatggttgggtgt

SEQ ID NO: 293298 - DNA, 506 bp, Cannabis indica
cttgatacatcttcgttgaccctagatgaactgagtaaggagtcgtatgagattcattgatgatctcttttttgatattctcagccatggggacacaaacacgatttctgaatctcaacattcccgtttcatccactgagaaatcattagccttcccagccaaaaccctagctcggctttttaccaattctggatcttgcatttgtacttctttaattcgctccaaaagagtggattgcagggtaatattagccaattgccccacaaccaactcaatcttagctcgggtcatctcatttgctagctactgggagatttgtttcacagtatttaactgactctgaccctttctactcaaggcatcagcaactacgttggccttacctaggtgataaagtatctcacagtcataatctttcaccaactctagccaacgtctctgtctcatattcaagtccttctgggtaaaaaagtatttcagactcttatgatcagtgtatatctca

SEQ ID NO: 293299 - DNA, 557 bp, Cannabis indica
ttacttatctgtttgtttttctgggtttggtatttgaagtttctgggaatgtattcttttgagtttttcacgtaacaagtctagattcaccatctctggtgttagggttactcttgtcacatacttgttattatttttgcaaaggaccatacgctctttgtgtactggtcttctagggcatagagaagactttgtttttctcgattttctgccctttctttttcttttacgcgcaatgttgccttctgtgagttctttgcacccaacttttgtccaggaaatccttctagggttttctggttgacagatgtccggagggggcctcttaggccgggttaggggacccccattccctttttttggtttagggtttggtacggggcctaactgctggaatcttaactctcttttcagaatcaaaacatgtctgcgtccggttcaaagtcatccaagaagagcggtaagcgtctggctaccctcgaagacgtttcgctgggtcccgttgcccaggaggggtataaatctcgggccataggatgggaggcagccgagcttca

SEQ ID NO: 293300 - DNA, 999 bp, Cannabis indica
ctagaaggagtaggttggcatagattgaacaaccatagaggacataggttccaaaaatgggtgtattgttaagatttcatctcaattaagtatgccactggttggtgatttatcacctgggcacccacttctcatatgcactagttttttagtagtgatttctacacaagtggttgtaacagttgacacctacaaaaactagtaaaactgatatacggtagaattcacataaaataagaatggaccttagttaatatattattgttcactaacctacaatgttcaaattgaaaaggttacataactcctttgagtctagttagttacaaaaaaaatgctagtgataaatgaacttgtaaaaaatcaaccaaaaggaaatccaaatttgtttttctactacaatttaagtttcttagatgaacttaaaaatgtgatatgatgctatatgtactcctcaactttgttatgcgtaattgtttttttttttgggaggaaaagtgatgtgtaacggtgatatgatgctatatgtactcctcaactttgttatatgtaattgtcttttgaggaaatgtatgtgtaatggttgatgtggactgattgacaagatctgtctcgttttctaaaaaatacacaaattaaaattaaaatggttctcacctcttgtaagaatcgttaaggaaatccatattcccttgtatttgaaggcatatatatcagcaacatttggaagtgctaaaatccttgagccataagctacgattaatttactcacttctcggaaaagaagaatgccattgggtgaggatgagtcaaaggtcaaacgttgggccttgttcaaaacaaactctgacatgaatttcaacaatggggtggtaacctgcgcaatcaaataataatattacttgcaactaatgaaactgcaacctttattcaagtctgtcaataaagtttagcattatcccttacatctggtgtatcagaccactgtgaaatcccttt

SEQ ID NO: 293301 - DNA, 545 bp, Cannabis indica
gctctaattaatcgatttttgaaaatctcggtaaatcataagtaaccaaaaaataaccaaaacaaaaatttaggattaaccgaaattcaggtaatgaaacttgaggtaagatatattagtgttagtaaaattattattgtaaattaaatacaaatatattattgtaaattgcccaaaaagaaaacatagagtgtgaagtgtataacaaatcaggttatttagacggtaacaaattaagggtgtgtttgataatattttttaataagttctttttgttttaaaattacaaaagtaatttttttttcaaaatcatgttctataaaattgtttttacttgtcatttttttaattaagaatccatttttttttttaaaaaaaattactttcaaaatttatttaaagatttttttttaattcaatattttggaatgcgaccccaatttagaccttggaaaccgaacttggacttcgccccagacttggacccaccccttgatcccaatctcaaaactgacttaaataaaatcaacaaataaaaatgaaaa

SEQ ID NO: 293302 - DNA, 949 bp, Cannabis indica
gatgataatattggaataatagccatcacctgattattaattggttatcgtaatttctcatattaaatcactttattcattgccacaaaataatgagactgtaaaatattgtcattttttttccttaccaaaagtgacaatgctccaaaaataaacatccatacaaagtctgctgttctcttgtcaaaagttcccttctctagggacacaccatatctagctctatatgcaaatcaagaatcaaagcacacaaagtcattgaaatatgagagtatttcactttatttatttaagcccaagttcataaataccattttttaatttacatatctttattatgacaaaggctattatcaaaatagtgataaaagatatagtagcgcttggccctcttacattattattagatcaaaagcaaatggaactgaaaagggccccagaaagaagaaattggtaacaagcctccacacctgcaattcgcataaataatttttcaaatatatatatataaataaatttaaaaaactatatataaaggagaaatatcaggtggtgacatgacattcgaaaatcactctaaaattatttttcacttctctctttaattctctcaattttaatattttattaaagtataaatctataaattgttattttactatttttttaataattttttataaaaaaatataaatttacaaattaatattttacaattattttaatttaattttctataaaatataaatattttaaaagttaaaaataaaaagaaattccaaaaattataaacttaaatacaaatataattaatacataaatttcgtttatatacatacataaaatatacaatcaatatacataaatctatatctatatctttatatattaaaagttagtctatctaacggtcatttcttggtttaactagaatatacttaaaataaaa

SEQ ID NO: 293303 - DNA, 576 bp, Cannabis indica
taaatgatatttcaataaactaatgtaattactgtaatgaggcctcaatcatttatctctatcaagccaagctcaaagaaaattatcgtttcacttccaaaaactaatagaagctatagattctatatttatgattagcgctcccactcaattgaagtaccatgtccttaatctgtatgtcacgagaagatctaattggtcaactttaacgaacaaatagaagaatataaataatacaattaagattgaacctaaccgtattaggattaagttttatagacctaagatcaaccagtgatattgacttagaaaaatataacgataggttatggtatcttatcctagtttaatattgatccaatctaatgtatactccatacatctgatactgtcatactttgccaatgccttgaaaaggacataacacttatctaaggtgtaagtatacattatcgacgattatcatgccagtctaaatccagtgtactgacaaattatgggacttaacttttgaacatatcatcatgattatattccactgtgttgacaacactataattaagaataaatatatgt

SEQ ID NO: 293304 - DNA, 529 bp, Cannabis indica
ctgttattaattggtgatctgatcagttttgaaatagttgtttgatagttgatttaacctatataaatagtcggtcagatgaaagtgttagatgcataagttattgttggaaagagttgtttattggttgttttgacagattaaaatagttgtttgcaactacaaaaactgaaccaagtaaataatttacattatttcaggaaacggaaccattacaaatattggtgcagagcaatgggcattgggatgacaacagaaactatgttgattatgaatcaagtggagaattaatttcgaccaagtgcacttttgaggaactaatgagaataatgatggaagaactccaatgcaaccatgaatcaacacaactacaactgaaatatcaactgaaggaaggaggccaaccactacaaatcaaggatgacaaaagtctgttgttctacataaagctattaacgaaggaggttgatttcacaaggtacccattgtgtgtgaacaaaaccagtaacacggcaccacctaaccaaac

SEQ ID NO: 293305 - DNA, 1096 bp, Cannabis indica
tagactaactttaaaggtaactaaacgttagtagactaagttaggagtgggaagccgtacgtacttcaaattaaggaacctagggttaaaaaggtaaggtacttaatttaaagtaccttaacctttactacctaccggaaaaaaaacgtaaactaaagttaaagtactaaaaggtaaaatttggactacgtccccctttacgtacgaactttaagtaccgtaaacggtaaacggtaaaatttttaaagtaaggttgggggtacgttacgttcctaagtttcctaacttactaaaagttcgttagttaaaaaaattttaagttacccgaacctttttaattttaaacggggttcgtaaggttttcgttttaaaacggggaactaaaattacgaaaaatttggtaagggttcgttaacccggtaaatttttaaactacccgtttaccaagttagttaggaaattccaacttacttttacgtaattacgttagggtagttactttttacttttaagttagttacttacctttttttagttaaaagggaccttaaattttttaaacgttaaattttgggaaaaaagtaaaaaaaaaaacctaaaaattaagttaagttaagttaccctaattttaattcggttaaggttaaaaacgtttaaggtaacttaaaaacgttaacgacgaaatttttcgtaaaaaaaaaaaaaacttactttacctaagtaagtaaaagttaaaaaaggtccaaattttaccttaaagtttacttaattagttttttaaaaaaacgggtttcggttaaagttactaaaacgggaacgtaagttaaattaaagtttaacgtagttttttaaaaaaaaggttttaagtttaaattttaaacttactttaagttaactacctaaaaaactttaaatttaaaaaaaaggttaaacgaaaacttaccggttaagttttaacggtaaagtttaaaaccctaattttttacgggtacccccctttttttaactttttaagtttttacgtaaggaaaattaaacggttactttttttagtcgttttaggttaaagtaacctttacgttaattttagtttaag

SEQ ID NO: 293306 - DNA, 482 bp, Cannabis indica
ataaccaactaagcaaaaagatatatttttacctattttcaaggttcaaaaactactaatattttaaattaattaaaaaaaataaattaatttaaatgtgataattagatttgaaatttgaaggcttttgtggggaccatgcacgttggcaaagtctatctaaaaagatcattagacaagaatattaatggtcaacgatcaataaggacacccatgagtttgtcaggaaatgtgataagtgttagaggttttcacatatacctcgcgtgtcgccaacagaattaagaatgatgaccttgccctactcattttctatatggggaattgacctgattggggcattacgcactgggcgaggaggagctaagtatgcagtagtagcagtcgacttcttcaccaaatagacggaggccgagcctatcgtttctataacctacatgaaagtgctcgactttgttgttaaaaacattgtctgtaggttt

SEQ ID NO: 293307 - DNA, 524 bp, Cannabis indica
ctgatcgctttgaggaaaccaccgagatcttgtctgctaaagttaacagtcttcaggatgagaaaagttctctgcagcaagttcttcttcggctaaaggaggagagggacgccaaggtgaccgaggcggaccaattgaaggagaaggtcaatgctttggagactgccggcctcgagctcttctttgatttctggaaggctaatccccaggccaatttcgactacttgggcgacgctaaggacatgtaccttaagtactgcgcggcccaagttgcctatggtgggaaagaggcggctgcttcaacttccggccaagcttctgaccaggctgctgatgcttctcctgctcgaacaacagatcctcctgctccaattggctaagaagaaccgaaccaagagcctgggactccagctgtttaaacacttctctttttatctcctatttatatatatattatatgtggcctcaaggcctttaagacatcgtgaccgaccaagcggtctttaaacttggaattatttttc

SEQ ID NO: 293308 - DNA, 957 bp, Cannabis indica
tcaagctagcaggagaagtacaaatttacaatactattcacaattatatttatagggataatttggaaaagcaaatgtgaatgacgtggtttcaattttccattagtttccattcaaaataaacaaacaacctctttaagtaagactaacaaccatacttttttccaaaaaaagaaaaataaaaagaaaaaaaaagtaatgaaaactttctcagaaattatctaattaaaatacccctacctttatgtctagtatatttatatgaaatttttacaccaaaaatctaatttgcacaatttattacagttttacccctacacgcctacatcaacatttttacttatcatctttcttttattacaataataccacttacacatcatttccatgcacagacacgtgtgccatccccatcatacatcaatcaacttccactctcttccctctcttttttccttttcttttcatttgatttttgattttctttcagttttttttttgtttggaagatcaataacctccattgttgaagcataactacccattattcatcacggttttttccctctcattttttgttcttccaaaaattttcaactcccactcaacccacgattcctcacgtttttttccctctcagtttattcttgtttccaatttctttataaaatggccatcactcgttcatcctcatctccttccccagttcaaaaaaaaaatcgaaaatgggcttgaaatctttagctaacaaagcaaagggtaaacgtccgattgttgaagaggaggattctgattttgctcctcctttaaccaagcgtgggaggccacatgctaagaagaaatcgaagctcagtgtggaggagcaaatggttgaagaaatttctggtaaaaaagctagtgttgctgccgaagttcgaacagaggttggttttcagtttcattttcgtttcccccttt

SEQ ID NO: 293309 - DNA, 504 bp, Cannabis indica
atatgctgtgaagtgaacacaacaaaggagagaggtttaaatggcacatggatcacagcactaacagatgatgccaactcaaaatattccattcagtcaaatctatttattattcatatttaaagaactaaaagataaccattcctccatgcatttgcatctgtcttctgaaagatcaactgcgtgcttttaaaattaaggtgtctagtataaaatcaatattttaggattatggtgctgacccaattaaaaaatattgcattaaataatctctaatattaagcactaaaataaacatccttattaattctgtccccttgctgctactacccattgccccaaggtgtacattgcattattaataaatttaatttttaatttgtttacttttaaattaaatttcttttcttttcttttctttcttttttttttattatccattcccagccaagacttaaccattaaagtcaaaagaaaagtcttactaaaagaccttcttgcccc

SEQ ID NO: 293310 - DNA, 516 bp, Cannabis indica
agtctatacgcaacctcagaggtcccgcacagacttggggggcaaatgttatcccaaaattggcactttgacgtggcatcacaagaatggtgacacgtggcatcaacttagagcacctggtcggatcaacatgccgagcaggatgcctcgctggcatgtccataatggaatactcaacgagccgtgcagaatgagcaacacttagccaattcagccaagcacttcgtgagtcaccagctcaatccctataactcagggatcaacttgcgtggatatggcatacacacgattccactatcggtgtatacggcctcaatcccacgatcctagcattcagcaatgatcccacgatctttgtgtttatgcactttgtaacgagagaggaaactcttcctcctcaagtttcctgccctataaatagtgaggaatgttcactgggcaaggagaaaaaaccatacaccgaaacggtacaagctaaggctatctaagaattatatattcagagatactattgta

SEQ ID NO: 293311 - DNA, 577 bp, Cannabis indica
accctagttttaagtctaaagggcattttagtcttttgtttaaggtgagtgaggtggctgcctaggtgtttgacacctaatctaagttattttcagcaaaaggttttgggggaaaaactcttgtcttttgtggaaaattaagaaaaaggaaaaattagaaaaaaatgctttgttcttgaatctctctctctctctttccttcggctgaagcaaaccagggcaaggatcaacatattcattccatttttctgggatttagctagaattcaaggaggtttcaactaaggtaaagccctagaacttttaaagatatgattttaagctttttctttgatttgagtttgtgaaattgtaagttaggggctgtgaaggcttgaagtgcctagggttcgaattttagggtttagttgagttgattctaagtcctagctgctggttttaatgggtgtagatggtttttatgcaattttaggtttaaagttcaaagctttgagctttaatggcataattggatttattggtttgttctgtgaattactgcttggattctattgtttatgcattgtataggtatact

SEQ ID NO: 293312 - DNA, 609 bp, Cannabis indica
ttttatgttgtttaatattgtttcctattatctaatttttttgtactttatagaataccgtaaaatataaaaaaaaaaatactttgaagataaaaatgtaacttttatcaaaaataacaattatgtaattctcccttaattattattttgctatgtagaaatagtttgatgtagctagtgggcgcacgtactataacacaatatagggctagttgaggcccattaacagccgtaaagggtcaacaagagttggaaacttgaattttttcattaatgttgctagtgaacaccattttaggttaatcttggtggtggtggtgattgttaaaatagtcgggcgacggtttaaatagtcggctatactgttagtattcctgatgattttacacagtcgaaaaagttttatcgacagtttttactgtcgtctattctgcctaatttctcgacgattgaataggtgtctatcttagaaattactaaaatctttaacacgattgttttaaagcgcaaaaaaaaactcaatttatagtagtgaactctgtcgcttattataatttaaatcttaataattatacagctattatctatgttatatgatttggagtttat

SEQ ID NO: 293313 - DNA, 710 bp, Cannabis indica
ggttctaggtctgggtccaggtcctggtcatggtcctagtcttgttctagggtcctggttcggcgattcttgtttaggttctaattttgggtcccaggtctaggtctgggtttgggtttggttcttcgttttggttctggtcctagtctgagtcccagatctagacaccgactactggactgttccaggccccgttacttgaatcctgagtcaagatctggatcactgtcacggctttcggtcttgttcttgttcaggtcccaagtcccatttccgagtttgggttcaggatcgagactggtgtgcgattctaggtcccgaccctggttctacgtccctagtctggttccatgttttgggtctcaaatcaagttcgggtttgggtcccaagttcaggtttgggtttggatccgggtccggctcccaattcgggtataggtcagattcggagtccgggtcctgatccgattacagttctggatctaggtcaaatttcagttatgattcaaagtccaagtcctagttgcagtcccggtcaagtttcgatttacgttccaattttgggtcagagggtacgggttcgggtccacttttggttttggactaggttcaggtccgagtgtgggttcgggttcgttgtcaaggttcgggtccaggcctgggtcccaaatccaaacaccgactacgggttttctccaagccctgggtcc

SEQ ID NO: 293314 - DNA, 451 bp, Cannabis indica
aagtttattttcattctatttttaaaaaaaaattaatttcccgcgctttttaactagtaatctcgtctaggggattaggatttcttaatcatcttgggtagcgtgcccattggttagggcattacaatttggtatcagtgtgccaaggtttttaaacttcctgtagactggctgaacatgtacaatcatcgttagagacaagctcgactcatggtgcagtaagtgttgagagtaaatgctttactgcttatgtgatcatttatttacctctttccatttaggcagtatgcgagcatctagagtttttatgtgatatatgatgccatgcttaaattctatatgttaagtgtttgtttatatagagtgaatagttgagttaggttttaaggcaataagtgcataagtgtggtactggtgcttaactcgttgggttattgattataggggtact

SEQ ID NO: 293315 - DNA, 790 bp, Cannabis indica
aaagagttttatttagggcataaaacccaacacgttcaatatatgtgaatcgaaatgaattataacatgttaagaccccgttggtgagccaggggcattttagtaattatgacccgagaagggtaaattgatgaaattaatttaattacgtgcttaatagaactatattattatatagtatgcatgtgttgtcttttcaggtgtgttatgaaaagttggcgcggtatagtcacaaccgggtatttcgggccgaaccgggttcggggccgaaatacaattttgggataaattattggcattttatttatgtgtgatgaatctgaaattatttaaatatgtgttatatatgaaatgacttcaatgcccttaattgtttgagtatgtgagaaatggccctaggggcaaaatggtaaatatgtatttttggatttattttcaactaaaggcattctttgtaaaaaaaaatgaaattcattttctgcatttaccttaaccctaaaacaacccccttccctctctctctatccctctttgtattttgttgaaaaattggtgatttgcttggtgttcaagcttgaaattgaagaattatttgaggagttgtggcttgatcattgcattgaagcttgaggtagttttctattgctgaaatttaatgaatttgctgctgtgattttatggttgaaaagcatgaaataggttgggatggccttgagatgcatgttgatgttttcttgttgatatgagcatgtttgtacttggatcttttgaatttatgttgggttaggtt

SEQ ID NO: 293316 - DNA, 496 bp, Cannabis indica
tccttactctactagtcgaatagatgattgatgtagagaatggaatttatgttttttttttaaaagtaaaaagaaaaagagagaccagtgtctacgtctcatttttattttttatctaacaaactataaaattgcattgatttcttaatataatgaataaatcatgaatttttgttgttcagtacttcgttattagttaatctaggtataaaccaaactcgagatgtagtctcgagataactcttattattctcttttgcatgttttttccttgacaagtcatgagtctccaaatgagtgatagatgttcaacatgttgaaaatttttctgccacgacctatataaaaatacaccatttagaaaacattaaatattttagtcgttatttacgggttgtgacttcatttcaaaccgaaccccatatatagtttttgtaatttctcaaaccacaaccatgccgtgagattttaaaactgcaaaaaaaaaaaaaaaaat

SEQ ID NO: 293317 - DNA, 545 bp, Cannabis indica
cggtcgagaggagaagccaggcgatcgctagaaagccccttcatattggggactcgggcggagagaagggctccaggccaaagctttcggctcaagagccgaacactggggctccgggcgccagcacttccggctccggtggtaagtctccttttaggagttcattacgtcccttctgttggcgaatatgccactcttaggcatgtaggattcgatgagtgtctttgtaggtttaggatgccctcgacccggtggggagaccatatgaaggagttttatttttccaacttaggagatttccgaggtcggtcccggatgggttctggtcctccggagcccgtacccttagacccttcagcttatatttcatccagctggttccggccttcggacagctatctcggagacgatgctgccagcattaagatccggaactttgctagggccgaattagagagtcagggtaggactagcttgtttgctatatctgagtgtttgttgtttcccacggatgttctaacacttgccttctttcttttgttgta

SEQ ID NO: 293318 - DNA, 802 bp, Cannabis indica
aactattttttactaaaaaataatttggtaatatttttacatcaacttttactgttgtactccaatacataattataaatcttcatgcaaaatttaatatgttatttaatgtccactatataatttattaaaaaatataaaataataataataatgcaaagttaaatataaatttaataataaaatgaaaataataatgtaaatcattcaatgcaaatgagtgttaactaaaatttaataataacatataaaaaatagcataatggtaattataaaagcatagtatttattgtgatgcaaattttacatcatgccatattgtgatgaaatgtgaatcacttttaattatgtgagatttttgcatcataatttagcacaccgttgaagtagacttttaacaaagtgaactatattttgcatttgcatctccaatgagtttaccaaatggtgtttagtttaccaaatagtttaacaaaatgtaattgtaataatagaatgtaatggtaatagtattagaatactattatcatgtctggtttattttatgatgaatattgtatttagaattatattgtcaaaaatattcttactttatttgtatttctaaaatattattaaaatttgatggtaaagtatttgtaaaatacttggtaaagaaaagtaagaaagacaaagagtaatgtttactaaatttttgaaaactaataataaaacttcagattttttaaaatattaagcaagtgagacgaaggattttacgtgattcgggcattaatatccctagtccatgagtcagtatatt

SEQ ID NO: 293319 - DNA, 528 bp, Cannabis indica
tataactgccacaaaaattaaaaaaatagtcgacataacatcgacatcatgtcgatattctgtcgacattatcaaacagtaagtaaacaaaaaatttggtcgacaaacagtcgacatactgtcgacatgttgtcgacattatcacagaaacagtaaaaaataacattgtggacaacatatcgacaatctgtcgacatcctgtcgacatgttgtcgacattatcaaacatatatcaactacataacaatagtcgacaagatatcgacataaggtagatatcctatcgatattatagacctccacttttattccaaataaggtcgacatcctatcgacataccaatgatatcctatcgacatacactaacatatatcaactacataacaatagtcgacaagatatcgacataaggtagatatcctatcgatattatagacctccacttttattccaaataaggtcgacatcctatcgacataccaatgatatcctatcgacatacactaacaacacagactcaaacactt

SEQ ID NO: 293320 - DNA, 609 bp, Cannabis indica
cctgatttgaccccaaaggtgcatttctttgggttgagcttcattccgtatctccggactacctcgaaacattcttctaagtcgtccgcatggctattgcacgctttagacttgactaacatgtcatctacgtacacctccatgtttcgccccaggaggcctttgaacatccggttgaccattctttggtaggtcgcaccagcgttcttcagtccgaaaggcatgactaggtagcagtatacccccttatcggtcctgaagctagtgcactcttggtccgccgtgtgcatctttatttggttgtacccggcgtacgcgtccatgaaggacagtagcttgaatccggaagtggcgtctaccatctgatcaatcctgggcagagggaaacagtcctttggacaagccttgtttagatcagtgaagtctatacaaactcgccaggttccgttaggcttcggcaccaggaccggattggctagccattcggggtagtaaacgtcgcggatcatgccgtttgctaaaagcttatccacctctttctctaaggcctcagccttcactgaatcgaggggtcgtcgcttttgtggaccggtggcatgttcgggttga

SEQ ID NO: 293321 - DNA, 339 bp, Cannabis indica
atttaacagaatattcttttatttttaaagtatattctgttaaaccaagaaatgtcgttagatagacacttttaatatataaagatatattaaatgacaatattaatgcagaaatgataaaacaacaaaattgcataagtgaggcccattatccaaagcccaggccggccactattgtaggcttttatcatttattttttcattattttaatgccaaataattttaacttaaacctaggtggttaccgatagtgatggctctcattcacacttaattctatcagatgaaagttgagcctcctattcttttctctataggccgaaccacttctctcttct

SEQ ID NO: 293322 - DNA, 674 bp, Cannabis indica
tgatttgtatagtaaataatattttggattatttcctaaatatatcaaaatgacaaatttatatgaattttctattttttttttatatttttataaattttaattttttattattataaaagtatggtattagtgtctatattgactatgccaattttatacctaaaaaaattataaaattacaataatagtaatatttttggactcaatggtgcaactcgtactagtttgacatccaaaaaaaaaaattaatctgtttttatagttgtgtacgttgtagttatttaagacatgttacaaaatttttaaaaattcaaaataatttctaatatacaaagtaatgttaaaaatgtttataaagcccactttagatgtttgtgttggaactttctatgaaattatataaaaatagaaaagtgaagtgtgtgagtaggagtcccacatgggatagaaacacttcatttgaagtatataactagtgcaagtttgagatatgggtttgagccgacagggggtatccagttttgtgcgcatggggtgaggactcacacattgaaccaccacacgtgtcaccgtccgacccgagccggtctggggttggtgggtaaggtgtcacttaatttttttttaaagaaaaattatttaattaaataaagatatttattatttattta

SEQ ID NO: 293323 - DNA, 173 bp, Cannabis indica
ccccaaagcacgttcaaatactgcactttcgtggtggtagactgcccgaccgcatacaacgcgatcctcggccgaccggccctggtagatttcggcacagtcacatccattcggcacctgtgcttaaagttccctacccaggaagttggaatagggacggtgagaggaaatca

SEQ ID NO: 293324 - DNA, 588 bp, Cannabis indica
tcaaaaataattaaaccaactaaactaatttcatacaataacactaatcctactagaggaaagacataagaatacttattgagtattttagccattaatgataataagactatttacaaaaataacaaatagatcaataaattaaccttatttaaataccactaagtaactagttacttttagctatcaattacttgaactttcaaaagcaacataaaatatttagttactattttacatgtaatactatctaaattaacaaaagaaaatatataataaccacttagtattacaacttgtttaaaaaattaagactttgagtggtttatcttcattcattattgttcttttcataactttgtgcaagttcattaactaaataatgatactggttattgataaaattttatggaaaaaagtataacataatatctactatacttgatattaactataattagaataggaataattacataaggcaccatttttttataaaatatttatatttttacgttcaaagaatgcttttttacaattttacggttttccaaaaaataacacgaaaacaacataaaatcaacaaga

SEQ ID NO: 293325 - DNA, 107 bp, Cannabis indica
accccatataaatgatatttcagcttatgtgaaatgagatctccaccatttatattcatttggtcaagcagatgaattcatacattatgtacatataaatcatgaaa

SEQ ID NO: 293326 - DNA, 588 bp, Cannabis indica
agatagatttcttcattattcctccattatttctaaattaaatacttcattaaatctatcataaagttcatctaattttattagatttaaaatttagcccacaggcaattttagatttaataaaattttcatcttcatcatgtttctacattggtaaaacatgaattcattaaagcctcaattcttttaacatctaaattttttgtaatcctattcttgcagctatttcatccacctctaaatatgctgaaatcactagtgaaatccctgagcttaggagtgacaacttcaaaatctggaaggaacgagttcttctccacctagcttgcactgacatggattatgcaataaggaaagatgaaccagctgctatcactgatactagcactgctgctgagattgcactgcgtgaaaagtgggagcaatctaatcgtctctgcatcatgttcattatgtccagaattcctatgggaatgcgtggatcggtggagccacctgagaaggtgaaagactttatcaaagttatggatgagcagtttgacacttcagataaatccttgttcatcaacctcatccaagagttctcgt

SEQ ID NO: 293327 - DNA, 350 bp, Cannabis indica
aaataccgtccttaatttgttgttggcactctttgatagaagtaatttcagcacaaatctggtccaactttccatgagatacctgaatagaatacataaaaaacatgaactataactaatgataaacatacacaaaagaaatgcaaacagaaaccggtttttaataccttgacctcatcattaacttcatcagaagacacaacaccaccaatcctcttcggaacaaaaaaaataattaccttcggattgttgaacacaccctgaatcaactcactaaactcggttgtagggctattctcccaattcagaacgcgaggaatcttgttgttgattctattgcaaaatcgagg

SEQ ID NO: 293328 - DNA, 681 bp, Cannabis indica
aaaaattattcttaatatcttttttaagatttttttttctcacatttattttgtataaatttcaatacttacattaattttattcttctatttttttaatcatgtgtagctttttattattttttttaaataaaattatataattttttattgtaatatttaaaatataatttatttttgtttaatatatatatttttataagaatatgaaattaaaagattaaaattaaaaaaaaaactaatataattaaatatatattttaaatgaaataaaaattattgaaatgggtgcgattctaagtttttgggtgcaaagtgtaaataaaattttccaatttttataatataataataaaaaaattacctcatatattattatttaatataatttttaaaatttacagtaattctaatgtgtgttgctatgtgtatcttaattgcgatttaaattattacgttagttgctatgtagtttgccatataatgttttgtaaaaataaaaaaaatttaactcctttaaaatataaaaaattaaaaaactctaataaaaaacctttatcacaattaaatttgaatttaaaaattcatacttttttgtttttttttttccgtccatttgtttttcctactttattgaatttttggtaaatactattttggaccttgtgttttacaaaagtt

SEQ ID NO: 293329 - DNA, 728 bp, Cannabis indica
atagatgagatttggaaatacaagtttgaaggttggctttttacctcttcgaaaggagacaatctggttgagaatatgagaggctagatcaatggaagttccagaggtgatgcggtataggagtgtagccacttcttgagacaccacggtcttgttcgaatttggaacccaattgcttagtgcaaaccgcataagggaagcatgagcaaaagtgaggtgagtaattcgaagactctcccctggtttcaattctgaacgagcaccagtgagttcagagtgcatcaagtcacgatccatggacatcacagcattggaaacattctcaggcaattgcagagcctgagcaatgtccttttcagaaaatgagaaccagtgacccctaacatacactcttctatacagtctagagttctcatcaaggaaatcatcagtaagattagcataaaactctttaataatgttagcaatgaatccaataaaaccagtaagagtgtgttcccattgatgaaattgaatgaactttacaataccataaacacgatgggcatgcaaatcataattcctctcactttcaaacttacgagttgcataaagattccagtcacgctcattgtctcgatagtaaaaagttggacagccagagatagaggaagggatattaccagatggaggagtcttccatgggctgcttgcctttggctagcagcagaggcctttgctgcagaagc

SEQ ID NO: 293330 - DNA, 633 bp, Cannabis indica
tttattttagtatatgtataccacagagtttggtagaaaatcctagattgtcttacgcgagtgttaagtggtgttttgggataaacacttattgatttattattgttatgacatagggcctgagattatcgatcgttctccaagcaggtcggccaacatacctgattcagaaattgaggtaagaaaagtataatgtaccgcatggcatgataggttctgaaattatcgattgtctgataaggcaatgataatgtaatgatactatagatacaatatatggtctcacctgattaggtgatgcaatatatctggcgacgtaccaggtaaagatacgggcgtcagtagcatatgatgagtaccgagcgtaggtacgacatcgtttgattagacgtgtgatatattagtgtcaaggtttggcatgggctcacctgattaggtggcgcaatgatattatatatgatattgcattatgacacgggcttgcctgattaggcaatgcaaatatatgagcatatctatttctatgcatatgactgattatattacctagtgttgaatgttatagtttaatcattttgtgataatgaaatgtataattagctatttaatgtatcattctttattacttttctt

SEQ ID NO: 293331 - DNA, 785 bp, Cannabis indica
gaaagtatttttgttatgaatacaaaaatagatatttactcaacttatcccttaacaggtactataagtttttgtttttgagattatttcacaaatatattaaaacaacaaaaaattaacaaaaatatctatacggaatttaaaacatttttacgattttatttattgaaaatacggtctttttatgttgtatgcttataaatttgttgttgaattttcgttatctgtatgttattttttgttgttgttttgatgttatttggatattattatcctattacttctatgcagtttccttgttgttttggtattgtttctaaagaaaacggtaagataaaaagaattcgtgaaatgtaaaagtgtaattttttatagaaaaaaaagtgtcttatttaattatcgttttttttttttttttttctctgtacagggtataagtaattttaaaaacaagtacttgtgcacactatagagtgagaccctattatgcaaattgactaaaattggatccacatttaaaaaaaaaaaatgagtggtgcagtaaaatattttaattttattttttcaaaataaattattcaaaattttctttatccaaaataactactcgctcattttaaaaaaaaaaagactaaaaatttccataaatgtcaatagataaaagtgtaataaaaaaactttttaaaggatatattgtagaattactctattcatttaattctaatactaatataacgttttcttaattttattaaagaaaaaaaataaaataaaaactatggtag

SEQ ID NO: 293332 - DNA, 567 bp, Cannabis indica
gaaaaagatgtttaatctttcacctaaagaaaaccagtgttttttcaacacacacaaataataataataataataataataatatgaaatcgttcagatttaaagttttttgatggcttagttagaaaatatatgatttaattagtaggaacaccacttttgtttttgtcgatgaagattattttaattcctggtatgagatgttatttttttcactagcatgttgattgtgtttcatacggtgatgtactcttagagagtctgcattcctaatgtgaaaaaaaataatagaatatataagaggaataatctactccttccatgatcaattaattttaagatggaactcatttattttattccaaattttaacatagcaaaaacaaaaacaaaaaaatatctagtgactatccaaccaaaaaaacaagaactaaaaaaataagccacaaaaaatctaaaaaaactaataaaaaaaagaaatgaccaccaaaaattcaaaaataatcgaatccaaaaagtaaagtaaaagaagtcaacttgtgattagggatagtgagccataaaaaa

SEQ ID NO: 293333 - DNA, 574 bp, Cannabis indica
taatgtttttggtcttcctgatttaactctttcatgtggaggcaagactataatattcttcacttcttccggtacctcccactcactttggtgtcctattgggtaaactgtccctgaataagttgccagccaatttttttttgtgtagtaatctgaacagtaggtgtacgggtccatgttcatctccctcatcacggccacagcgtgcccgcatggcatttcatctatttggaacctgttgcacgtgcatgttcttttttctaggtctacttcccacgattctttcattcttgttacctcaaacaagtaatctgttgttgctttaacctgtttcaaattttattacaaaaaacaaacatagctgatattgtaacaacaacactacaaaactataaaaacaacactacaacaacatatgcacttactttttttagtttttttttctttaaaaaaagaggcataatgaatatgttacctccagattcaatgagtatgtgtaacttttcaacagtatgtcttctccagctagtcatagcttagtaaaggtgttgtgtgcttttgtcctattagtatg

SEQ ID NO: 293334 - DNA, 531 bp, Cannabis indica
gacggtttattagacattgggaatgtcgggaatggccgggaatttagaaattcccaaaatacccctttagtgctctttatgttattttagtgtggaggggcaaaatggtctttttgccccaatgatattttgtcctttagtggactttatttggttaaattaaatgtttaataatgcttttgttggctgaagtaaaaggggttatgtggcattttcttttcattcttttcaaaacttagaaaaaattacaaatttctcaaaaagctctctctcttttcctctctctttttcggccatttgaggcagcaagaaaagtggattttcctcttcaatttcaagtgattttcagcaagttagagtgattctagttgaggtaattcttgtctagcttctttacttttgtcttcttaaaaaatgatgaaaaaaatgagtaatgcatggatgattttgatgatgttgctgctgctagttgttgttgttgttgtttctatgtttaaaatgttgaattaaatatgtttagttaggttgaaa

SEQ ID NO: 293335 - DNA, 760 bp, Cannabis indica
aacacaactctccccggaaaaagggtccagagttgataaaaacaaacagttaaaaaaaaaatattactcccctttttgtttatctaagggccaaagataacaaacatgaaaatatagtaatatgtccaacaaaagcaagaaaagaaagaaaaacttattccctataaagcttgatcaaagaggacagctgcttggacatctcttgctgaacctcctccatggcagcaagacgattgttcaccaactgaacctcattcttgacctcctggacttctgcaaaagtagaactcaagcttgcagcaacaacagcaccaagtttaggcctttttggaaaaacgccatcaaaatactccgagggttggaatgttgttccagtcagggaaggctcaagagtttcatgagattgggccacatttttctgagaggacaaaaccttaaagattaaatttggaaacacaagcttaaatgttggctttttacctctccgaaatgagacaatctggttcaaaatgtgggaggccaagtcgatggaagctcttgaggtgatacgatagaggaatgaggccacatcttgagacaccacagtcttgttttagtttggaacccaattgctaagagaaaatcgcatgagagatgcatgagcataggttagatgtgtaatgcgaagactctcccccgatttcaattcagcccctgcaccaaagagttcagtgagcatcaattggcgatccatagacattatggcatttgggacattttc

SEQ ID NO: 293336 - DNA, 630 bp, Cannabis indica
taatttctcgtaaaccaagaattatgttatatagccacattttatatagaatagatatgtatggaacacttcttaatgggtattacccataaatggttactaaacaaatttaactataaatattaatattaaaaatatcaaaacatcaaattttaatctaataacgaataatgaaatcacaaatttaaatttctatgcttaatttaactacttaattaaaaaaaaaaatatatcaaaaaatatctctttttacactatatcaaaaatatgttcatacaaaaatatttaacttaaactcaactttttcttttcttatttttcttgctaaaaactttttttaaattttttttaccgatggaacaatctcagcccatatgatataaaaattagagattattttaattagataaaaaaattaagcataaaaactcaaaattttctaattttactcattcatgggtaatacccatattaagagtgcataatttaaaattaggaggaggtttcaatggctatattaaatatataaccatcatggttacattattttagtcactggattagtattaaatgattgtgattcatttggaaactaaataaaaataaataataattaacttataacctgat

SEQ ID NO: 293337 - DNA, 427 bp, Cannabis indica
ttaggttccaattttgggtcacagggtacgggttcgggtcaggatttcagtgaaggtccagatcaggctccgagtgtgggttcgcgtcttgggtcttggtctaggttcggtccgagtcccaaattccactcccgatctgagtctggattcagttctaggtctaagtcattggttctgatccttgtctgggtgggtttgattataggtgtggtttgagctcggccccgagtctgtgttcggttttgtgtttaggtctggaccgcgatctgagtctaggttaggttccaagtccaagtttgggccgcgagtgtgggccaaatttttgctctgggtcaggatctcggtccttatataggtccagcatttcgatcccattctgtgtcttggtccgagtccagcttcgtatccggatccctatctaggtcca

SEQ ID NO: 293338 - DNA, 519 bp, Cannabis indica
atattttatttttataaataaaaagtgacccatgaatttctcataaaccattttatttttaataataaaccatcttatttttaatataaataaaaagtcacccatgaatttctcaaaaaccaaaaattctgttatataggcacattttatatagaatagatatattgagctatgatgtttgaattattaaaaaagtaataatttaagattttagaaatactataattcggtattttcaaattaggtagagtgatgtgtactttttgacaaataaagaaaaaggatggaagttacacataaattttatgttttgtaaaataaaatagaagaaatagataataataataagaaaaagaaataattatattttgttttgtggtgtggttggaatgtctattcaataaaagtgaatgttcttcaaaaaataaataaataaaataaaataaaggtgaatgtaggacaactataaaaagtgttacacaatattatttattttttaagatagaaaaatgagagatt

SEQ ID NO: 293339 - DNA, 768 bp, Cannabis indica
ataccataaaacatttcatgagggttaggtgttttttcccaagtcattcgaatagactttgcaaaattctcctatcatatcctcaaaattctaataagttatttctatccatacgaatggttagatttacttttcagttgaattctaaagttcctatcatgatcataacatagtaagctatcacaattgtcatccaaataaagatgggcttagaattttaaaattctcccacttagataaggtactgtgatactatgtccaagaactttattggtatcaatttctattacaacagtaatatataaattggaacaattacaggatcaagaataagaagcttctgagcttcatcttcaaccttggacattctccacccttctgtccaaccatctgacttaactcgctaggatagcaatccaagtttaagcagctggagcttgtttctttgctagcaacttagggcattggggtttccaatggcccttttcattgcaatagaagcattttccttttggctttgcctcgggattagcagcctttttctttttaactgttttcacaactttaacaggcttcttgctattcttccaattcttcttgttgttgggtttcgaagcagaggcaatgtttgcctcagccttggccgtaacattagcagtgccagaattaggagctttagttcctcctttttgtggtcctctaatcaaattttcaaatgtttgaaggttgttgatcaactcgtgaaagtcaagctccaacttgttcatg

SEQ ID NO: 293340 - DNA, 448 bp, Cannabis indica
gagtctttcttatttatgagagtatttattacagagaatgttcttggtagtattttctcttagctgctctctttaattcttatgaatccagaatcctcgaccctcgtcttagtgtgtttggggggtatttatagtatttttctggggtgatccctagaactgaagcacttgtctttttgtgtagtttcagtagggcacatattcccagcagatacacaataggaaatacatgacctataccttaggtatcttaggggttaggtggataaagtcttttatcccttcttgattgatgtgatccctcataaagtagccgtcactagccttattaatcatagcgtattagctgtataagaggggttacgccgtcagacttattgtttatggaagttccaatacgttttctcccatgcggcattaaatgtgaggtgactgttcaaataatgtc

SEQ ID NO: 293341 - DNA, 331 bp, Cannabis indica
ctactctatcacttagaggagttcgtaaaacagagaaggtagagagagaaagagtggcggcttaacaaagtttttgagtgaaagaaaattctgtcaaaagtgttacaaaaactgaagcctttaccttctatttatagaagaccacatagggttatggttgaattacttggcattaaaaaaatgaaaaatcaatgggaaaagggaagcaaagtggccggcctaggcattgtggaaacaaggctttccacttttccaactttccttttcctacattcctagtttcccattttgtcaaaaactgccaattcctttattcaaccacataaatgtc

SEQ ID NO: 293342 - DNA, 600 bp, Cannabis indica
aaaattagaaagaaaaaaaaacacttgggttgcctcccaagagcgctgtctttatcgtgatatagccggacgctgagctgtgttcttcatagtggcgccagaatcatggcggacttggcttggtcaaattgacctcccaagtagagctttaaacgttgtccattaactttgaaagttgctggaccatcaccttttaactccaccgctccataaggaaacaccttgactactgtgaatggtcctgaccaccttgacttcaactttccaggaaacaacttcaaccttgaattgaatagtaacacttgctgcccaggttgaaactccttccttactagaccttggtcatgccacttcttagttctctccttgtagatttttgcgttctcataggcttcatttcgaaactcctctagctcattcaactgtagcagccttttctcccctgcagcttttaattccatgttaagagtcttcatggcccaaaaagctttatgctctaactccaccggcagatgacaagccttcccaaacaccaatcgatatggagacatgcgaattggtgttttgaaagcagtttcgtatgcccacaatgcatcatct

SEQ ID NO: 293343 - DNA, 673 bp, Cannabis indica
tctttctccatcccttactggtctcaggacgccgatgagccacctcaagactcttaggtccccttcgtccatcatcgttttaaaactcgttgaagcttctcaacttcagtctggacacgctgagtcttagcaaaccaagtgagtttcaaaagtgggctcctttcgtgaagatcttccaaatctaaaacttacggtgggtcatggcagtggtttagaggagataaactggttgtggtgatgggatggtggaagctatggaggttttagggaagggagaggtacgggggaagggattagggatttggtttaaaaaatgggacaatatttttattttagaaaaaaaaatgatgtttgaaatttgtggggaattaaaatggtgtattgatggtggtggggacagtgggagttacagagagagaaatggtttttggagagagagaaatagtggttactggttatggtgggagtggttttggggagagagagagagagttatgaagagagaagaaaaaataattatgtaaattttttaattttaatttaatacgatttattttacttttattatttaaaatgttatttttatttttaaattaatgatattacgtggactataagattgcgccacgtgtatattgtatacacgtggataatctaacatggcagttaacag

SEQ ID NO: 293344 - DNA, 853 bp, Cannabis indica
acagctttggcaattcgtctctatccttttttgttttttttggagaacagtctctatatctctcttgctcaaaatttgagtataatttatgttgagttgtttaataatagagatgtaaaaattataagtaatgtctaacaccatttaaaaatggcctatcgtaatattaatttaataattattataaaatattattaactaataaaatgatactattattattgtcttataataataataataataataataataatatattaataaatttctttttgaaatgataatatattaacaatttaagtatgattaatggatagagaaaataagagagataataaataagaacaaaatatgtgcattaaaatgttttggtaccggtcatgtttggatttgtacaaacccattatgtagcactaaatactatcttgtcattaaaaacaaaaattatacaaagattcaaaatctgtaattttaaataaataaaattgaatatagagacccccactcttactcctgctgcaggcttattattattattattcacattcatttcatatttattagtgggagaggaaaagaaaaagttaatagaatattaatggtatcttttttggaagtatttgggttggagatgatggagttgttcattgtatgagcaacacccaccaaatcaaaatagcatagacatgaattgaattgaagcaccttttggggaaagcaatagctttcatttacatgtattacaaataaatgaaatgaagaaaacaatctcaaatacataggccactcaaattaaaatagaaacaatttcaaaaaaaaaatattaaaaaaaattacaagtgatgaattt

SEQ ID NO: 293345 - DNA, 763 bp, Cannabis indica
gagtctgagtaggcgacatggcgcgaaaagcctcggccatctcagcggcttcagctccaagaagagagaagtcgaagtctgggactttggaaagagtggtatagatataatcagacactgcctgatcatactgcttcttcccattctctttctcagcttccaaatcgcgagccatctccgcgatcgttgcctgcgacttcttgacctcgtgctccgcctgttccttcgccctgctgagttcttcgagctccttctccttggccttgctgagttcctcgagctctttctccattctcgccacatcctgcttcagcttttttatattctcctgaaaatgagcgttctgcctcttcagcgagtcggcttccttcgaaggagtcgccgcagcttttatgaacaaagccattgactgcgcggccagttcagcagatcgcgtaacaagatcctcgtaagggatctcagccaggaacttttcctgcatggccaggaagtcgcgagctcgaacaggaggatcaatgacgactttcttccccttgtcctgagtggtcttggccagcttcttggaagagtctgcgacaagtgaagccatcacatcgctcttcctcttctgggcaacaaccggcgaagtcgtcgctgttccaccctttggtttgatcttcaggacaggggcagacttcagaaaagtcatatctgcgaacatgaatgaaagataagtataagtcaaaatcctacctgttagtttataacaagagacgaattacct

SEQ ID NO: 293346 - DNA, 533 bp, Cannabis indica
tttaagtgtattataagcaacaaatattcatagcttagttggttgaggtggatgacataatgtccaaggtcatgggttctaatcccataacactcttcttttgattatttttttatatattttcgagggcggccggccctgatgccccttaatctattcagcttgttacaaatagtccttgtataattttatatgcatacatttagtccttctgtttattttgtttaaaaatactgtttgtattgatgatgtggtattataacaaaggatagagtagtaatttcatctctttttagagggaaaattgactatgaggtggcataataactgacaatgaaagatgattaaaaaatgatttcataaccttttaaaaaatttaataaaaataattttattaaaataattccaatcgttttttagcagttcaaattagaaaaaggtgtaaaattaggattctacagtatttgaagagatggatatcactagaaagaacatgggatttttggaaaattaaggtaatgatattctatttt

SEQ ID NO: 293347 - DNA, 410 bp, Cannabis indica
ttattttatctacacttaaaaaaaccgctcttatttcaatttccacattctctcattctctctattctcttttccatgaaagaccacttaaacttaccatagtgcacagctcacgactgcgctccgctcaccaccacacacctctcattttcttgctctaacagatctacacattgatatttgtatttcgttgattgtttgctcgaaaattaaattttgaatttcttgcatttttttgttttttcttttctataattttctagttttttttatgatatttagcgatatatttgcaatgatagaccaaacatgaggttagtgatgaagtttaatgatgttttacgtatttagtgatgtttagcgatgtatttgcgatatgagacaaagtatgttgctaaacatcgctaatc

SEQ ID NO: 293348 - DNA, 813 bp, Cannabis indica
gtattcgatatatttaggattcaattctatctgcactaagtaatcgatatttgatttgcacaatttgcaaaaattcagattagattggttattttgaaatggttatttttaatattaaattatttaatatttattaaaaaatattttttttctacataactaattataaaaataataaattattattattttatgtctctaacaataaattaatatagtaagaaaaaattgtatgtaaaaacataaatttattctaaattgtttgtagaataaaaaaattaattatatataagaatgaaatatatatttaataattttgaaatatatttgtattgtatgtattagaattttaaattaatatttttttaaattaaaaaattatttaaatatgtgtgaattagattggatcggttatttttatatatcaatcaatatttaattcgtatattttaaatttttaattaatctaattcgtataaatgtgaatattaatacttttgcaaattaaattggattgatacataaattaaattgactattttatgaatgcacctagtgtcagccaccataaaattaagtttgcaccaatctattaaagttggaaataaaaaaaaaaaaagaataaaaataataaaattaaagaaactaaaacaaaaactatgaaagagaaataggttagaattgttaaataattccaaagtagcattactacaataaatggtatagcataattgaggtttgtcaattgaagttcaaacctgtcaaaagatttttcaaaatccttgggcttttttgactcgtagtaaaaatgat

SEQ ID NO: 293349 - DNA, 532 bp, Cannabis indica
caactttaaaattagaaacataatttattattttcaaatatataaaaagatggtaaactatgttaaattacttaaattataatatattagtaacatagtacattagtaattacataagttacttttttttagaataattacataagttacttaaattataatatattagtaattacataagttacatattgttaattgttggtatagtaacggtttttaaataataaatatataatatttatatattaaattaagtaattacataggtgtacttaaattatataatatataattaaaaaattaagaaaaaagaataataaagaactcaacatataaacttattcatgtttattccgtgaaaaactacttgcaacatataactcaatgaataaaagtatattttcataattgaatatatatatatataaacataaaaatggagataaaatgatatattaagaaaaaaataaaaaaaaaataaacattaaattcaatagattcagggaagtataccttatagcatgattatatt

SEQ ID NO: 293350 - DNA, 551 bp, Cannabis indica
aatatttttgtgaaataattccatttttaaattgtcaggtcgaaaaattcaagcaataaaaaatatttaaacaattaaccgaattttcagaaagatactattttaaaaataattatcaacactaagctattaaataactttaaaaaaatatattttatgatataaatacttaagtttaacttttagttataaataaatattaaatttaggtgccgtttggtaacacttttgttttctaattttttaatcacaaaatgaaagtaaaatttttgcttttgaaaaacaaaaatgcgttcagtaaccacttttatttttcaattttaaaaacagaaaacaaaagtgtgttctgtaaagttcattttcatttttcattttttgattttatctacgtcgggtctaagtccggggtcggattttgggttcaagtcaaaagtctgggttcagcgccagagccgtagggcatttgggtccgggtcatgatcgaagtcaaagatattgattagaaaaaaaaactgtttaaaaatattgaaaatgatttttttttttttgtt

SEQ ID NO: 293351 - DNA, 497 bp, Cannabis indica
tttctcatggtcatgtacgttatagttatttaagacatcctgtaaaattttaagaaatttggaaaagttttaatatgtcgaaaattatgttcaaacagtgtgtttgcacgcgtgactattttattttatacgcgtgtaaaatagactgtttgaacattgttttttattattgtacattattccgaatttttacaaaattttgtacgatattttatatagctataacgtacatgaatatgaaaaaaaattagactaaaaaattttactgaatgccgaaacaagttaagggtgcaccagtgcatcccttttaagggggtgcattgtagaatcaaccccctatatatatataaatgtatttgtgtaatttttttgttctttttggtaattaataaaaaaatccttattattttagcgtgccttttttacaagaaatttccttacttttgatttttatctatagaggaaattaaatcttataccctttttaagttaggctc

SEQ ID NO: 293352 - DNA, 447 bp, Cannabis indica
tacccccaatcataaccctatcctcgtgacccgcacggtactgagtctagaacgttcgtacgacggtacttttgacatagtaacaacctatactcggtacactagtcatactctagctgtactgatgtgataatgtcaaaaagtacggtaccatcgaccataatatctgcctatactcggtacgctagtcatactctaggcgccccgatgtgatactgtcagtgtaacaccctggaatttagaaatggattagaaaaaccctaattaaataattatgaataatagaggaattatattattatgtagttcagtgtatgtgaattaatatgaattttaatatgttaagactgttggaaattattttaccaggatcttagatctactcacaagtatgttgattaacaccataaatatgaactttctaaaatgatgaaataaacacatata

SEQ ID NO: 293353 - DNA, 1103 bp, Cannabis indica
  modified_base (158)..(158): a, c, t, g, unknown or other
ttatatattattattatttttatttattacaattacattatttttttatatatttttaaatatatatataataaaataattaggttagacttgtaactaataaataataaataataaaaataaattacataaatatcatctattacaataaaaatganagagaaagatatattggagagaagaaaatcttaaaataaaatggtaaaaatgaatttttataattggaatgagggtaattttgtcaagtgaaatattcattaaatcaacaaaatagcttcccgtataagctaatttctcaaagtgggtgttggccaacttttgcaaaaagctgtaaattttttcttaaattcttaaaaaagctagttttctaattttaccaaacacattttgaatgatagttttttaaaaaagtgcttctagctttcttaaaagctatcccaaacgcaccctttatgaaaaataccacttttattaatcaattaatcaaacttacctctaattttatatttaattgaaacatacttctttttatatgtattatacccaaaataccctgacataagagagtcacatggaaagcatcttgaagtgacaaggataaaattggtacaatatttaaaaaataggtaaaaatgatagactttaagaaagagggtaaaaataaaagaggacaatataaaaagggtatagagcgtaatttcctaccgaaatctgtaagcttgattttattctggggaaattttataaatatgtgaattgagagtatagttttttttttttatgacataaataaataacactatatggttatggggttttttttttttttttacatttatatgagattttttatgccatatttttgtaaaaaaagtagaaattcaatatttataaaacaacaataagttttgtcgaaaaagtcactgacaccgaaaaaatgccggaaaagtcaccggcactggaaaagctgccaacaaatcacgctcgtcggaaaattcgtcagaaaagtcgcaggaaaagtcaacgtcgctggaaaagtcactggaatagtcaccaaagtaaatgtctcatatataactaaaaatataaccggttatatgaat

SEQ ID NO: 293354 - DNA, 209 bp, Cannabis indica
tttaaaatttttttaaacagtttttttcgtaattaatattttggactccgacctcaacctagaccttgggacccggactctagcgctggctccaatcctggactcggagtatggccccgaccctagacccggacctggacctgacttaaataaaattaaaaataaaaataaaattgaaagttatagaacatacttttgttttctgtttt

SEQ ID NO: 293355 - DNA, 604 bp, Cannabis indica
aagagtgaggggagggcgatgatatgtcggaatctgttggaaccgagtgcgagtgatgcccgtgccatctatcatgaagtactcatcagcaaaatgcccaatcttgctgatggccgagtcgtccgtgccccatccacttgaagcctggttgagagaagtagaagtaccctgacctgccttgcttgtgggtggacttcaaatcaaagaaccagccaacttcgtgaggagaaggcataccccatttttgggaagcgtagaggacgaagagggcagacggatatttgatgcccttaggagtgaactgggccgggaagaggccgaagaagtctgccacattcctaaagtattgatgcaaaggaatcaatgccccttgctgggcatgagcacccgaccaggcgcacatccccctctcagggcttctggcacgattattgtgggtgggaatgtagcaatccagttcgcccagatatccgccctggtcgagagtccaaaggcgcgcctcaataaccctggacggagagcttacccacctggcgcccaaggcaccttgccttctacgaggaattgcaacagcaagttcctcactgacgtagtccacaccctc

SEQ ID NO: 293356 - DNA, 561 bp, Cannabis indica
agtcaatgcacattcgcaaagacacatctttccttttaacaaacagtacgggagctccccagggtgacacactaggccgcgtaaaccctatgtcaagcaaccccggaagtttaattttcaattctttaagttcttatataaccattctataagggtccttagcaacaggctctactccaggtgccaaatcaatgacaaaatcaatttctctctgtggtggtaaacccaaaagttcatcaagaaaagcatctagaaattcccgaaccaccttaatgtattctagccgaacagagtcaggccaagtggtatccaataccacggccagaaaccctaaacatccatcaagtaacagttccttaattgttagtaccgaaattactgggatccgagatccctgaaccaaaccaacaaacacaaacggttcttcaccttctggttggaagattaccatattcctcttacagttaatatcaaaatccactaaattcatcactatcaaatcagcactcaactctctatcttctattctgatcggcatagacctaatccacattttggaga

SEQ ID NO: 293357 - DNA, 648 bp, Cannabis indica
atttgggagatggagagaccttgccggtaattattctgctatgttggtgcccaagagaatgcttgttagttgatgcttgaagaaatacaaaagagccattggttggaccatggcggacatcaagggtataagtccatcgatttgcatgcataagattctgttggaagatttgtgcaaccattctgtagagcagcagcgaaggctaaaccccatcatgaaggaagtggttagaaaggaggtaatcaagtggttagactttggcatcgtttaccccatttcagacagttcttgggtaagcccagttcaatgtgttccaaaaaagggcggagtcacggtggtagctaatgaaaacaatgagttgatccctacaagaacggtgacgggatggcgtgtttgtatggactatcggaagttgaacaaggccacgcggaaagatcatttcccgctgccatttattgatcaaatgcttgatcgtttggcgggaaaagaattctattgtttccttgatgggtattctggctataatcaaattgccatagctccggaagaccaagagaaaacaacattcacttgtccatatggtacctttgcctttcggagaatgccatttgggttatgcaatgctcccgccacttttcaaaggtgtat

SEQ ID NO: 293358 - DNA, 718 bp, Cannabis indica
ttatttgattgagctttgaggacaatgcttatattaagtgtgggggggaagattaactgtcgtgcctatccaatttttttcttagctattttgttatttatttatcatgttttaatttatattattattattattattattattattattattattattattattattattattattttgctttaattttagtaagtgtggattgaatgaaattctgttgacaatgatttctcgtatttgatatgtgttcttttttacttggatgtcttatgcattttgttaatgatcaaattcttgattgtgtgatacttataattctaggaaagtgatagattatcatgatttgtatgcttaactcatgatacattactgctcaagcttgatttttttaaaaaaacttttgcacatcagttgaattatcatatttactagtgtttgaaaagatgaatgcatgattgacttttaatttaaagtctcaaccactctagaacttttttgataatcatttgaggcaaaattgataaattgcacatgattttgagatatgatatagacacttttttggatcgattgagcttttcaaccctaccctatttgttaattccctagttttacccaatttgagcccaaatgttgacgtcttgttttcttttaacccgatacactaacctttgagcctaaaaaaatccttatttatcctttttcacaccataatata

SEQ ID NO: 293359 - DNA, 817 bp, Cannabis indica
cattggttggagttggttaaggattatgactgtgaaatcctttaccatcctgggaaggccaatattgtggctgatgccctgagcaggaagggtcctaggcaggtaactggtatgattaagatttcacctcagctagaagaggacatggtcagatcaagcattgagtttgttgtaggcaaacttcataacctaacgctgcaatctaatctgttataacgaattaaagttacttagttagttgatctgaaattagtgaagatcggagaagagatttcagctggtcaagccaaagattcttcggtgttagatagtgggatcttgttgtttaagaccagggtttgtgtttcgagtagtgcgaaacctagaaatgagattctcgaggaagctcatactactccatattcactgcaacctggcactaccaagatgtaccaagatacttcctaagtggaagtgggaggatatctccatggactttgtggttgggttacctagaaccacgagaatgtacgattcaatttgggttgtggtagatcgatttacgaagtctgcacagttttctaccggtataaacaacctttatagtggatcagtatgtagatttgtatgtgaaagagatagtgaggttagatggcgttccaaagttcattattttggatagagatccgaagtttacttcgaagttctaacaaagtcttcagcggcctatggttaccgaactgaaattcagtacaaccttccatcgtaaactgatggactgtccaaaaggacaattcaaatactagaatacatgttaccagcttgtgtaatggatttc

SEQ ID NO: 293360 - DNA, 703 bp, Cannabis indica
ataaatcacaatatatcgcaaacaaagttgccatatatcgacaataattgctaaacgcatacacataatctgtagaaaacatcccctaagactatgtcgcgacatgctgacaaacgagtcgtcacatgtcgccaactacagcaacacagataccaaacacacaacaaaaaatacctaatacacagttcacgatttagcgatatcttcacgacatgttcgcggcataagtttaactgtgtatgtaaaattgtttttaattaaatttaacgatatctaacgacatcaagactaaacatgtcgcgggtagactttgtaagatgtcgtaaaaaattgcaaaaacatacacaactgctacattttgttgcatctagaaaagaaatcgacaaacttcgcgaacatcgtcgctaaatgtcgataattggcaaaatagcagatcttgaatcgtaaacgtggaaactcaacccgaaaccaaaaaaaaaaatgaatctaattcctaacaatcaagcatttaaaatccaaaacccatttaaaatcaagtaaaattttagaaatataccttcttcttggcaatttcgttgtgggttctcaattttgttgtgagtttcacgacttcgttgtgggacttgcgattgtctctgattttcgtggttcaggtttcgtcagagggacatgggtctcgttagggtggctaggtttcaagtgg

SEQ ID NO: 293361 - DNA, 563 bp, Cannabis indica
tgatttgaaattttgcaaccacactattaattttgtttttcaccatgattatccatgatatcataagctacatgattagtttgggggagagaaacatttagtgtgaggaaatagtgagagggagaaaaatttgtaagattgagaaaaaaaaattgtgtaattcaatgtcactgaaaaaaatatgaaaaagtaaaaatatgtgttcaaaaagaaaaaaaaagtaaagtatatgatttcagtgatgttggaaaataataaatatatcttctctcaatcttggtaaatgtgggaacactatggggtattgaaaaagaaaagtaagaagcttgtgggttctgtttgtgtgcttatgatatcttgagccaaaattgtcttttgcctatccctgaatatctgagccatactacctaagccttgaaaagacctaatgattccgaagaacactgttaacattagtggagaaaggtaagcatgcaagcttatgagttatcggattgtggaattaatggaaagagtaaaacttttataacaatgtttcacatttgagtagattgttgcagttg

SEQ ID NO: 293362 - DNA, 661 bp, Cannabis indica
cctcctcctcctcctacgcccgaccctcctcctctgcatagtccgagtcgtcctcctccgccatagtccgcccgttttccaccgtgaagcgccattgcaccatcaattttttttacaggtaatgtgtttttcactatggttttttcatttttttcattttttttttatttttctttgatagttattaattttttctccatgcttgaagttttgggggagatattttgctcgaaacagtaacggaaagtgaaaacgcgggaggagtaaaagcttggcagaaaatttacaggttttgttttttttttttttttctaatctttgaatgtttagtaattggtatattacatttatatatctgtgtatgtgtaaatttttatgcaaatgtatgtgtaaatatataattttgtgtttagtagtttttatgcaactgtttagtaatttttttgtgtatgtgtaaatatataattttgtgtatgtatgatatatgtgttatatgcaaatgcataattcttaaacaatatattatattatatatatatatatattatatgtatatatatatataggaagaggtttcaatggttacatttttattgtaaccatcatggttacatttttttaagccattagattactattaaatggttgtgattaatttgga

SEQ ID NO: 293363 - DNA, 656 bp, Cannabis indica
tttctttattcagatcagccccctttgaatggagggggaagccactacttataggtagtatgcatcagttacaaataatggccataatgagaccgttacaaaatgataataataataataataacaggcttattaatcaaattaattacaacagttataaaatatgtgtaacgtttgtcatgaatgctccttgaatgcttgactgttgacttccgttgattggtgtatgtgtttgcgccttttcctattgatactgcgacttcatcaaatatgcaaggcgtgcctttcttaatatagcgaggtctcctttagttaatattgcgagatcctttctttcggtactgcgagtactataatattgcgagccaccttcaatacagcgagttctctatagacaagtccttctcgcggggagggtaaatttatgccgataacacatgcccctagttcttcagtatagcttgctctgtgctggagaacttaaaatagtctgagcccgtgtttgtcgatgatcatgatgccttgtttattgggtgtcacatttttcgattgattatttaaagtcacagatttcttataagatcatgccacataaaaatatgaactcgcgacgttcttttggtatgtgtgacgctcgtagttcatattgtatgcat

SEQ ID NO: 293364 - DNA, 600 bp, Cannabis indica
gaatgcaaaaaatctcaaggatgagattgaaaacctaatccgattggggcacctctatgagtggatcaagaatcggctgcctcaccttaattcgggtcaggcgacaggggttgtaccgcagggagcaccagggggtgcagcaggagtattggctccagttgctcccgccggagatgcccagcacatccccggtctgccacccagacccaatgggagagtggccatgatctcaggaggaccccatattggaggaaccacccgcaaagaattgaagcggtacgcgggggccgtaaaacacaatgaggtttgggaggttactcaactcccagctcaaaggccccggctgatggatcaacccatcacgttcacggaagaagatgccaagacggtgcgcttccctcaccatgatccgttggtcatcgagacccccatcgccaataaagtggtggccagagtcttgattgacaatggaagttccgtgaatctactcttcaaggaggccttcactgcaataggcctgacggaccgaaaacctctcacccagtggttcccaactcacaaggtttaacggaacgacgcttatcccaatgggaaaagtga

SEQ ID NO: 293365 - DNA, 422 bp, Cannabis indica
gtttcatttttggtatttttataacatatttgttatacttgttattttctgaatttgtatataaatttagttgaaccaagtgatttacttctgtttattgatgtttgtagtgccaaaatgaataatccacaccccgacccactcctagtcaatgcctttgcaaatgaactctatagtgtgaaaatgcaccctggtagttgcattaactcacacatgttgatgataaatctaaagttccaaaaagcaaacctgcttggaattgaattatcaaaagaacagtgggttcagttcatacttaatagtcttcctccagagtataatagatttgttgtatcttatatgatcaacaattttaactcttccgacatggataagctagaagaaaaattgcgagctcatgaacgaaatttgattgcaatgcc

SEQ ID NO: 293366 - DNA, 506 bp, Cannabis indica
atagtagaaggcaaattgtataggaggggctattgaatgcctctcctacggtgtattcttctagtagaagcaaacgagatcatcaatgaaatccacgagggcttttgtggagatcatgcgggttggcaaagcttgtcaaagaagattatttgacaaagatattactagccaacaataaataaggacactcacaaatttgtcaagaaatgtgataaatgtcaaagattctcacatatacctcacgtaccaccaacggaattgagaatgatgacctcgccttacccatttgtaatatgggggattgatttaattggggcactccccatagggcgaggaggagcaaagtacgcagtggtggctatcgacttctttacaaagtggacagaggctgaacctctcgtttccataacctgcaagagagttctcaactttgtcgtcaagaacataatttttaggtttggaatacccatttagatagtatctgataatggaactcagtttgatgg

SEQ ID NO: 293367 - DNA, 558 bp, Cannabis indica
caaaacatttcatttgttgctcaattctccaccaattgctatgaaaccttccagagtacctaattagggcataaacaataaattccagccagtatttcacagagcaaaccaataaatctcaagttgccattaaagctcaaagctcaaaattgcataaaactcaaaccaatcaacaaaaccagctgctaggaacttaaatcaactcaaatgaaccctaaaatttgaaccctaaacaactctaaccctaacagccctgaaactcaatttcacaagttcaaactaaagaaaaacttcaaaaacatgtaaataatggtctagggtttacctccacttgaacctagcttgaatccttaaccgaaaactccaaaattcagcagcaaatccccttggccttgctggtttcgaagagagaaagaaggaaggagagagagttcttctttttggtattttctcttaaggttttttttttttttacaaaatgtagataaatcaaatttggaaaatctatttcccttggctgaaaacaagtggccacgtgccacactcctaggcagccac

SEQ ID NO: 293368 - DNA, 586 bp, Cannabis indica
gttccactatgcgaggacaacaaatggcacgatgaacacaaacaacaactgcatgtaagtaatttcataattttaataaactcgttgtatattttaatttctatttaactctaacagtttcatgaaattttttgaaggccaaaatggttgagattcgtgaaactcaacaagtgccaactaatgtttcgcgcaagtacaatgtcgatcccacccaatttcctagagatatgcatattatgaaataggtgttgggtgagcggtcacgtcaattgagaggactgggccagttgccgagaggtaagacaggggcaacaagagcaactcccagggcaggtccctccgggcagcccacagtcactgaagaggaatatgaggcactaaagcgaagggtggaagagtaggaagcacggaacgagtggcaacaacaaatgatgcagactcaaaatcaaatcatgagtgcgtttcaacaataaataatccaattggccaatgcccaattcgaggatttcacatgcccgcaattcttccgattccaccgattctaccatttcagcctcctagctatgctgctgggtcctcctcacag

SEQ ID NO: 293369 - DNA, 557 bp, Cannabis indica
gttcgagtctgtgtttgggtttgtatccaggtctggaccccgaactgggtgtaggttcgggtccaggtccaagtttgagtcccgagtgcgtgtttaagtttgggtcacggtaaggatctccgtctagatctaggtccatcatttcgatcccagtctggttcttggtccgagtccacgttcgtattcggatccctttctaggtccaagtctgtgtttgggagcgggtcccagatttaggtcaaggtccgggtctcagttccggtcagggtacacgaccgtgtccgggcctgagttccagtctcagtgtgggtttgaggctaggtctgtgttcgattttaggtctgggtcttggtcctggtcatggtcctagtcttgttctagggtcttgtctgagttctggtctgattcgtaggttggggtgtttgagttcgggtctgagtctgtgtcagggtttttgtcccaggattggaccccgatctgggtctaggttcgggtccaagtccaagttcgggtcccgagtgcggttccaagtttgggtctgggtcaagatctaggtc

SEQ ID NO: 293370 - DNA, 785 bp, Cannabis indica
aaagtaataaatataattaataacattaccataaaaataatacagcttacactacactgtaaaaatggcctccgcttaatccgccaccaccctcgtcatcggaaaacatccacaatttaccacccaaattcttttctcgtatacaataaccacatgttttcgatcattttgccatattttgaatgcacataaagcacaccgaccagctcctttattatggagaattttttaaaaagaaaaaaaaataaagaatcaagtaaaaatatccttcaagtgattgataattgttcatcattttacataatactattccttctctacatgcagtgaaggaattaagaggcttcaatcttttttttcgtatgttatttaattttttgtttttttatatctctcaatttaatatctttgaagaaaaatctctttacttttctaatttaatttttaaatattattaaagatataacaagataggtgaaatagagaatgagactttagtgatgtaaaaaaaaaatagataaattaatatatagtgtaatgtaaaaagttcaatataaaataaaaaaaagcaaagattttggtagtgtatttctaaaagtaaagtaaatttattgatatgagagattctaccttttgccgttcctccaagtcacctcgcctcgccgttggggctccatctctctctcgcaggtcgtcggcggctttggtgctaagccttcctatgtccacttattttcctgtcatcgtgaataaggatgagcttgattctcgctctccttttggct

SEQ ID NO: 293371 - DNA, 526 bp, Cannabis indica
atttctttctataaactgatgagttttagtgaattattatccatttggattattaattctggactactaaccttgtttatttgtttttcttcttacagcccaagctgcttgaactcaggtgctatcttagcgagttgaatcggaaagctggacaaaggggtggagttcgtccaagataaagatgaagctcgtttatttatttttgaattaattgtttcagtttcaaaacaatttggatttcaattattagtttgggattttattccctcttcttctctcattatgttgcaaacatttttttttatgattttatatttaacttttttattttacaaataaattgcaatctattagttgagcttcattattttatcttatatataaattaccaaattattatgtttgtatgtgtatgtgtttttgttattgatacaaattctatagttatttaaactctttatatagttattactacataaacactagaaattagtctctatgtttatgaataattgttaattctaaa

SEQ ID NO: 293372 - DNA, 798 bp, Cannabis indica
  modified_base (107)..(107): a, c, t, g, unknown or other
atcagtttactgcatcagacttcaaaagcacatactagtacaagatgttaaatcaagaacaaagaaagttttcatgttagcaagcaagttttggagcagatttaaangtgttccaaagcatagtttttcttcttttggatagcagtgcagaaccagttgaaaacaagagaaagacttccaaaaatgcagattattgctgatgcttcctgtatcttgtgtaataatgcagtagaaaactgcttacaagaattaaaaacatggctgcactgaagattaaactgaatcactgcagagcatattgagatggattgatcgagcaaagttgagcaaattcaaggcaaactgctacacagcctgcatattgttgccttggtttacaagatttggcaatccaggaataaaatgttatggtcctaggagactacagaactgcaagcactcattcaagaagctaaatggctgataaagaatagaattacttgtgtaatgcccaaatgtatagatcaaaaagaattagaatggtttcaagaattataagagatttggtttttttttttttttacagaaagttgtatagttgattgcttcttgaagagccataggttgtaacataaaaagtttattgtgtaatcgaatttctgattcatcaaaaaaatatatatatatatattatataacagctccaactaataaataaaaatgttacaaggcaccactcaaaatataataatatatattgcaattagttaaattaattaaatatttgagtccacatgatttaattaaatataatgaaat

SEQ ID NO: 293373 - DNA, 606 bp, Cannabis indica
atcaacaacacagagagacaaactttttggtacctaaccaaacaatgatgtgcaacaatatgatgatgacaacatatggcaataactcaacacaggcagatgtgcaacaacctggaaagaacctaacaacaacaaacaagcaacaactatctgtagcaacaatttgatcagttcaagatgatgcttttttgctcctgtcactgtaacatcagagtctgttatcccaatttttgtactctgacgtggcatcatgagaatggtgacacgtggagtccacttggaacatctgctcgggaagacaggctaagcaggatgcctcgctggcatgcccagagtaaggtattcagcgatccgcacagggcaatcaacacttagcgaattcagctttcgcatcatgagtcatcagctcaatccctataactcagggatcaacttatgtggatatggcgtacacacgatcccactatcagtgtattcagcctcaatcccacgatccttgcattcagcattgatcccacgatctttcgtttatacgcattgtaacgagagaggaaactctcctcctcaagcttcctagccctataaatgtgatgcatattcactggg

SEQ ID NO: 293374 - DNA, 598 bp, Cannabis indica
atcccacgaaaatgcatttttctgatttcatggccattttgtgttgctgaaaaggtctgagataagggaaacaggtgcaaccaaacaccttgagaaactcatagtcaggttgtttgtgaaaaagacactcataaggtgaaatgttgtctaaaaacaggtgttggaagcatgtttatgacaaacgtagcatgctgaaacgagtaccaccaataggacagatctaaccccagcttgtgcaagcaatgtcatgcctgtctcattgatatgacgatgcttgcgttctgccctgccattttgctcatgatcgtggggacatgagtgctgaaattgaacaccattggctgctagaaaagaggcaaaactcctatactctcccccccagtcagactgaacctttttgagtggaagagaaaactgtttttcaacaagagttttgaattgaagaaaggtggaataagcctgagacttcaatgttaatggaaaaaatccagataaaccggctaaagtcatctaaaaaaatgaatataatatcgataaccttctttggatgggatgtgggagggtccccagagatctgtatggaccaattctaagggaa

SEQ ID NO: 293375 - DNA, 571 bp, Cannabis indica
tctagtgcctcccctccggccaagaagcttaagggcggagaggggtcttcggagaagagaccttctggagaggttattgaccttttccgagaagctgactcctgcaaatccttccactcccaaatctaccaagtctaaggagtctaggccaccaacaactgggtccgaacaggtcaggaggatccctgagcaggtgcaggcaccaacttcacccatgcccgtgctgcctaaagccaagaagggcaaggagatgctagctcactacatgaaccggctggttcctgaggtcagtgagcaactggctggtgctgacaacgactcatctctggatgtgttggtgggccgaatcttgaaggagctcaccagggttagtcttttgtgatacttcccttttaacttttcacacttagctccatatgctgactttttcctttatgtaggctgatttgaagttggcttacacttactcccgggctaaatctactacttccaagagtgcagctctgtccgacaccttcagggcggaggcggacttggccaagaggaagctgaggaggccagggcggagact

SEQ ID NO: 293376 - DNA, 665 bp, Cannabis indica
acggttgcactcgattacttttgatttcccatatttgtttttgaggcgggaagctgaggcatctgaggtttctttgagacaattacctcttttcgtgacttgcctataaatacccacaacattggcacataaactcatttcatcacccttctttgctaagtaagcttcagagcgaaaagaaaattttctggcttcaaagtcgccgaagtgccttcatacaactgctggttggatagacgttgctcgaacccagacactcgaatcttgagtatgtttctgatttcctttatgcttatctttgcatgtttacatttcgaatgcaattttcactgtgctgtagaaaaatgcttaggaaaccctagggttagaaacttttgcgattcttctttatcatgtcttcatgtgggtttacagccataaagcttgtctctgaactgcattgcgtccgtctttcatcttgcttattctaagcttcatgaacttttttgccctaactcaagaaaattttctgacttcttgagttctgacttttctttagacataaccgttctttaatctattgagtactcccggtcgggatatttgcttgtttatcgttcgatatttcgaccaacactcatctcgtgtgttgtcttttgtagatgaactgaggtgagtcttgggaa

SEQ ID NO: 293377 - DNA, 876 bp, Cannabis indica
tttccgtatctaaatatcattgcctcataagataactttaccatcattgcttaataagacaacatttttatcattgcctaataagataactttttcatcattgcctaataagacaacgttttattattgtctaataagacaaccttttcatcacataacagtaataaccgtatcttaatatgatatgcaatgtagtacaaatatacttttcttacctttaatccagattcatgctgttggaaagcttatttaactaggaccttatgttactactaaagtatgttgaaattaacaaccaaacatgaattctaaaatgattgaattaaacatataaggagtttaggaaatccttacattgatcgtagtggaaattaatatctcatttcattttgttctctcacccttgttcgttttaatcacagagtgtaatcaagaatagaacctcgaatcttctttaggctgtgaaagactacatagtcttccacactgatttaagtattgtcttgatatgtgtgggcatatattcaacactaatggcacttaaaaaagatgaagcaaactataagaaaatataatactatagaataatataagctcttaatcttttcttttttagataaagaaagtttagagatctctactagattatattatttatatatgaacatatatatatatatatatatgtataggtgtgtatgacaataatattgcctgtgcgtatctatatgtaaaatgtaaagtgtgtatatatatagctattgcatattaggttaagtagtttattttttatttatagcattttctttaagggttatgtttagacatttaaaatggaaattaaaaaacaaaaataaacatgcctttagaaacaac

SEQ ID NO: 293378 - DNA, 524 bp, Cannabis indica
cgatccgtttaatatatatatatatatttttttttttaaaaaaaaagatttttactttttaatatatttttttaaggtgtaaggccagtggaataccaccattagacatatatgatctgcccatagaccacactatatattattattttaattaattactctctcaatttaattcttatatatatgcgtacatatatatataaataaaaatatatatgcatactggccactctatattttaattatttgattataataattattattatttgcaaaattccctaccttcttctttaaggaaaatcttaaatataaggttataataagaaagtaaagtaacaaatgttatacacaatagatcgatttatgtataggcactgttaaatatattaatttgtacaataatttacacttttatattatatcacttttatatatgtatgcaacaataatttatatttaatataaacatattattaattaataagaataatatttaatttttgtttatcaaataaaaatac

SEQ ID NO: 293379 - DNA, 655 bp, Cannabis indica
ttactcttataaatatttattatatgtattatatattggaggagatttcaataattacattaaatatgtaactatggttactattttttttttagagacattagattattattgaatagttgtaattaatttaggaaattaaataaaaataaaataataaatctatatagctatatataaaggaaaagtataagacggtaatgtggcggtttaaaatctctccaaagttatttttctttttatccttaattttcttaatttttaatattttattaaagtataaatttataaattaatattttactactattttaaatttttttatataaatatctatcttaaattaattaaaacacataataattaaattaaataattattcaattatttatatatatgtatttataattcataactatatatatctgtaaagtttttttttttttactttgtagaatataggaaaaatattttttttatagaaaaaatttattatgaattgaacaaattatgaatcaaattttttcataatgtattatttttatattccaatcatataaagttgatatcatcattgtagttcctattaatattctcaaatttctaaacttaacactcaatttatcgttctgttagttgattaataaaatgtcac

SEQ ID NO: 293380 - DNA, 539 bp, Cannabis indica
gcatagtcaattatgtcgaatttgtcgttctcatcttctattgtttctgactgttccccttcttctgtttgctgtcccgttgtgtatgattctgttgttgttatgttgttttcaagcgttgttgtgttgttttcgatcattgccacattatattcatacggtgttgttgtggatatcaaatttggtgttgcagcaggtgttgtgttgttgttttgctggttgacgcatagtggatatgtggtgaaatctgtttccttgattttcaattccaagtaaaagtagaggcttcgatcgttgcatattttgatcggtggtattccttctttagcttggtactgtatttgtagtgttgtgctggtgttttcgcaccccaatgaagtaagcagtatttgcagtagctcttcgtagttgcattttgttggtatgaattctccactagccacatagttcacataattgtgatcttcattccattgtccattgctcttgatgagtactggtagacgttccattacctgtcattccagtgtcttatttca

SEQ ID NO: 293381 - DNA, 476 bp, Cannabis indica
atttaaaaatttcaagtgggggattgttggaactttgtatgaaattatgtaaaaatagaaaagtgaagtgtgtgagtaggagtcccacatgggatagaaacactacattttaagtgtatatctagtgcaagtttgagatatgggtttgggccccaaggggtacccagttttgcgcgcatgggtgaggactcacacactggaccaccacacgcgcgcgcgccgccgccgccgtccgaccgatccgagccgggttggcgggcgggtgaggtgtcactttattttttaaagaaaaattatttaattaaataaagatttattatttatttatttattaattaattttaacacgtgatcagaagaggtaaaacgcgatcagtcaatgatccgccttttcctcccacgatccaactcctcccacgaacgataatattaccgttttcttaccgttttttcttggatcgacttctatataagtc

SEQ ID NO: 293382 - DNA, 640 bp, Cannabis indica
ggcatcctaaacctataaagacgctcatcgaaccctacaggcctaagactggcatattcgccaacagaagggacgtaatgtactgctaaaggagacttaccggagccggaagtgctggcgccaggagccccagtgttcggctcctgagccgaaggctttggcctgggagcccttctctccgccgagtccccaatatgaaggggcttcccagcgatcgcctggcttctcctctcgaccgggctccccacacgaagtggcctcccggaagctgcttgagccttggagtaagctttctcctgagccttccggtagagatagtcctggtacttcttctcggcagtggcgatgatctcgtcccggaagatcttctccgcggcaggcgccctcacattgggacagataaccctggaaaggttagagtcctccacagattggtgcggcaggatgagcttggccttccggcaattctccgtcgtaaccaggcccccgacgtcgaggtccgcccggtcataagtggcgaaggcctgggctctccgaagaaagacctgagtaggcgcggttcgctcataagggggaatcctaaccacaccgtgaggagctccggatgttccactgctcggaacccggaagagaagaaaaa

SEQ ID NO: 293383 - DNA, 773 bp, Cannabis indica
aggccgaaaagcttgcctccacattggaagagcgagcggaggcagcccgaatatttaaagactctacaccacctccaccgtctcctccacgtgcaccgcccgcagttccagatgggtctggtgttgacccatctccagcttcagttcctgatgggtctggtgttgacccacttgcagcgtcacaggatcctcctgttcccccgtcagcttccattcccagcacctcagaggctcgcgatccagtataccctgccattttggcaaggttggagactgtggagagggggcaggccgctctgctaagaggacaaacagcgattatggatcagttgaagaccataatgacgctcctgcaagatcttggaaggccggcagcagattcacagccacagccacagccacagccacaaccggaagaggaggctcggacaccggaagatgacttcattctcccaaatgattaccaaccggatgatgatgacatgttctgtacacctgagaagacgaatatcaccagcatcgggggatactcaggattctgaggtgcaggtgttagagcagctccagaagtcatggagaaccggaggaagagaagacggcctaggtggttcgctgagtacactgaaaatgaagaagaaggctagggctacttcgacactcgtgaatgcgggacccacttagagtggttgatcggaagctgctcaagacttttcacaattgggtactcggcctgattgggaacaattacccgagagagtgcttcatcggtcgat

SEQ ID NO: 293384 - DNA, 504 bp, Cannabis indica
aactaatttgtggctaccactctgtttttagtaaactttactaaaaaacagtggttactggttactacaacattaccaaaaaagttattttgatagccgtaaccagttcctatcacatcaattttaaaaaggggttattggcggccaaacctctttatgttttgattttatacacttaacccctttatctttttcttggtggccaaatccctcacgtatacccttttttgtaaatttgaggcatcaatcaataatcaccgttaaatatcaattgaattactactgtattggcttcgaggttttgttgtcacgtatatacagatatttaagtgttgtctcaaatttgcaaaaaaaaaaaaaaagtaaacttaaaggagtttgccccaaaaaactaagaggttaagtgtataaaattaaagtataaaggggtttcgaacgccaataacccttttaaaaataactaattcgaaactattaaccgaatatcataaaaaaaaaaaaaaa

SEQ ID NO: 293385 - DNA, 502 bp, Cannabis indica
agtttgggttcgagatcgagactcgggtgcgttcttggtcccgaccctggttgtgtgtccctagtcatgttccatgtttgggtctgagtttaggtttggattcgggtcccgagtccaggtttgggttgggatccaggtccgcctcccaattcgggtgtaggtctgggtccaattttagttatgattccaagtaaaagtcctagttccaatcccggtcaacttctggctttggttccaattttgggtcacagggtacgggttcgggtccactttcgagattgggagtgggttcacgtccgggtgttggttcgggtccttgtcagggttcgggtccaggggtgggtcccaaatccagacaccgaatacgggttttgtccaagccctgggtccagatctagatcccaatctcgggtctcggtttggttccatttctgttgccgggtcacgagctgggtcctaagttcaagtccaggtttcggtcgggtactaggtcccggtccta

SEQ ID NO: 293386 - DNA, 621 bp, Cannabis indica
aagaatatcaatgtgataagaatttggatgaattaataaatcagataaacatataaatgatcacatgaaccaaataacatactaaataagtaataaaaataaatctatttctttattaataattgaataaaaaagattacattgaaatagagttttatttagggcacaaagcccaacaaactcccacttgcactaacataaaacaatcaatgcatttcaattaattctaaattcaatatgtgcttttcaaatgtagttgcagtcaaaactttggtgaatggatcagctaagttgtcttcagtatctactttctccaccagtacatcccctcttgccacagattctctgatgatgtgatatttcctctctatgtgtttgcttctcttgtagattcgaggctctttaccgttggttatggctccagtgttatcacaaagtaaaaccagtagtttttccattccaggaacaacaccaagtcctgtgaagaactttctaagccagacaagttccttagcagcctcggcggcagctatgtactcggcctccatggtagagtctgacgttgcggtttgtttagcacttctccaaacaactgctcctcccccaagagtaaacaccatc

SEQ ID NO: 293387 - DNA, 658 bp, Cannabis indica
cagaagagaaaaaaatatagtaataatttatttttatccactcaaattacaaaataaactataaataatcaaggaaaagagaaaaaggattgtacctccaccattgtcgtcctccattatacgattagtttctgggcacctctactgctctcccttcaacctttagggatttagcttaggaatgaagatcaaatagggtcgatatggacaaaatcgattagtttttagtacgtacacaattttcgtttttgattttgaggatttaggttcgatttcgtgatgaaattttgaggatatggtttctttctgaaatgaactatgaaattttattttgtttctttttgattctttttatcttaattcaatcagtttaattaaatttaaatttgttttatttatttattttaggttttaataattaattttagttattagttttagattttaggaggaaaataaaaattaaaaagggatttgctcttatggttattgaatgtttagcctgggacgtggacttggtgcgtgatctgtttaatacaagggatgctcaactcattttgagtattcccttaaattcaagtcgtattgatgatgtttggttctggtcttttgagagctcagggaatttttcagtaaaaagtatgtatcgacatttgca

SEQ ID NO: 293388 - DNA, 807 bp, Cannabis indica
attgatagctgcagtgcctgggggatgattgtaagcttgctggttcgaattagatcagctgtgagtttatagatctcattctccttttcatcaagaagtctgttgaggtttttgacagtgtcttctaactttcctttttcagtctccacttgctctagtgagttctttagagcacggatctgtttagtcatgtactcccattgtgcaaacatttcttcataagcattttgtcgacctgtgctatcagcttctgatgaggtggagactgcatcatcttcagactcaactggattacagctttgcgccatgaatgccagtacctgcttatcctcatctgatccttcactggctgtggaattctttttctcatcactgtcactccaggttgctgcaagggcctttttcttttttagtgtgttggcgcactcagcctgaatgtggccatatccatcacattctctgcacttaattcctcgacctttttgatcagtagaggcttgtcctggtttgaaatttacacctttgtttctctgagaagattttctttgtcagctggtgaattttttctgtagttctttttcaagaattttgcatagtttctcgttaacagggcaaccgtttcatcagtaatgccattcaaatcttccagaactggtttcttgttttcttggtgaataagtgcaatgctggcatctgacttttctttcaccacctccttttgtttcttggttttcttccacctggacagtgatagctcataattttcaaagacccgatgagttcgtcaaaatcgagttcctcaatgtt

SEQ ID NO: 293389 - DNA, 408 bp, Cannabis indica
ggcactactctatcactaagagcattcgaaacaatcaaggaagaagaaggaaagagagtggcggctaggtttagtgtgatggcccaggtttttctctgaaaggaataagatgcaaaaattacttttcctgaagccatcactatctatttatagcatgccacatagggttaggtttgaattattaggcattaaaataattaaaatattaaatgataaatcctacataaggggctggccatggctagtggatttaggcctcacttttgcaattttgctgttttatcatttctgcatctcattttctcaaaaacgccaattttcaaatacacctaagaaactctttctttatagtttcgcccttgcttagtgaaaaattaaaaaataaacatagtctcatttgagaattat

SEQ ID NO: 293390 - DNA, 513 bp, Cannabis indica
gtcacgtttgagagtgcaattaattacataaagttttaattaattcagtcttctaaatatttatatttgcactgcacctcgctaaattatatatgttttgccaagttaatctccaagttttatttttttgataaattagtccccaaactatatatattttggcaagttcatccacaaactttatttcttgataaattggtctccaaacttttatttctttagcaacattaaattctcactatcagatattagcattttattgatttttatttcttttacatactttaatttaatttttgtgttaagttcaaataattttattttttcaaaattttaataattttttggtgaataattatattaatattattaattatattaatttcattttaaattttaattatttgataaaaataataatattaatattttttattttaaatttttagtactcgtataatatatactgtaaaattataatatttagttttttaagaaaatatttaaaatata

SEQ ID NO: 293391 - DNA, 600 bp, Cannabis indica
gcctgctttcaggcttatttattttttactctgcccgggggtggggctctcccagtccggcagagattttgtacttttatgaactcgtttctgtccccaagaagggggacaaacttaaggacgagttttacggcttccgggcccaccctttgaatgagggcccgatccctttcaactagcaaaaacacatcaaggagtatcgtcgtcgcttcttcttctcctccgggttccgagctgtggaacacccggagcttcttacggagtgggttaggatccctccgtatgagcggaccgcgcctactcagctctttctccaatgggccaagaccctcgccacttatgacaagaaggatcttgatgtcgggggattggtcacgacggagaattgccagaaggtcaagctgatcctggggaatcagtcggtggaggactccaacctttccaaggttatctgcccgaacgtaagggtttcggccgcggagaaggcttacactaaggcccacgcggctgctgggaggccccttcgcgttgggagcccgattgagaggaggacccaggcggctgccgggagaccccttcgcattgggagcccggttgaga

SEQ ID NO: 293392 - DNA, 553 bp, Cannabis indica
ttgttgtgggcaggaatgtagcactccagctcacccaggtatctgccctggtccaagagttcgaaggcgcgcctccgtaatcttggacggagggcttacccacctggcgcccaaggcaccctgccttctatgaggaatcgccgcagcaagctcctcactgacgtagtccatgccctcaactaggacgtctccgtcaggatcgactagctcccagcctcgttgtactccccgtaatttgggggctgaacctccgcctcagagagaccgccaggacatatatcgtcttgcccctcgatttccttgacctcagcgtccccttcatgatccccctccatctggacggctggatcctgttcggcgttgggcaaagtggcatgccgagccacttgaggatcagatgcgtcagccagacacgtggttttctttgtacgagccatcattctatggctgggtacagggtttgaagaatgtccttcgctagaggaaggtggactagaacaaaggcgaggatgatcctcatgcagaagttgaagcagctcctggtcgatccgat

SEQ ID NO: 293393 - DNA, 561 bp, Cannabis indica
ttattgtatataagatggtctcattgcctctgttgtattgatacaaccgatgagaataataccattaatgttcctagacaaaaatcacggtaccttgtcgtagtgggaggatttcaaggaatccacccagttatgacttggaaaacacttatgataaaaatccattgttagttgaaacaattaatggatagtcagaataaggaactaagaagcaaaaccaagataactatggttaaaaccattcatatggagtaaccaaaagtattctattacaaggacaagaagtgaaattttgatgataagtctattcaatggacttaacaaaactttttgatctagtatcataggtttgagattatctaaatttgtggcttgtggtatacttggtaatttacttactttagtgcaagaaacttactttagtaagatgctagaggatttttctaatggctaactctaaaggaagtcttttagctcctacacagattttatttatctaaggaacagtttcaactattccagaaaagataaaagtcatgaaaggaattccataagaatcaa

SEQ ID NO: 293394 - DNA, 963 bp, Cannabis indica
aaaacacttgattcatttacaaatttttaaacattaatttttacaaaagtaatcgagccataatctttaaagaaatattcttaaaccaaaacatcgtgacaatcccctaacatgtaatccatgcctcaagctcaccaccctcactgtatagttttgccttttacctgcacacagagtaccccgtgggcgtacgtacccgaccgtaagtaaaggaaaggacgtacttagttagggtaacggaactaaaccccccctaaaacccccccccaaaccgaagtaaactaaactaagttacgtactaaagttaaagttaaactaaaactaaattactaccaaaccaaactactaaactaaactaacttaacttactaacctaacctaactttacgttcgactaactaactaattaaactaaaaccaaactagttcgtactaattactaccaactaatttaattttacttttaccttaactaactaaactaaactaaaccaaactactactaattactaccaacgtaggttaagttaactttaaccttaaaccaactagtcgtacttaacttacctaccaaccaaccaactaaactaaaccaactaagttaagttactttactttacgtccgaccaacttagttttcgtttcctaccaaccttttaaaccccttttaaacccccaaacccaaaaactaaaaagtaaacgtacggtagggaaagtttaactttacccaacctactttacccgttacccccgaccccccaccgacgaacccaaaaaacccaaaaaaaaaaatagaaaaagaaaatgaagagagcgaacaaagtacctagaaaatctacaagaaaacaaattggggttttggaaagccctctctttctctccctctgattcttttgaatcttaggtttaagctcaaaattgagctttcgcagagaagagagaaagcgagaggtgcagaatcga

SEQ ID NO: 293395 - DNA, 499 bp, Cannabis indica
attagccaaggcaaatgtgaagcattataataaatatcatgcaaaagtttccaagtaaagtgcttttgagaatgaacaggggaaccataaaaacaagtaaaatgccatagttcattaacattaaaacttacagtacaatctatatgattagaggaatagttaaaaatatttacagaaacatcagccttccacaacaaaagtaaaccccctccaaaatgctgcctagggatttcaagaccaaaatcaaaacctaacaacgctttaaacctatctaccgaatttggtttaagcctagtttccatcaaaaaaataagaacaggtttgtgagacttgatcatgtgggaaagccgattgaatgctcgagggttccccaaacctcgagcattccaacttataaagctcatttttctgggcgggtgtgctccgcaccacccgcctgttcagcatcaggaattgaagaaaaaccacttacatccgcatcaccagctcgagctcgctt

SEQ ID NO: 293396 - DNA, 630 bp, Cannabis indica
atcaaagattcagagaaagagatctaggttcagatcttgataatactccgcgacagaaaggatacaagggttagagatctgaacggaaggagtcatttaattccgctgcacccaatgtaaggtttcctaaactttatatgtgtttatttcatcgttttagaaagttcatatttagggtgttaatcaacatacttgtgagtagatctaagatcctggtaaaataatttccaacaggtaaataaaatatgttcatgttaaaataatattttttgaaactaattccctcgttggagcagataaaagttgcttagttgttgttgttgtgttgttgtcaggttgttgcacatcttactgagtaattatcacttcctgccattatcacattgttatacaccattatttgggtagttgccaaaaaggattgtgtttctgtgtagttgaatgtgttcacacacaatggatattgtgtgaaataagtttccttggttaataactttatgtaaaacaacagactttgtcatcctaatttggagtggttggcagccttccttcatttggtatttcagttgtatttgagttgtttctatggttttattttagtttcttccatcattatatgcactagtttag

SEQ ID NO: 293397 - DNA, 557 bp, Cannabis indica
gggatcaagattggggggcggttctaggtcccgaccctggttctgtgtccctagtctagatccatgtttggtctgagttcaagttcgggttcgggtcccaagtccaggtttgggtttggatccgggtccagctcccaattcgggtctaggtttgatttggagtccgggtcctagtccggttacggttctggatctaggtcaaatttcagttatgattccaagtccaagtcctagttccagtcccggtcaacttccagtttcggttccaattttgtgtcacagggtacgggttcgggtccacttatgggttttggactgggttcaggtccgggtgtgggttcgggtcctcgtcagggttcgggtccagggctgggtcccaaaaccagaccgactacggggttttatccaagcccttgttcttgatccggatcccaatctcgggtcccaatctggttaaatttcttgtgccgggtcacgagctgggtcctaggttcaagttcgggtttgggtcgggtactaggtcctgatcctagttctgtttcccaggtccctatcct

SEQ ID NO: 293398 - DNA, 610 bp, Cannabis indica
taacagatgttgttgaagaacttgaagctgaaaaggaaaacactacacttggagaagatgattttagcaatgctaataatgtggatgaagtggaatctatgtctgtttcagatgcaacaagaggtgctcaatctcacactcaatcagatgggtcttcaaagaagaaaaggaaagctgcaaatcatgaagaactttcaaatgcacttacacaatcagcttctattctcgcagaggtaattgaaaaagcttcaattcgtttgagtaaagctattggtgaagacttgaatgaaaagcatatgcagctcgggaaagagttagaaaggaccactacacttactacaactcaacgtcataaggtagctcgcatgattatgcaagataatgctctggtttcttactttttcagtgtcccagatgatgagaaggatgaatgggcgagacttctgattgatggctctctttagtacacagctcgggaaagagttagaaagatcatggttattcactttggtctaaaataatttgcaggacaatatatattgcctttgacattcagtagtatcaaattataatcttttggatctggtgtaatgtgttatgctcataattt

SEQ ID NO: 293399 - DNA, 685 bp, Cannabis indica
attattagttattgtttgaaattatttttaatgtatacaataaataaataatacatttcacattaattaatgtaaataatggtattacaaattaaaagtatactgaatgcaatatattagttttaagaaatcttgattatctaattgcaaattgttctcaaattaatccaaaaataaactaaaaattaatattcaaaatattaattaaaaaatatcgtacttttaagaaatttaaaacattttcacacaacatgaattaaataattgtaattaaaaaaataataaaaatattatatatataaatacgatataataaaacaaccttttaatcttaagcttaaaattaaaatctaatcacaacaagctaataaacttttcgttgttgattgagaccactaacacatctcactcgtaggtaccattgcttctaattgatattggtgccacaaagtgaagaaatcaataatcaatacttcacaaaatataggatttttcaagaaaataaaatgaagatacgaagctacttgatctttaaccaacagaataaacactttcacaaagttgttctacatttagcaacaaaaacatcaaactgaatttatacatatatataaaacataaatacaactgttgtattgtattgttgactaaaaaagaacataataatgtactacaatcagaacct

SEQ ID NO: 293400 - DNA, 579 bp, Cannabis indica
aaacccaaaagtggacccgaacccataccctgtgaccctaaattggaaccaaaacaagaagttgaccgggactggaactaggacatggacattgaatcataactgaaattggacatagatccagaaccgtaaccggacaaggacccggactccaaatcagacgtagaaccgaattgggagcaggacccggatcccaaccaaaacctagactcaggacccgaacctgaacctgaactcacccccaaacatggaaccagactaggtacatagaaccagggtcgggacctagaaccgcacccaagtctcgatcccgaacccaaactcaaaaatgggacttgggacctgaaccagaacaacaccgagacccgtgacagagatctagaactagactcacgatttgggtaacggggcctgcagtaaggaactcagactaggaccagaacccagacgatgaaccaaacccgaacccagacctagacttgggacaaaaaattagaacctgaacaagaattgccgaaccaagaccctagaaagagactaggaccgtgaccaggacccagacccagacctagaaccgaa

SEQ ID NO: 293401 - DNA, 571 bp, Cannabis indica
ttttctctttcgctctgaaagtttacttaaaaacgaagggtgatgaaatgaggtaatgtgccagtactccaagtatttataggcaaaagggtaactgtacgtaaaggaaccttagacgcctcggcttcccgccttaaaagtgaatatgggaaatcaaaagtaattgagtgcaaccgtcagtcgtggagagagggaacatgagagagggattgcttcgctctcacaagttcagaagtcaatttgtatatctcactatctttggaacacaactccaatgtcatcttcttgagcttatcttctagttcacagttactatcatcaagagctttgttcaaatcctgtagttccttcactctcttagccatatagccccattgagcaaacatttcctcataaaccttatttttctcatcaactgttgattcagaataagacaaggagtcatctccctcaacttcttcaggaacagattccctgaccataaatgccattacagacttatcatccttcgattcatcactagcctcttcttcttcactatcactccatgtgacagccaaggccttctttt

SEQ ID NO: 293402 - DNA, 589 bp, Cannabis indica
ccccaaccggcagaccggttctgtaaccggaattccggttctgggaattcctgaaccccatccggaattccggatgcataactggaattccggttcctcgcaggaaacatgcaaaaattcataacttgctcaaatcaaatccaattcaaacaaaaccttccagacctgttctaaataccccatagaacatttctaaagcaacaaaaccacccataaatcacaggatcaaaaatcaccattaaagctccaagctttgagttcaaaactcaaacatggttaaacaccactaacatgcatcaaagcttgattaaaactacataatcatgcataataaaactgcagaaaccattctcaaactcatacaacaaacacagcaaccaaattcacaatttctctttgaaaactataattttgagctaaaacttccacaactttaaacaacataacaatcatgcatcacaagcagcttaattctactcaaataaacaagataaaacctctgtaaacatcatcaaaaactaacagcagcaacacaactaaatcaagcatgcaaaacatcatttcttccaaaatttccaagaaacttaaa

SEQ ID NO: 293403 - DNA, 508 bp, Cannabis indica
cctggttcgaggaggttccagcgccggtggcggacgtgggcgtcataaattcatgagtgattctaatcactttgtcaaatatatatatatagatggctaattagtatttttccccgaactttgacatgtactaaatcgtgccccctgaacttttttggccgttagaaattccccccgaactatttagattgttaaatttgaggacttttgtctaatttcattcaattttactgtttcagtgattgtttatgtactaaaccatgctccccaaactttgatatctaccaaatcatgcccctcaaactttgatatatactaaatcatgccattgaactttcatccatgttagaatttttttactaaaattagacaaaagtccttaaatttaacaatctcaatagttcgaggggaatttctaacgaccagaaaagttcaaggggcacgatttagtacatgtcaaagttcagggggaaaaattactaattagcctatatagattgtgtttata

SEQ ID NO: 293404 - DNA, 541 bp, Cannabis indica
ggatgggtaaccgcagggacccgtccctaatgggatggggattccccgtcttggtggttaatggggcggtgatgggggacaattttaatacccgaagcggggatgggacgggggcggggataatactatccgcaccatatccaaccccgatatagatatatataatttcctttttattcttaatatatatatagtctagattgataatcaaaattattttgattatcatccataatcaaaattatatatcctatgtttaaattatgaagatctaatgacgatagtgaactgatgatcattgtggattacatgtaaatatattttcttctcgattcttaatttcatctttgtttactttttaatttgttgggaggcttgagaagagcattgctattaggcaccagtggtgcctagcacattctcgacatgtcgcgttgcgattggctagcgatactccctaaaagctattatattaaattatatgggacccgatacttagttggaccaatagcgatattgacacataggagggtgctaggca

SEQ ID NO: 293405 - DNA, 595 bp, Cannabis indica
tccatgtggtttttgtttgttatttcttttcaagaaataacaatctcttttaaaatgcccaggtttaccacagttgtaacagccattagtttcatcagagtttctagggttagaatttgatctgcctctttgaaatcctccctgtttgtttgaacctctgccttgacttctacctctgttattccaaggttttcttggacctggtctgcccctactcaggttgacttcaccattagaatgtccacctttctctgtcctcatttctaagtctttagatttgagtgctgagatcacctcctctagggttatagatgtccttccatacttaatagcagtcttgacttctctgtaggattcaggtagagaatttaggataataatagcctggttttcatcacttagtgcctcattttccccagaatttgcaagttcaatatgcatccttaagaattcatccaaattttgatcaagagatttggatgaactcattttaaacccaaaaatcctttccttcaagaaaatcttgttggttagggatttttgttgaaactgttcttccagtttcttccaaatctgggcaggggtttcttccttg

SEQ ID NO: 293406 - DNA, 846 bp, Cannabis indica
gacgaacaaccagtgcaaattctggataaaaaggaaaaggttctccgaaccaaaaccatatcattagtcaaggtactctggagaaatagtaaagtggaagaagccacttgggaacttgaatctgatatgaggactcagcatcctgagttgttcaggtagatttcgggggcgaaatcctttttaacggggggataattgtaaagaccgcatatgaataatactttgaattattaaataattagggtttatgtatgagattttattattattgataataagacaattatgtgaatttatttgagttcgtatgtatttattatgctatttaatgtttaattacccaatttctgtgtttgtgttcggaagcggtggaaagcggcgttggggcctttagagaattgtattatatggtttagaatatttttgggatattatggttggatattagaggtgttagaattttcggggttggtatttgaccaatttacccttgagagtttataactaaattatttaactagaaggggtaaggaggtcttttggcaatagttattttgtcttgttgtgggaattttgttagctgaagttagcttaattactaagaaaaggggggttttatccttttattacaatattaaaagaaattcattttatttcatcaatcttcctctctctctctctctctctcattttcgaaaccccaagaacctatcctgggtttgattttgcttgctgaatctttggagttcctagctaagtggtgaagctttgatccaaggtagtgtaccctagcttttctcttttgattttagttgaaacttaagttaggtaattcttgagttctta

SEQ ID NO: 293407 - DNA, 634 bp, Cannabis indica
cattttaaacagataaatgcttttagagatcaatatttgaaatgcactaagaaccaactacatcttcaagtattgaacaccgccacgctacaaccaccatcgtcagcattcatcaccaccaacagcaaacgcagatcattaccactacaactaacacaagaaaatcagactattaacagaaaaatattgtgtaatgcttaagaatgtctaatgagcaccaggaccaatttcagtttaaaaatattagatagggtgccataatgctcataatgttttggcagcaataaaattggatttatgaagatggtgagtacatcgaggatggtggcaacaggaaagatgaagactcaaacaagaaatcaatgcactatcaataaataaataacagttctcatcaacagacagaaactgagatggatcacattaggtaaaggaattaaaaaaaataaagcaaaacagacctactatattagtcatttgggaaatagccctcagatcttttggataaacaactggtcaaagtcaaatcaaaatcagagattttttacacacaagcatataacttactcattcaaaccagattgcatcttcatcaacctacagagagagagagagagagagagagagagagagc

SEQ ID NO: 293408 - DNA, 540 bp, Cannabis indica
atcatcgagatcaggaagaaatagaaatattaggagtaacctgcaaactttcttaaacaattctaattgcagatatatagagtaagaaaaacagcttgatcagaaaaattaatatgggaaaaattatttttgaagaaaaagaaaaattaattaaccttttttctttttgctaattaaaaaatactaaatttgataaaaaaaaaaattacataaagtaaatgtataatttttgtcaagaaaataaacaaacaaaaaaaatgttaaattattattaaaaaattgaaacaaacaaaaaaaaatattaaattattattaaaaaattagaagtgttatgtaaggatgtactaaactcctagagtttatatcatactctcaacatttttgttatcattagatcattaaataatgtacaatgtacaattaagtgtccctattatagagataaaatagaggattttctattttacaagtgtcctattatatatatatatatatatatatactaggtgattgttacgtgaccaagccacgtagtgttag

SEQ ID NO: 293409 - DNA, 597 bp, Cannabis indica
ttgggatttggggtccagggtcgggatccaggttcggattctaaagtctagattggagtcagaatctaaaatattagattaaaataaaatttgtttataaaaaaatctaaagtgactaattttgattctcaattgaaaaaattgaaacgtgaaaataattttataaaacatgattttagaaaatattttttttctaaatgtaaaaaataaaaaattgattaaaaaagtgttactaaatgcatcctatattaaaataaaaatactcttgttaggaatttgaacttttgattatctttattaattataaatatatgttatgactaactaaatatataacatatatagttttgggattatttcacaaatacacaaaaataacaaaaaaaattacaaaaaaacggtttcacagaattttaaatatttttacaattttttttgattttatttagaaaatacggtctttttgtactgtagtcttgttaatttgttgttgattttttgttatctgtatgttattttttgttattgttatgatgttatttagatgttattttcatgttacttttatgtaatttttttgttattttcgtgttgttt

SEQ ID NO: 293410 - DNA, 578 bp, Cannabis indica
cgcctctttgatagttagatctttcgccaaaaatttttctaagtacgtcgaactgataaccaacatcagattcagtaccagatttatcgctccggggttgtctttcgaatcatttcctatcaagctccttaatcagttcctcctatttaattaaaaattattagaacatataattaatataaaatttaaattttaataataccatattttattcacttatataatcttctcgagaaacttcgttaacaaattgtaataactaaaaaataatttttgttttcacatataaaaatttataaataattttatttgcaccctaaaaatttataagtatactttattttagtaattttttttacataaaatatatattttaattatattaatttttttaattttttcttctaattgatattcttagattatatacatacataacaaaattagattatattttaaatattataaaaaaaaataatataaaattttattaaaaaaataaaaagtttaacacatgatttaaaaggggctttttcatttttacacttcaaaatatttttgtttttttgcattttacg

SEQ ID NO: 293411 - DNA, 512 bp, Cannabis indica
ttattaaaaaaaacattatatacatattaaatgaaataaaaattaatttttccatcttcttcccgtcatattatttagattaacaataaattttttttgttaggagattaacaataaactttgattctcgattcaaatgatatttttcaattctattttcatatatttaaaattctaattccataaactttctactaatatttttcaattaatgaaacgaaaagaaaaactttaattcctgtatgaaaaatcaaactttcaatcctaataatcaatagaaacaacatcaaatttcaagttctcaaaatctataaaaataaataaataaaaacagatctcataaacacaaactcaaacattagaacctcagtaaaacactaaaactcaaacattaaaaacacacacaataaaattcgaacccagaacttataacacacacatctgaataaaaattaaaccataaatgaagatttatgttagtattttttgaatttcggtatttatcagcaaca

SEQ ID NO: 293412 - DNA, 474 bp, Cannabis indica
gatcctggttaaataatttccaacaatgagaaggtttccttatggttcaacatgtgggagtctaatttatgaaatgttatgcactagacctgacatatgatatgcaataggagttggaaatattatacaaggatcttagatttactaacaagtatgttgcttaacaccctaaatattaacttctaaaacgataataaataaacacatataaagtatgagaaaccttacagtggttgcagcggaatatgatgtctccttccactcagatctcaaacccttgtatcctttctgtcgcagagtatcacaaagatctgagcccgaatgtccttctattgaatctggattcttcacgatcttccacattatgattgaggtaccacttgatgtgtgtgagcactcactctatcactcaaggggtttcggtttcaatagtgaagaagagagaagagaggtggcggctaggttaatggtaga

SEQ ID NO: 293413 - DNA, 985 bp, Cannabis indica
cggtcctagtcttgttctagggtcattgttcgacgattcttgttcaggttctaattttgggtcccaagtctaggtctgggttcgtgtttggttcttcgtctgggttctagtcctagtctaactcccagatctagacgccgattactgttccgttccatggcccgttacccgaatcctgagtcaagatctagatcactgtcacgggtctcggtcttgttctggttcaagtcccatgtcccatttctaaattttgttatgggatcgagactggggtgcggttctaggtatcgaccccgaatctgtgtccctagtctggttccatgtttgggtcttagttcaggttcgagttccggtaccgagtccaggtttgggttaggatccgggtccgactcccaattcgggtctaagtctgatttggagtccgggtaattgtcaggttacggttctggatctatgtcaaacttcagttatgattccaaatccaagtcctagttctagtcttggtcaacttccggttttggttcaaattttgggtcacagggtaagggttcgcgtacacttttgggtttgggacttggttcaggtctggctgtgggtttgcgtccttgtcaggattcgggtccaaggctgggtcccaaatccaaacaccgactgcggattttgtgcaagccctaggtccagatccagatcccaatctcgagtcgcagtttggtcccatttctggtgccgggtcaagagctgggtcctaggttcaagttcacgtctgggttgttggagttattttaccaggatcttagatctactcacaagtatgtttattaacaccctaaatatgaactttctaaaacgatgaaataaacacgtataaagtttaagaaaccttacattgggtgcagcggattaaatgactcctccgttcagatctctaacccttgtatcctttctgtagcagagtattataagatctgaacctggatttatttct

SEQ ID NO: 293414 - DNA, 537 bp, Cannabis indica
agattgtataataaataaataaatggaataattaggtaaagtattatttttaataaatttttttatatttttacgtttatttttttatatatatttttactgtattactatataaaaataacataaaaataataataaaaaaaaaacaacaaaaactaaaaaaaaaaaataaacatacgaataataaaaatttaacaaaaaatatttcaaatatattttccattttcttcgctgatatcaaatacttggatgggccggggttggagtgaaacccggcccaaatagtcacaattcatgttaactaaacctaacgttaccatgttctgtgacatttctccggttcactggctctgtacaaaactcgatagccattatttgagagagttaagctgagtcaggcgcatcaacccagaaaagaagaagatagatttatcttctactactgcttcatattcaggaaacttgttcaagcttttaccttatatgcttcctttagtttgcaaaagactctcccttttaaagtccagacctccaccc

SEQ ID NO: 293415 - DNA, 526 bp, Cannabis indica
agtttaacatgccgaaaactatgttcaaacagtgtattgcacgcgtgactattttatttttattacgcgtgtaaaattgactgtttgaacattattttcttatattgtaaattattccaaatttcttaaaaatttgtaggatatcttaaatagctataacgtacatgaatatgaaaaaaaaattaaaactaaattttttttttcttgaatgccgaaataagttaagggtgcatcaatacatcctttttatgggggtgcattgtagaatcaccctaaaacaatattctaaacttaaattttgttagaataaaacataataataacatgacttgcaagtattatgaccatgttacattttttacatttgtttatactataattggttattatttagaaaaaataagggatataattcaaaatattattttatcatattttaaaaaatacaaaatttgacttatcatttaacagaacagaagattcgatcaataaattttacaaaacacagagtctaaaataatattta

SEQ ID NO: 293416 - DNA, 777 bp, Cannabis indica
attgagtataagtgtcacttcataatcgagactatactactgcaaaaatagttttttccgatgttttcaaacagtcgtttaaagtatttccattggtttttatacgactgtcgtaaaacggaaaaataggcgacggttaaaaccgtcactaatgtggacttcccgacggtttaaaaccgtacacctatataacacggtataagcgacgattttaaaccgtcgggaatgtaaaaaaagaaaaaagaattaaataaaacagctaatttattttattacaataaaactaagtttaaaacacattaatttatataataataaaataaatatatataataaacaaaaaagtaatataaataaataaaatgtatgtataccaaacttggagagagagaaggagacggatgggaggtggtggtagtccgacgtatgagacggagatcagagggacaccgacggagatcgatggtggtagtcggacatatgcgataaagaggagagggagaccgacgggaggaggggtgggtggagatcgatgtgttggaatatattttactaggatctagatttactaacaagtatatttttaacaacctaaataggaatttctagaacgatgaaaataaacacatataaggtatgagaaaccttacattggttgcagcggaattaaatgactcattctgctcagatctctaacccttgtatcctttctgtcgcagagtatcaccaagatctaagcccgaaactccttcagttgtttggattcttcacagtctt

SEQ ID NO: 293417 - DNA, 617 bp, Cannabis indica
tcattttagatgagctgacaactctattcaatggatggtagctttgactctcgcctaaacgggacactgatatcagtttgttgaaaaccttggaaattatttaggattgtatgttttagtatttttgcttgtcattcctacttgctatgtgctaataatttctgaatgagattttgtgttgaaccttacttgatttctatttattgttatttgtagtatccaacatgacaatgaccaaccccatggtgtcactgttgactgataataagctgaatggatctaactttcccaaatggagagagaacattaacattgctctcattggtgaaaatgccctgtttgtgttaactgaaccgtctcctgagcagccgggtgataatgcaaccaaagctgtaaaggagaagtacgagcgttggcagaatgccaacaacaaagctcgatacttcatgctttctagcatggttgacaccttgaaaacaaggtttgcaaacactgacacggctgcagaaatcatgaaccagttaactgaactattcgggatggcatcaatccaatctcgctttgaagcgacaaggaattttatcaatgcacggatgaatcctcatcagaacgtgcgt

SEQ ID NO: 293418 - DNA, 601 bp, Cannabis indica
cttcagctcgttgaatggcttctacgagcttgatgaagccttcagctcggtcaaggaaatcactcattgagtcgaccagtcaattcttccttatatccttccatagttcaccaaggacttcaatgccccctagtatcgcggataactttccatcctcgattacccgcgacactttagtcacttccgtcataaatctgctgatgcattcctagagtggctcgcctggtcattgctttacttcgaccaaatcgccaagacgcaatgggagctgacatgaggaagagaattgtgcatggaattccaaagagaaggttttccatgaactaaactttccaggagcaaacttgaaatactattgctgtgcggcttccgacagagtggcagggaagatactgcagcatacgtccccttgtactccttgtaaatccatttgcatctcaaaatacttgagatgggaaagaggatcttctctcccagtatacatcttccatgttggcattttgaacttgtggggtagtggcaggagattgatctttggtgagaaaggagttctgcgagcacggtctaactcaagatcattgttactgttgggttttgtgcc

SEQ ID NO: 293419 - DNA, 714 bp, Cannabis indica
agttagtactgacacaattagagaaaaattatagttttacaaacattagacacttataccgctaaacataaatatagagtttatgccgcttacaaactccaaacttttagttttatgccgctatttaccatatatattataaaaatatttgtgagataaatatcttatattttcttatccatacacttatattatactaggcgaaagttacgtgcattgcacgtatgcttagtcatatatattcaattttatttagcaagtgataaaatatgcatatttcttcaatttttatttttacattcaaatagtcattctaatatgcttagaaatgttttagcagtaaaaaaaaattcaattaatttagtatgtctgtttagcctgttgaattaaaccacatattacctgtacactgtaaaaaccagattattacacaaagatttacaaggcagtaaaataatccctaggtggcctttggcctctattaacctagacaaaagcagttaagttagttacaaagttgattaacactttgtaactaactctcctctctttgtgctataatacaacatatataaaaaccagcaagaacaacaattaagtaagaggcaaagaacatttcaaaaaaaaaaaaaagtaagaggcagagaaacaaaaattcagagcagtactacagaatcagaaacagaaaatcagaggcataacaatatacaacaa

SEQ ID NO: 293420 - DNA, 531 bp, Cannabis indica
taagattgttagatttaaagatatttgtctaattttattcaattatactaattctgtgattgttcaatcgtgctacctagaccttgatatctatcaaattatatccctcaaattttgacatataccaaatcaaaccccgtaaactttcatcgatctatgttaaacttttcttattaaaattaaaaaaaaaaaattaatccaacgatcttaatagtccaagaggatttttaacgaccttaaaaatttataggacatgattagtacatgttaaaatttaagaacaaaaattataattaaccgaaaatatatgtatttttacttttttttatttttggtcttgcgctaggtgggccctaagtaagcgcttaactattatagatctaagacacaaatataacttggttatataacacaaaaaataataatttcttatataactatactatagtttaaaactacttaattaacaattaattttgtctaattgcatcgtacaaaaggtcacactcatttattctggagaggctgtgt

SEQ ID NO: 293421 - DNA, 1552 bp, Cannabis indica
gaacatacgaaggaacaattatgccagttggtgacgaggatgattgggaattacctgatgacataaagaacatgacagttggagtgcctgttgagaagcaaccagtagggcgacccaagaagcaaaaggttggaagaattaagaacaaccgaactgcttgtaatggtgaaaggattatcaaatcacgaaaatgtagcaagtgcggtgccacgggacacaacagaagcacttgcacctaccgaggtttaacataaaattttagtttatttgtatcgtgatgggttggactattatgtattgttattgaattaatgttggactattttaaacattagaatttgtgatattttatgtttacataattattataatttgttgcacgaaagaaaggcgtaaaatttgtatgaactcttgaaaaaacataaacataccaataaaaaaaaccatttacattgttatcttaataaataccaaataaaaaaacaatttgttcatgctaaattctggtaaaacaaatctacacaccaccgctctctaaatttcttcatattctcatcgtgcacattatcaaacgtagtctccagcatactatgctcgatgtgctctatcacgtacatcccgcagttaccgctgtatgagacaataaaaagtaaatgaataaaagtgtgcaaattaaattcaagttaaataacaaaaaaatcaattgtattaagttaccttgtcttgtctgtggaaaacggcccgatccatgacttttgaagtgaaatttctgacctggctctctgaggcggtaagttgaggcacgaggatcatgtcatgactctcgaataggccagcctgcagcagcaaatttggtagtaatttttcccacattgccaggtgacggttcaattcgttcggggaaatcgatccgaggctggagtcaaatatgttcaacaaccaatgatccagatctacctctagtgccacccaatgctttgctccatcgaagtagagggccatatatattctctccttgttcttccaactggccaagaattgactttcatcccctcgaatcaaatctaatatgctctcgtcccactgatagttagcctggtcatcacccgcagcttcccaccgagcaataactcctgctgggaaaatacacggcattatgacacatctatttgggtaggcctcgggataaaagtgttgccgcctcctcatcaaatggaatgccgcatccaaatgctaaaacatgaaaattaaatatgtcagagattaaataaaaaagagttagataaagtctttaaaagcaaaagcagtaaaaaagtcttaaaaacttacatcgttcccaagccaaaacttcggagtatgcagttcgaggaaccaagacgaatggtatcgaccggtgaagcactctctcgggtaattgttcccaatctggccgagtacccaattgtgaaaagtcttgagcagcttccgatcaaccactctaagtgggtccgcattcacgagtgtcgaagtagccctagccttcttcttcatttcagtgtactcagcgaaccac

SEQ ID NO: 293422 - DNA, 642 bp, Cannabis indica
ttatgtggtttaatagagtatatgttggctgaagtaaaatgagttaagtggcatttatttcatttagtcaaaaatttcaaagttagaaaattggtattcaaaggctctctttctttctctcctcttcggttttgagcagctgggtttgggggggatttctcttggatttcaagctgattttagcatagatttggacctcaagttgttggtaagatccttgtagctctcccttttagtttcttgaagaattttgatgaaatgatgatgtttgcatgcatagtttaagttgttattgttgctgtgattttatagttgtttgcagaggtttaagcttgattaattgatgttattaagctgcttgtaatgcttgatggttaggttgttagagttgtggagtttttagtgtaaaagtttaaggttttcaaagagaaattggaattttagtggctgtagttgttgcatgagttagggtttgatttctgcagtttttaaatgcttgaatatgtgattttgatcaaggtttaatgcatgttatgttgtttagtcaagttttgagttttagaactcaatctttgacctttaatggtgaattgagtttctgtgtgtgaagctcggttttgttgctttagaaatgttctaggg

SEQ ID NO: 293423 - DNA, 574 bp, Cannabis indica
gtacgatttataagataaacagcagtattaatgacatgactccagtaaggtaaggataaatgagattgaaataataatgctctaccaacgtttaatatgtgttgatgtttgcgctcaaccacagaattttgttgaggacgaccaacacaagaattattgattgagattcccttggtggcgtagaaggctgttagattgagctctttagcattgtcacagcgaacagctttaatgttgactgaaaattgagtggcgatgagagaaaaaaattggggaataatgaaagaaacatcagatttgcaagtgagcatgtaaacccaagtatagcgagaaaaatcatcaacaatagttaagaaatagcggtaaccttcaatactactaacatgaaaaggaccccatatatcaagatgtattaaatcaaaagcagaattagcaaaattattactagatggaaatggaagtcgcttttgtttggcaaaatgacatatagaacacataaaattgataggtttttcacaaaattgcaaactatgtttaagatagtagaaatgttcatagaaggatgtccaaggcg

SEQ ID NO: 293424 - DNA, 501 bp, Cannabis indica
gtaattaaataaatattttaagaacactttttttagcaattaaaatttataaataatttttttatttatatataaatcccttagcttaattattttaacaataaaactatttaattataatatttacagatttcttttttacaaaaattaaaaattatttttatataaattaaaaattttgtccttataatgaatcttttttacaagaacacaccctgcttctttttttttgcaagatgtgtccttataaattaaaaaacatgatgatattatattgacacttaattaaaacataattaatctttaaagtcttcatttttatttttttaattttaaattctaattaactaaagtcttactcgcaattatcctctttcattcactctccaccacacttatatcgaaaacgattgacaacgaaaatatagaacctatagcgaatttgtccgaagatgaagataattttttcatttcatgagttttgtgaaaaagaaatgtgaa

SEQ ID NO: 293425 - DNA, 678 bp, Cannabis indica
aaaacttatgaataaaagtgaaaaaattgtgactaattgtaaattatcattcctatgttgtgactaaaatgtccgtggctaaaggtattagtcacaaaaattataatttattatgactaaatgtattttagtcacaatatttgttgtgactaaaactaaattagtgacaacttataaataaatactatgttttagttacaaaaaaattattttgtgactaaatcacaaaaatagcaattttttgtactgtagtgtaaaaatccgatttaaatatcattgcattttggctcctcttttaaaaattattacaaatctatctaatttgttacattttttcaaaataagtttttcgtattgtgttttctattttaaccctcgtctatttgtgtatctttactaattaatactattactcttgattctttaactcccaagataatataatgtaattgtttttacagtttaatcatttcttacaaacttttacaacgatgctccaacaaattgtttttagagtatcgttttacatataacagtacttttatatcttttggttttggtaaatattatttaggaaatggtgttttgtaaaagttaccaattaaactctctattttattaaatgacaaaataaaccttttatttttaaaaatgataaaaataggacactgaacttaa

SEQ ID NO: 293426 - DNA, 599 bp, Cannabis indica
cttcatattgaatctccctgaaggactgtaggttcatctatccaaattttctcatgcaatgatcccacttggttatcagccatactatgctctgctggtaataccgaattgagaatgactggcatacgaggtaaaggtagtacaggaaacctttgttgtttcaacctctgaatctcctcatcgtgtcgttgaatcatagcttccatttctgcgaatctttgctccaactcccacggagcctgtgacggacgaccatcactcccatcagaagccctccaaaagctttcaccttggttgcggggagaacttagactccattctctccaaccgttactagccctgaccacactatcctgactccccatattgcaccaggtgtccatactataggacaaacctgccaattagtaagtcagtctcgtcaggcaacgaccccattacaaactttctaccgcacttatggattctaaggcaacgcactttaaaataattaattaaaatctaatatgcttcctaacatgctctcacatttgtaatcatttaaaatactaaacaagtacgggcttactgaaccgtgaaccgagctttctctgatgaag

SEQ ID NO: 293427 - DNA, 599 bp, Cannabis indica
aatgctctccaaaaagaaggagagcactgccaccttgatgtggcactggtcgcatagtccgtgttgtatttttttgactttatgttcaagtttaagccctcttatgccaaaatgagttaagtccttattgatctccttatcggattgaggtctctagggtaaaaaatgctcacgcgggcccataaaccctagtttggacacacttaggtgtgtgagtctcaacaccaaatgcatggtcaatgttttcgagactcttaaaggtgtcatgaggccctcaagtagaatgtcttaacttatttgacatttgtaaatcttggttgaaattgcaaaattgactttttttttttaatttttgaaaattatatataacaattttggatgatataattttgtaaaaaaatgtagagaggcgtacaagataataactataaaattactcttaccaaataaatatatatgggtatattttaaatgggtattacctatgaatgagtattctattattagccattagatcaaatctaatggttgatatttataagtattaattaaattttaaatttaatatttcttattttaacctattacctgatgacatg

SEQ ID NO: 293428 - DNA, 535 bp, Cannabis indica
ttatcataagagcagtgacaaacgaccaaacatcgacaacttatcgacatacagtcgacaaattgtcgacattctaacagtaaactaccataagaatcaactacaacttattatcgacaacttatcgacatacagtcgacaaatcgtcgacattctaacagtaaactaccacaagaatcaactacacttattatcgacaacctatcgacatactgtcgacaaattgtcgacattctaacagtaaactaccaaaagaatcaactacaacttattatcgacaacctatcgacatatagtcgacaaattgtcgacattacaaggcaaaactacataacatcaaacaaaggtaaaccatcgacaaattgtcgacatgatgtcgacaacctgtcgacaacaatgttcaaacacataaacagaaacctatatatatcgatatcctatcgatatcctatcgacatttcatcgataacgatgtaaaaacacacaaacaccattgaaacatatccaacatatacaacatgcaataattgacatc

SEQ ID NO: 293429 - DNA, 420 bp, Cannabis indica
ctaggttttatttattaattaggggactttatatgtccaattaataaaaatattaaatgacaatattatttaataattaatttgagttattaaataattacaattgtcatttaaatggttgacttggaaaatttgcatttttgagaaagtgagatgcaaaaatgacaaaatggcaaaattgcaaagtgaggcccattatccatatcatggctggccactatgcaagtattttaccatttatattttcattattttaatgccatataattctaacctaaacctagatggcttactataaatagatagtaatggcttaggaagtaatggcatgcatcttattcctttcagagaaaaacctgagcctgctattctttctctatagccgccaccctcttcttctcttttcttctctttaatttt

SEQ ID NO: 293430 - DNA, 336 bp, Cannabis indica
acttgctttgagtgacaaacgttccctcatctgattgattcacttgaagaccaagaaaataagtgagttcacctaccatactcatttcaaactccttttgcatttgagaaacaaaaacctacacttcagagttagaagtagatccaaaaacaagatcatcaacatatgaaaaaataatatcaaattgaatgtgtgtgatgaactgtgttttaataacatttccttttctacaaccatgagagtgtaaaaactcagatagacgctcataccaagcacggggtgcttgtttcaagccatacaaagccttgtctaaaacatgatcaagaaggtgggaat

SEQ ID NO: 293431 - DNA, 617 bp, Cannabis indica
gggagctgtctttgtacaacggctgtggtctccggtagtgcgtattttgcctagtggcgaagtacacacgttcctgggagtccgatagctccgtgtattgagtatattggggggtgtacccctttttctggcgcttctctcccgttcgggtgctacctttggaggaccttttactcctcgatccctgggaagggcctgttaagctagcagtcggggcagcgtgtgaaggagcttgcccattcaccccggacgggttgccaaaatgagaagatgctggcgccaaagcttggccctggctatacccgggggtagcagagaattgtatgccactcacttgtggagtcgcggtcggggcagtacccgagggcgatactccgggcatgtaccctgctatcccggtgggataatagcctccataagccacgatttgggcttcttcgaggttgatatatttttggactcttttctggaagtcctggaggctagcagccccttcttgctgcaactcattccagaagggagtcccagtacggattcctgcttggagaagtgcaagctgttgtccgtcatcaaccttctggtcttcgaggcttcctctcggaacctcttgatgtaat

SEQ ID NO: 293432 - DNA, 798 bp, Cannabis indica
aattaatacatctaaaatttaaatatatcttcataattacaaaattaataatttaaagcctatttctaacaataaatccttaattatgtgcgaattttcaaaataaagctaagcagtcattacatgtacacttgagtagtacacgttggcactcaacatcacttttctaacagaagtgtaaataacataatagaagtatggttcagcaggtcttaccaccaaaaaattaatttatggggttaagtgttacaaagtatatacttcaggtcgttttgttgccaatatcccagattttaatctccatcctctccctaatgtaaatataaagtttatattaaaaattaaatgtataaaacataaattagataaaaattaaaatattacacattatttattactcaatactaattattatccaaaacacaacttaaaatttaatgaaaacaatactaatttactaaaaaaaatgtaaacatataaaatataaatatttttcaaaaataataaaaatattaaacagatttccaggacagggagtatcatctctgtccctgccccatttaacattcgatgataaaaataatttctatccctgctctattccccatttagatggggaatctcactccattaggggtggatcctcacgggaccatcttgtgggaaagtatgcatgcattacataatgcactcataacaaaatatattgaattgaatacaaattataatcttatatcattcaaaaggatacctatcaaaatttacattatatttatatatatatatatatttaagctt

SEQ ID NO: 293433 - DNA, 601 bp, Cannabis indica
gttctatacatttttggcatttgttccaacatttattaactactagtgttacttcctcactaacacaaaagtagttgccaaaaggtaaagaatccagtatccctagaggagtaaacatatagagaggaatttcacaattttaaggattttgtgattaaggaaatgtaatggtgcaggaaatctaattaataaatatattaaatggcaattttatttgataattaattttaattattaaataaatagttttggcatttaaatggttagaattggaaaaatgacatttttgagaaaataaagggaaatttgtcaaaagtggaaaaattccaaagtggggtctattactatggccggccacttggatgaggatttacacttaatatttctattattttaatgcctaataaatcctaacctaaacctaggtggttgcctataaatagatagtgatggctcacacttaaagaggatgaaaattcaccttcagtaaaattttcctgagccttctattctattaatttcgaaccagccacttctctttccttcttcataatttcataccttgactgatagagtgagcgcccacacacatcaagtggta

SEQ ID NO: 293434 - DNA, 633 bp, Cannabis indica
atgaaaaaataaaagaaaaaaaattattattgtttcattttttataatttttaaattatttgttataatgtataaagaattaatattatgtggatcactaaaaatgtgccatgtatatacttgtgtacacgtagatagtccactgtgacacttaactaagatttttggacgaaagtgtaaagagcaaaataaaatatgaatttagtatgttttgtggtcaaaaaatcaatttacgtagttaagtgttaaaaaaaaaaataattttaccattaatatccctattttttatttgcttaccacaaagtaaaggtagcccaccacttgtgcacttggtacttagaagttagtaggagagatagttattatcatttgtattaatttttattcaattaattttcatgtaataaaatttttaattttaaaaatttgggatcttttgtataaaagaatctttttttttaacaaagattattattattattgattttttaacaataaactttttttactttagaattctaaatgcgggaccaattctaaaaggaaatttgattttctatgcattttttatacctaaatttgttttccaaactaatagttatagctattgaaaaaatgggtatacttttccct

SEQ ID NO: 293435 - DNA, 660 bp, Cannabis indica
tcgagctggtctatctgcgaaaacaaaaaagagcgagttagcatgagatctcaaaataattcaaaaaatgtctaagttagaaaacatgcgacgtactaggtctacgattaaaatcagttctaatccctgggactttgaagatgtagaaccactttgatttccaatctcccatattagataccattccttctaccccattaatttcagaagtcgcccatttgctaaagcagtagaaaccattgtgaaggcctacgctttttatatcgtagaagtagctgaactcttctaccgagggagccctatgaacgtactccatatacatcgcgtaaaaagccagggtggtgcgataactattgggagttagctggaaaggtgatacatcatatcgtttgaggatagccgcgataaagggatggaaagggactgataccccacatcggagaatgggtattgagattaccacatcctctgtgggaataatcgcaggattggtaaaaggaaggtgcgcctctgagtcggtttaggtcgcaaagaagcaagtcgcagcaggtttagcctcgtaaaggtagtgaggtctgatttggtaactctcgaaatcaaatcctcgcacgagaaaggctcgttcagctgggcgtcatcgaccgagtcagtcccgctccc

SEQ ID NO: 293436 - DNA, 661 bp, Cannabis indica
tttttttttgaacttgggtattttttgtgttttattttgctattttacttaacataaactaatagaattcttattttaagtattagaatcaatgtttataatgtatttgttaattctattgtgttttggtatattggtaaaaacttatcaatctatccttttggtcacaagttcaaatcccaatatagacctttttttgtattttttttatagcttactatatctatccttagcactcaacaatatatatcctatgtattacatcaatattattctaaaattactctaagcatttaaagattatctaaatatatatgaaaaatattcttataaaagtaggttaaagaaagcataccttataccaaaaattatgtacttgtcttccgataaagtcacttccgataaaatcctaacaaccaagtttaagagaaattaaaatcaaatattatcctaattttactgaaatttcggcagcataacgactataattgaacgtttccgaaaaattcaaacctattaataacaacaaaacacaattcaaaacaatatgaaataatcacaacaacatttagcaatataaaaatttaccacccattcgactgcagtacatgtattcacagaacctacttcactaaggatgaatattgaagatattcaaact

SEQ ID NO: 293437 - DNA, 526 bp, Cannabis indica
aagatatttaggttagttgaaacctaatttttcaaaattgtaggtttaattttaaattttatatttatttatttatttaattttttaaaaaaatcgaaaaaataactatttttttattatttatttattttcgaaaattattaattaaattaattaatcctacatccaatctatccatatccaacttgttgcaggagtatgtgttttagcttgtttgtaagttttataaaacctattattgcttgatctaaattgccatggttaacttgttgacagatccaatgatctgattttaacccatggttcaattgtcaataggtcaagtaaataatttgtaacaggtaaattttacattcttctttcatctgtgtatgacctagtaacatgataggatccatccaaatctgtgtgcctgtgtgagcctatatgtttactttatgtttagatgcatataggttgttcatttaattttttaattaagatgaactaggttgctaaataaaatgtcacaccatgatagatttta

SEQ ID NO: 293438 - DNA, 626 bp, Cannabis indica
gacttgaggagaaaaaccccaaattccccctactgggaaaacggttggccgtttttctgggtgcctgaaaaacggcctgccgttttttcctggcagccatggtgatttcttgtttttcaccccaaaaaccaatcaaacctccaccaaacttgctcaaaccttccaaaatagtataatactagaaaacatgacataactcaataaacaattcattgcaatatatcaatttgctcaaaatcacacttcaaaatgaagaaaaactcaattttggtctcaacaaaccatatccaattcaaccagccatggagaccacttaaaaccattcccaacatgctcagaaacctaccccaaacacaccccaaacctagtttaagtcccacagcaacaaagaagtaaaaccctacttcaaaactaactcaaaactagaatttttaatccaaaaatggttgagaacttaccttgattgcttctaggttggacttaggttctacaagctgcttcaattcaagagaaatggtgaaattttggtcctcttactggctggtcttggttcacacgaaggggagaagagaagaaactttgtaaagcccgcttagttaatttggaaattagcagttatttatgtt

SEQ ID NO: 293439 - DNA, 716 bp, Cannabis indica
tttacagttttgagtttttaaggtggttttttcggtagttttccggtgatttctatgtgggttgctattacgattttttattgcgatttaggttgtagcgctagttgcaacatgagtttctatgtagaattccatataaaatagtaaaaaaaaatgttttgaagtataaaaatgaaaaattccttaaaaaaattgtatgttggtgaccatcactttttatagtggcactctacgatttgttaacaatattttttaaaaattattttcttaatttatataagatctgatatttaaggccgatccaaacatataataaaaaaataggagaagagagaaggtaaagagaaaaatagaatgagagagtgaatgagatgatttctctcagtagtttatttcaacggagtgaactatatttatacaaaaatataactagaataataaaaaactaaatcaatgaaataaagaaaaatacaatagtatttatggtataattcatttggctgatttggacattcatatatataatatttcataacactctctattgaatgtccataataactgtctcattaaaaaccttcacaaaaaactttacaggataaaaaaaatttaaagggaaaaataagtgcaatatgaatcaaactcccactcattttggtattcgttgagatcttctaatcgacgaattccgaccttatatgtcgtcttctcaaatg

SEQ ID NO: 293440 - DNA, 800 bp, Cannabis indica
accccatcggaccccatggtccgaccatcggacctggggtgtgggattattgggaccggctagatagagagagaaagagagatagttttagtttgggggtatttttggggttttgaaaaaaaggtatagttttttagggttttaattattggtttaaaaatcaaattttttgattttctaagcatagaaaatcaaatttccctttaaaaaatataaaaaataaaattaaaataattataaaaattaatataaaataataatttttttatatatataaattaataagagtgatttttaaaaatgattttaaatttaattttgttaattatatattaaggagtgtttaacatttgtgatgtagaaatcaaatttccctttattaatcacatccggcaatcaaaggactttgaattggattgaattttaaagttgatgatttcatgattcatataacatgcatgtcactacaagaagaaaagtatgtaatataattagtgtcattacttattatatataatgaatgtaaagtagtggctgtaagaaaaataataaacttaaaattaaaaaataaatttttaaataaacttaaaatatatattattctagaaatatatatccaatacataaaaataattatacttatttagttcatatgtaaatcatgtactttgagtccaaaaaaaaaaactgtgaacaagtaagcataaaatcatagatttttttaaggaaatatttatttggtttacgagactacttgccagttgccgttttttttttttttttttgccaaatttaattat

SEQ ID NO: 293441 - DNA, 578 bp, Cannabis indica
cctcgaaatactatccatggtttcaggtatttaactacatttagtgtaagataaataatactttcacatattattagagtgtattttttttttattaacttttttttattttttttaatcagaattgtataggtgcaattgatggaacacatgtgagtgcatgtgtccctgcagataagcaagtcagttacagaggtcgaaaaaatgtagtaacacaaaatgttttatgtgcttgtaacttcgacatgttctttacttttgtatctgctggttgggagggcactgcaaatgattccagggtgtttatagatgcaattacaacacctgaatataagtttccactgcctaaagaaggtatttgtaaccaaaatttaattattattttattatttagtgatggtgcttatagaaaatgaattcttttgtaggtgaatattatgttttggattctggatttccatgtacaaaaggttttctcccaccatatcgtggtgaaagataccatttgcaagaatacaatagtggacgtaatggaccgcgtggcatgaaagaactattcaattatagacattcttcac

SEQ ID NO: 293442 - DNA, 707 bp, Cannabis indica
tatgtacctgaatttttaaggtcattaaaaatgcctcttgaactattgaaattattagatttaaagatttttattcaattttagtaaaaaagtactaacatagatgaaagttcaaggtacatgatttagtacatgttaaaattcgagagccatgatttggtagatattaaagtctggaaagcattgtttagtatataaacaatcattgaaatagtaaaattgaatgaaattagataaaagtgtttggattcaacaatctcaatagttgagggagtatttttaacgaccttaaaaattcaaagagcataatttgatacatgtcaaaatttaaagagtaaaaatcttaattagccaataaattacttagattgaagagttgtcgccaactaatttcatttgaatcatttcactttttctttttattttcattgaaaggtcattttacttttactttatttattataattattataaagattttgtttttgcctattggactaaaataatttataaacgtggagaaaagtgttgtagtgataatatgtctatgaaaattttgattattatataaacaataaaaattatttaaaatttttagaaaattagtaaaaggcatgctatgatgcgatgaacacaaaaataaaaattaaaggctagtttgtaagcaggatatattgtattaaataataaataacattatgtttgga

SEQ ID NO: 293443 - DNA, 564 bp, Cannabis indica
atagaatttatacattaaacctaatcatgaaataaatcatgtgaaccatgcaacataaaagcaatttctgatctttattaattagtaaatctgattatattgaatttagttttatttagggcacaaaacccaacaatatgcttacattaaaacctcaaatctgtaagtatgcttatattttagggggcgcgtttggttgggtggaacgaaaacataggaatagaaatgagaatgagaataggaatatgaatggaataaaataaaattttaaatgcataaaaaattaataaaataatcattaaatattttctcatgttacattagaatggtctttccttctgtttcaaaatgaaaagtcattctactaaaatggtggaaagggcattccaatactttaaaatacaaccaaacaaaagaatggaataaaaattgcttcatttctattctatttcatttcactactacctccaaccaaacgccaccttaaatctcaaatatgtactgaagtatgcttacattttaaacctcaaatctgtacaagtatgcttacattttaaacctcaa

SEQ ID NO: 293444 - DNA, 618 bp, Cannabis indica
ggaggtgctgagggcggagggcgaggctactgccaaggccaagcgtgagcttcgggaggctagggaagccttggatgaaatggctgccaaggtgaagtccctagaggaagttcaccaggcagacttggagtctagggccaacttggccgtggagctgaaggagctcaaggacttcaaagaccaagccttgaagaaggctaagaaagatgagctcctttctcccgtctcctgcagccggtgcgtcaagcgtttcgacgatggcgtctacatggcctggtctacaaatggccagaacatcaagctcgacttctaccccaaacccgcggagatgattgccaaattcagggagaagaagaagaaacttgatgccatgctggaggcgcgcattggccctcgccttcctcctcgcattgactaggccgctctgagttcaacccattacaaccaagatttttctcacttttttttttattttatttacagccaattatcttataattaagacaatttttatttacatagctgtttttatttaaggggaaacaatggtgataaggcctgttcccgggccctttgtatatattatttttttgacctgcccttagggctaggattttt

SEQ ID NO: 293445 - DNA, 582 bp, Cannabis indica
atcgatataccgtcgacaaattatcgacattttaggtcaaattttttttattctcattgtgtcgacatcctatcgatacacctacgacatcccatcgatatacattaacaacacagacaattttattggtcaaactactttcaattttagggttaatttgctttttaatcgatatgatatcgacaaactgtcgacaacatgtcgataatggtcatccctgacctttcttagcaggatatcgacatagcatcgatattctatcgataaactgtcgataatatctggaaaacccagatttcgacagaaaactagatctgcaagatctctaccatttcaaaccaaaaaataccagttccaataaatacgacacatataacgaaagcaaactacataaaatctaacaaaatgcttaaaacacaacttatccattataatggtgtaagattcttgagtgattggggtgtgctccggttttctaccaccgcccaccgagaaataaacattcgacagggaagagagagagggaagttttttcaaattttttcttagagagagaggggtgcatgagaggcaagagagaga

SEQ ID NO: 293446 - DNA, 709 bp, Cannabis indica
ttttgtaaacacagttaaataatattaaacctaatataaatacaataaaacgaaagagttaattctaattcctttaaaatatatatttatagttttactaaacattacattttaaaaaaaagataatagaaagaaagaacatgtcaatatatatatatatatacgtctgttttttgtggcaacatgtaatatgatatttttatagatattttcatataggtacaaggattattttttttatatataaaataataaaatttagggataatttcaaaaaaaaaatatatatatatacaaaaactaaaacaaaaacaacaaaaaaaaaaaatattacaaaaatacaatttttctgaagtttgtaattttttttatgatttttttagattttatttacaaaaatattgtatttttatattattctcttgttattttattgataatttttcattatttgtatattattttttatgttgctttgttttttatattattttttttttgttaaattcatgtagttttcttgttatttttttatatttttataaaatactgtaaaattatgataaaaaaaatgaacgtaaaactgtaaaatttttacaaaaatggatgtttcatgtaattattcctaagatttaactattaaaggtagtagatgctgaaactcttcctaaaggcccacaacgtatttactagttagtatatttaaatg

SEQ ID NO: 293447 - DNA, 605 bp, Cannabis indica
ttcttgaacgaattcagggcgacatatgtgggcctatttgcccaccatgtggaccattcagatattttatggtattgatagatgcatcaactagatggtcacatgtttgcttattatctactcgtaatgtagcatttgcaagattgcttgctcaaataatccgattacgagcacaattcccagactatgcaatcaagacaatccgccttgataatgctggtgaatttacatcacaggcttttaatgattattgtatgtcaatagggataaatgttgaacatcctgttgctcatgtacatacacaaaatggtctagcagaatcatttattaagcgcctccaattaatcgcaagaccattacttatgagaacaaaactcccaattatagcttggggacatgctattttacatgctgcggcacttgtacgcattaggccaacatcatatcacaaattctccccactacaattggcttttggtcaggagccaaatatttcccatctaagaatctttggttgtacagtatatgttccgattgctccaccacaacgaacaaagatgggtcctcaaaggaggctgggaatatatgttgggtatgaatctcca

SEQ ID NO: 293448 - DNA, 501 bp, Cannabis indica
ttcttgaagaatcttgtcaaaaaatctagcctcggacttctcggcaatcgcctggcttcttcttaccactggactccccacatgaagtcccctcccggaggccgcctgggcctgagagtatgccttctcctgggtcttccggtagagatagtcctggtatttcttctctgtcgtggtgataatctcgtcccggaaggtcttctccgcgactggcacccttacattgggacagatgacccgggagaggttagagtcctccacggattgatgcggaaggataagtttggccttcctgcagttttccgtattgaccaaacccccgacgtcaagatcggctcggtcataggaggcaaaggcctgggccctccggaggaaggtctgtgtaggggacgcccgctgatagggagggatcctcacccactcggtaaggagctccgggtggtccactgccctgaacccggaggaaaagaaaaagcgatggcgatactccttgacgtgagt

SEQ ID NO: 293449 - DNA, 485 bp, Cannabis indica
gggcataaaacccaacaccgtggtcggggtgaggataacctgccataggctgcccaggctgctcaagccaatcaggaagcccagaattgggaaactaggtgtgctgaaatgcaagccagaatagaggagcaagatcatgagattcagagattgaggcagcagggtgctcctgcagtgccggtgccagaagttccagtggcaccttcccctattgctcaggccgagatagtggtagcggcgaacagaatggaacccctgtatgaaatgtttcggaagcaggcacgtccgatttttctgggaggtccggacatcatgaaagtagagcagtggctaacggtgatcacaagaatattgaactttatgggtgtcaccgggaatgacagggtggtgtgtgccacctttcagtttcaagaggatgctgtagtttggtgggacatggtgtcccagattcatgatgtcacaaccatgacttgggaaaggttcca

SEQ ID NO: 293450 - DNA, 650 bp, Cannabis indica
gtacaaattcggactttctcatcatgactagtattcggactgaaaaaaagggaagacttctgacaattgatttgttgacccgaagcttcttgaaagtgttccagtaaacgaaccacatttcttgctccatcctctgaggcctgacagtaaatgtaactatcatccgcaaacagcatgtgtgatattaaaggagctcccctagccactttacaaccccgaatcttaccccgtctctcaaagtcatgtagcagagcagaaaagccttcagcacacaaaaggaacaggtaaggcgatagcggatcaccttgtcttaagcctcgtgaagggacaataggaccaacctcatgctctcctactacaaacttataggctaccgaactcacacacttcaaaattaagcgaatacactgatcttggaagcccaactttttcatcatagcttccaaaaaaccccattcaactctatcgtacgccttgctcatgtccagcttaattgccatgaagccttgtttacccttttgttttcgtttgagatagtgcattatctcatacgaaatcaaaatgttatcagtaattagccgcccaggtaagaaagcgctttgagtttctgaaataacttgagtgagaatccctttgagtctattagccaa

SEQ ID NO: 293451 - DNA, 543 bp, Cannabis indica
gtccaaaaatatatcaaccttgaagaggcccaaatagtggcctatggaggatactatcccaccgggatagcagggtacatgcccggagcaccgccctcgggtactgtcccgaccgcggctccgccgatgagcggcatacagttctctgccactcccggatatagtcagggccaggccttggcgcccgcatcatcccattttggaaatccctcagggataaatggacaagctccctcacactccgctccaaccgctagcctggcaggcccttcccagggctcgaggagtaaaagatcctccaaaggcagcacccggacgggggagaagcgtcagaaaagggggtacactccccagtacacccagtacacggagctgacggactcccaagagcgtgtgtactttgctactaggcaaaatacgcactaccagagaccacatcctttgtacaaagatagctcccggagggatccaagcaaaagatgcgagtaccacaacgacattggtcacaacaccaacgaatgcaagaatctcaaagaagagatt

SEQ ID NO: 293452 - DNA, 514 bp, Cannabis indica
caacataaaattaagataatttttccaggatttatttttattttattttaaagcattttcgaaagtagtattcttatacacttcatttttcgaaatgcaatatatatttatagaaaattaaatttgagttgtaaattaattttgaaacaatcccttgtgcagcaactgagttcttcttcaacatgtcttcaacctgaaatcccttcagatctgatgatgaagatgacaccgaactcccttcagtttgaactcagcaattccagattcagatcattccgccattgataaccatcctcaagctatacgatctgacctgtaatcacaacaacaagaaacaagatacgacactatctccacacacaaccgaaataactacctgaacgatttaatggatgaatcatttactaacagaaaccgactatttatatattcacaaaataagtccacctggcactaactaacacttaactgaaactaacgtaacagaatgctagtgcagatataacagactaaa

SEQ ID NO: 293453 - DNA, 500 bp, Cannabis indica
taaaaatacaaaatctccgccagactgggagagccccatccccgggcggaataaaaaataaataagcctgagagcaggcggtatgcttgagggattagttggtatgcgcaaggccgacaaaaactaaaaaattaacaaagtaatcctggagaggaagcatggccccggccatcaggtgcgtctggctccaggccccgaagccaccatagttatggttgggcgtctccgcgtcacgaggcgaccggtggtatgtcccggatgtggaaggcttgattccaaccacctccacaatgttctccagctgatgggggcaggttagggtggagtgaagctctgctgcctcccatccggtggcccgagacatatacccctcctgggcaacgggaccaaatgagacatcttcgatggtagccagacgcttaccactcttcttggacgactttgaaccagatgcagacatgttttgattctgaaaaaagagttaagattccagcagttag

SEQ ID NO: 293454 - DNA, 646 bp, Cannabis indica
tataaaataacaaaataataactacaaatcaatagaaaaataaaaatatatcaacctcgttaaaatatgcaaatcattcatcaatcaacttcgaataaactacaaaacataaaaaaaaaaattattaatcatgtaaagaaagatataggagtagtacgtacttctaattttttgtaacagagagaaagagtatgaaaaaatatgagaatgtacgaaagtaaaataatcatattttaataaaggttaaaataacttagttaagttttttttttttttataaaatgtttgtaattaatgacaagtattttgaattagtttgagtgtcagtagtaaaaaaatataaaaggaagaaaaagatatgaagtaagtttttgtaatttttttttaaaaaaaaaattataaaataaatttttgtgagagagtaaaaaagtattagaagaaagatataaaaatagacatttattatatatactagacgaaagttacttggcgagccacgtaaatattaattttatttaagttttagtgattttttaaaaaatacatctttgaaaatacatctttcactgcctatataattatatatatatagttcacatgtaaatttattagctttgaaaatatatagttaaatttctgttgagtc

SEQ ID NO: 293455 - DNA, 731 bp, Cannabis indica
gtaatcaagagtgaaattcgaagtctatagtggagtcacgagcaattaacaagtgaggaaatgtacccgataaatttaagatcaaatcattgagagattgatttcataggcccatagtccccataataactcaattaactgatatatttaatcaattaaaatttaaaaactaattatgtcaagtttgagaattttcactaaagttgggctaaattgagaggaaaaaataaattagattttatttgttaattataacattttgtgggtcaaattaataaatatatttaaattatatttaattaataattactaaattgaaattagtatttaaatagtttcaaattaaattaaattaataaattataaacatttaaatttattttaatcaagatttgatttaaaataaatagcaaaaatcaaaatagtgtgttcggccatgccaatgatttttgggccaatttatcttatgtttatttcattaattaatttagtaagatttaattagaaaaataataattttttattactaattaaaagatttaaattacatttttaaatcaaagtaataaatctaaatctaatagaggactatatatatagaaagatcatcacaagtcagacaaccaaaatctgatcacaaaaggcttttttcactttctcaatttctccatcatagcacccattagtaattgagtatactattctaacccacactaatcaaggtgatactc

SEQ ID NO: 293456 - DNA, 461 bp, Cannabis indica
ttcatattctttcaaatggatacatccatctcgcccacaccgtcccacaacagccttgtcttctctcactagatgaaccattaaatggatcatgatgtcgaaaaaagatggcggaaaaaacttttccaggttgcacaatgttttgactacatgttcatgtaatgcatctaacttatccaattctaattccttcccgcacagcctattaaagaaaatgactaaacatgtcgtcaaacactctcgaacattttttggcaagactgatctaatggaaattggaagtagatgttgcattaacgcatgacaatcatgtgatttcagacccattagtttcaattcagtctcattcaccaagtttttgatgttagacgagtaaccatcgggtactttcatatttgcaagtgatttgcaaactgtttgtttctctttttggacaaagtgaacaagcaggaggcaaatat

SEQ ID NO: 293457 - DNA, 858 bp, Cannabis indica
ctacaagctcgaaggcccgaatccttagtggagttcttcgccatggccgaacctcacaaaagaatcgagaattctctagcggagttagagaaagggaaggacaagcgccggtcacccataccgcgatcacgatctcgcagtccacgagggaaaaactccaggggccgaagcccaagaagacgcagcccgcgaagacagcgaagtccgaagctggccaagtctcctccaaagaaggaatcctcgccaaaaaggaaaggtggacctcgcttcgtcaattatactgaactcgcagtccctcgagaccatatctacgcaattgaagaaagaaacggagtcttcaagaagccgccccccatcaggggaaatcgcgacaggagagaccctaaaaaattctgtaagtaccacaaggacattggtcacactactttagaatgttgggtcttgcaggatgaaatcgaggagctaatccggagagggaaattcgacaagtataagaagagcgaggaaagtcgtccccaagcggatgacaaaggagaaaaccagaatgcgagtggctccagaacacctcgcaatatcctgactataattggaggacctcacatcgcaggggactctcgcaaatcacaagaacgatatgccagagaagccaaggagaagccgcttaccaatgtgaataatcttagtgagcggcccgagaagctgtttaagaaagaatgcgacgacatcacctttatggagagtgatgcgagatgggtccatcacccgcattctgatgcactggtgatagtcgccaatattggtggggacaatgtccatcgcatactggttgacaatgggagttcagtgaatctgctgaat

SEQ ID NO: 293458 - DNA, 395 bp, Cannabis indica
tttcacaaatagggttaaccctgatttcattttcataaatattcacatggcatttaaaatttagatattcagatagagctcagaaagagctttccaacggtatatagaactcccaaatcggagtccggatcacaaagttatggccattagaagtttgcaaaaagggtctgcccagaaagaaatgggcgcgccgcggcatgctaaataccatgccgcggcacctgggttcaaaacccagaaaactcaaaaaccagcaacgattttcatgcccaaaactcatccaaatcaccccaattcacaaccaaactctcaaatcaacaaatagggttgctagcaattattaaggggtcaaaaataacatatttcatgcatcaattccaacataaaccccaaaa

SEQ ID NO: 293459 - DNA, 579 bp, Cannabis indica
ttgttatgggcgtcctcactggtaaggaggagaagactatcgttcctccttttgtcataagaatggttaataaccttccattcttatacgagtacccgtgaggaaagatttcgtacaccaagctaatggaaacttgtaataaagactacgcgaagatgtgaagaataagatgctgaaaaagattgaaaagggagttactcagaaggaggcaaaatactcatcttacagctatactacagcgttgcagtattgggcatacgaggccatcgtggagctggacaatgagtatgcagtgaagaagtcgcatcgctttccgagaatggtgaactgagagagtaagccgaacacgacactcaggaaggacgaagtgatcagattatttgctagaaatgtaagtttcttacgctttatgtttaatcatgttaatttccatatattatatttatatatttattttatttttaagttgacagtttattctatgttatgtccccgaccgaatgagattgagtttgtgagttacatcacttggggtcagctgcctttatttgttgacttggaggaacttgtgctgggtga

SEQ ID NO: 293460 - DNA, 514 bp, Cannabis indica
ttacttcgatagtttctatacggattttagttgcgatttaatctggtccgttaattgctacatgggtttcatagtgaaattctataaaaatgaaaaaaaaattcttaaattttattcataataatcaaatgcaagatacagtgactacgtgtcccgttttccacgggtaataaagaaaaagcacatttatttagataattgagcagagaggttatcagctaaggaagaaatggtagatggagaagctcctgtggtccctccaagataccattttttgatctatctctaccacattttcattctccacttctagcttgaactcttctttcccttcgatcgtcaccacaatctgatagtcattcatatatataaacccaacatgtaattaagtagttatacatacatagcataatgataatcctcctatatttctaataagctaccacatgtcacacacacactatataaataatatatatatgttatttattatatattacctctagcagtggag

SEQ ID NO: 293461 - DNA, 940 bp, Cannabis indica
ctctctctctctctactaaactgtgctaagtgctaaatgacaagacaagaagcagtgccttttctcatttctcggtaggaaaaaacggtaaaaaaaaaaaaaaagcgcaagtgggattattaagcttttataataaaataaaacaaaattactgttttacccattagtgtaattttatctcatttctttctggaatgagtaaaatcatcactcatcgctccctactacattcaaagaaaatctgtgtttcaaaaggaaaataaagaaaagatcattaaatgaatctgacaaaattaagctctaaatctttcttctgtttttgttttgaaaagtaacaaaattaagcttaggactgatctctctttctattctttcctttgtttttttttttctcaaaatttgacaaaggaatttatatatacatactctctaatctaggcaccttagtggctgtggtacttgttaccagttcttttgttaattgatcaattatcactttcttattcacttacccataaccatattattaatattctttttaataaaactttggagctttttatcgttttccgttacattaacatattttctcataaatatagcttattacataccattaataatattatgagaatgggaatatgggaatgtgcagttagccaaaacaaaaaaaaactatctgaatgaccagatgcatgcttattatactattgctttacaagcataagggcatggcgaagtaataagtaatagtaattattaaattgatatattatctttctttttctatttttcgaatatctattttttaaaattgtctaattcttgactttttttaaggagaaaaatggtagaaaattagtgttggaaataggaagaggtttacaagggcatttgatgagagagaagaagaagaagaagatgaagggaatagggaata

SEQ ID NO: 293462 - DNA, 603 bp, Cannabis indica
gcggttttgaaacgatcgaggtatgttcatcttcaacgttcgctctgtacagctgaaggcttagtgcatgtagtatttttgtaaatatttgtatgtgaactgtataaatgtttattaatgggccggctcagagtattttttgtaattttttttggaatttttacataaaatgcctattttttttgtttttcaacatttatacggtaccataattttaatttccaattttaccatttttttaaacttttatacggtttttttttaaataattacatcatatacggtttttgtttttatcatttaattgcctacacgtttccctctaatatgtcaaatttcaatcacttccctgccagttaccattatctaacccactcactccatattattattatattttgactttcatattctacatcattctcatcttcctcttctttttctttctgatcatcgagttcttactttttttttttcctgcttgttgtttctttaatttttccttgtttttgagtaatggctgtttctcaatctcgttcaagttcattgtccccttctcctaagaaacccaaaaaaagtctattaaagaatctaaacccaaat

SEQ ID NO: 293463 - DNA, 745 bp, Cannabis indica
cttatccctgttgttcttggtaatcacaagaacacttgcactatcatagccatcactatcatcaccatctgagaccacaccagcatctccatctttcttcaagttgtaattcttgagaattggacaatcttttctcaaatgtgatggcttgttgcagacataacacgttctcttagtctttgaggttgccttctctttgcttggactgttttgtgcattgttccccttattttggaattttcctcgaaccagtaagccatccccaacattttcttctaaattctcagatttcctcttgatttcttttgacattaaagtagtgaccgcttcttctaatgtcaaagaattgttaccatacatcatggtatcgacaaaatgcccatactgttctgaaggcaacgaattcaaaacaatgatggcttggtcttcatctttgatcttgattcctatattctccaaatcaagaacgatcttgttgaaataatcctaatgatcttcaacacttttcccttgtatcattcgaaaagaatacaactttgtttcaagaataatcggttttctagagatttaaccatgtagaggttttctagcttgacccacattcccactcctgttgtttccttggacatttcccctgagaactcgatcaccaagactgagaataatcgtactgttggaatttattttaccaggatcgtagatctactcacaagtatgtttattaacatcctaaataagaactttc

SEQ ID NO: 293464 - DNA, 534 bp, Cannabis indica
gaaatacatttcgtgaaagtacaggagaaaatcaatgtctcaaatcataaatattatgttaagtgtaaattcattaaaataaaaacaaaatcaaacaatcatgagtacaatcacatgtaaactttttagctataattataaactgatgaagattaatgcatcttacgaatttcaatagaaataattttaaaaactaaaaagtcatatatgtagatcaaaaattaattactagaaattaagggtttatttagagcattagaactgctattagacatctgtggattcacatcttgtaaataattataacgatttttaataataattattcaactaaaatatatgacacaattaacaatactagggaagctttaacattgttagatttacttaccggcagcctcttcatcatcacagtcgttggtacatttggtttcacacttagtatattgacctttgttttcaagagtacttaagcattctttgctacacttactgtagcaaacactgtactgggggtcaacgatcggccgtgcc

SEQ ID NO: 293465 - DNA, 1402 bp, Cannabis indica
ataataataatatcatcaaggcttcgtggcttttaacttatagtatatagtgctttggaccactttgatgtttgcctatagaaagtgacaatggacctatacaatagtacctatatattgtttcttatataactatttaatttttttatttttattattatacaaataataaatttgcaatgaaacttataaataaaatacaagtattttatatcttaccctttttgacatgcaaaggtcacaattatattacctcctgctccacgcaataggtacaagaaaaagggttacatttgttctctattacttatataattaattattaccaattaattgtagattattattattattaatataataaaacaaaattttaagcatgcatgccataaaaaattaagttaaattaattattaataaccagagaactttctagttacacgaaggaaaagagaataaaataaatagtacttaagtttactactttatcattaattaagataatctatatataaatactatgagtaaaacgagacatctcttataaatatgtatattataatatgaatacataaaagcatgtaaaagtattcctcgtattcttggaggatattgaagatacaatacaaccacaagacttaataaaactttgaccacacatattttaatgttatatcataaattttctaatttcacttttttttttctgaaacagataaattttctaactttggattctctttgtaactttaataaatgactacgatttatatttacagatatttctgctttacgctaatgtatatatttatgtatttaactacaaaaattgtaggttatgagtaaattttgaccaaaaattaaaataaagaaaattttatttataaatagatggcagttatatgacactcattgtcaccatattttatatattacaaaaaaatttaatttgcaccctataaatttataaatacactttaatattaaaaaataatttaactttttttaaatgaaaaaataatttaacttaaattaatatttttaaaaatcatccttaatattttttttgaaatttcttttttatattttttttcatttaatattaatagtcaattttattttattttcacattttttataaatcattattttttaaaaaatattttctaatagaattttacataatttttttgtcttaatatttaaaataaagtttatttttattttataagcatattttttaataatataacaaggaaaaaaattaatgtaaattaaaaatatacatttaatataaaataaaaattattaaaataagatgtacttataattttgaagtgtaaataaataaactcttttggtaagcaagtgaaatttttactgcaaaacctcaaccaaatac

SEQ ID NO: 293466 - DNA, 554 bp, Cannabis indica
aatcaagcttgagaagtcagttccttcaaaaactcctcaacataatggtgtggcagaaagaatgaacagaacaattgaagaaaggattaggtgtatgctttcccatgccaagctacctaagtccttttggggtgaggctatgagaactgcagttgatttgattaacctttctccttcagttcctctgaacggtgatgtgcctgagagagtatggaaagggaaagatgtctcatatggtcatttgagagtctttgggtgcagagcatttgttcatattcctaaagatgagagatccaagcttgatgataaggcaaaaccatgtattttcttggggtacggtcatgaagagtttgggtacagattatgggatccagtgaacaagaagattatcagaagcagggatgtggtgtttcttgaagatcaaatgtttgaagagagtgacaaagttcagaagcaaaagttccctcctaatgttcctgtgagtactagctcagttccttcacccatagtgcatgatgatcatgggggagatgaacaggaaaaccatgaagagc

SEQ ID NO: 293467 - DNA, 575 bp, Cannabis indica
cccaacaattcatcccaacaaactgaaaaagaggagcaactactatcacttctacaatcacttccaggagagattaatcgcttaactgacatggtgagatctttatgtgataattcaatgactcatgattcagaatgtaataactccaatgatgaaagttatgagagttgttggtacaatgaagaagggtcattatttgaatacaaggaagataatgagcctacagttgaagatcaagatccttgtgaaaaggaaatcattgaatatgaaatcataagtgagggtatggatagccaagtgaagagtgagcaacaagaagaagggttgttagatgaaagtgttgaaactgtgacattggaggatgaggaagaacatgacatcattgattcaactgcatcaatgatattgacaaacaaaccaccaatggatccatatatttcatcaacaccatattatatcctctacgagctacgaaaggctctccccaagctcatcatcgaaagtcttgtgttgtgtgtggttttggttcaaactcattcatgccaagcttgagggcatttttaaaaacaaacttt

SEQ ID NO: 293468 - DNA, 536 bp, Cannabis indica
tcatcaaaatttacatttttgagctaaaaaccaaacttgaaacaaggtagcctatatgcatttctaacagcttgaatcacctcaaattaacatgcttacaatccagaaattaatacaaaaatcacagcagcaaccatatatcaaaatcatgcatgcatttcatcaattttacttaaaattcaagaaaacacaaaggtaagttataagtgatccaaccttggctaagattacacaaagatgagttgaaattcacaaggatttgaggagaaaaacccagccctagcagccaagtcttggccgaaaaagagagagagagcttgagagagttcttttccaaaattttctattttatttttctaagtgttgaaatgagagaaaaagatgagtaaatgccacatatcaacttacatatcagccaacaattaaataaaataacatttatttttcatttcataaagtcacaaaagacaaaatactaatggggcaaaaagaccattttgcccctccaccataaaatcacataaaaatcatactaa

SEQ ID NO: 293469 - DNA, 707 bp, Cannabis indica
acccattcatggtaatactcattaagagtgcacctatatatatctattctatataaaataagtctatgtaacagaattcttggtttaacgatgcttttttttggtttctacgttaacttgaacagaatatcctattacttaacagaatattctttattaattttataatattattatatatatttaaaaataaaaattatatagatattttatataaataaaattttattttaatttaaaatacctaaaatattattgatatttttaatcttatttttaaatttattagtttaactttaaattaaaataaaatgaaaaactatgtaaatattttatataaagaaatttaaatttaaaatattataaataattttaaccatatttaactttattattatttattatatatttcaaattgaatttacacaccatatttttcgtaaagtttggaaataaaaaatctttatatcaaatttacgaatctacctatttatagacacactcaaatttggttatgtgagttttagttaagaataagtaaattacaatatatgcattatcaaatatgttacctaaattaaaaaaaactttaaaaatttaaaaatactacatatataatcacatttaaatgacacaccaatgtaacaataactaaaaaaatttcttaaagatcaaaatctcaaattccatttcaaaaattaaaaaaa

SEQ ID NO: 293470 - DNA, 583 bp, Cannabis indica
aataactgccaatctatattcctataagtaagggcataatttatggaaaaaagggacaataaaaagagaaaattttattattttaaatattgagtattgtattttgtatccaagaaaatatctctaaataataaggactcatagagagtatggagaatttaactaacaaaactaagtaaaatatctagtgttatttattatctatttaattgtgttgtgtatttattgcaaaaaaaaaaaaaagctatctatttagttaataatagtacttcattgtaattaatatattttattttttatttgatctacattaatctctctatttaggattcgtgatgtccaagaataatttgtgggtgaatttggttttaatggagtctaaattcacaatattaactaaggcatatcaagattatgtctgcacagatcaagatttatctgttcataaaaaatttcatcatttaatgaatttttgtaaggaaacatttaatgcattctctttgttttcaaacctttagagcttagttttggatatcatttatccctataaatatcacctaaactagtagcttccactccttaa

SEQ ID NO: 293471 - DNA, 671 bp, Cannabis indica
gctaattgatatttctattttagaattataatcacattattggtcttttttatctttttcaatttcttttttctttttctttccttttttgttaaactataaaagtgttttagacccacataaaattatcccctaaaataatgtctcttttgaaattgtaaatgatcattggtttaaaaacttttgtaacaaacacatattttttactatatataaatatcttatcctattaataatataatatatgaaaagtttattctaatatatattttaataattaatcaatgaattatgaagcaatgtaaaccaatcaaaatttgttgggggctgagacacaagagcctttgtttaaagtttttataataataagggtaaatactattttagattttatgtcttataaaaattattaattaaaatttttattttattgaatagtaaaatagactttatattatttaaaatagtaaaaatagaatttttgaacttatatttttagtataattttttttgatataaccaactgaaaaaataatttctaccacgaatatatacagaaattaatgtaaccagttttatcataacacttctagatcaggttattattaagttttattttgataaaaaaattagttaatgaccttatttgtactattttgaaaaaatacaag

SEQ ID NO: 293472 - DNA, 563 bp, Cannabis indica
tggtggattatattgagatgcatctgtttcttttatgttttaaacaagttcttgtgtgtgtgtgtgttttatactaaatattttagaaacaactaaaatctatacaaattatattttgatttttgagccacagttgtcattttcgtttcctgttttgacatatttgttccatttatccagttttgcgttttgttgcattaacttcaagtgaaattcattttgtgttctttgatttggttttttttacaaaagagttagtagttacccatttgttaaattggttcagctgaggtttgaatctcataccttaaactttcagcatgttttacttgagttatgctcgagtatttcaaactcttaggtggtgtttggttggaggtactgaaatagaatggaatggaaatgaaacaattttcatctcattcctttgttttgttgcatttaaacttttcagcatgtattttaaatcttattccatttctatatctatttctatttccattcccattctctttcattttcctatgttttcattcctcccaaccaaacgccaccttagtctt

SEQ ID NO: 293473 - DNA, 862 bp, Cannabis indica
ttaatcgtgtaaggctaaataaaaaaaggaaatcgttaaaccaagaatcgttaaaccaagaattgtcgttaaataggcacttttaatatataaagatacagaaatttaatccttctgttaggttccgtctcattattctgtttaaatgctgacgtgtctttttaaattagtaactttgctccctaaattttgacaactatcaaattgtacccctcagaataaaaatgaaaaaaattcaacattttttttagtaaatctcaaaaaattaacgtagatcttaagaaaatgttattttgaatgattaagaaaattaaaaaataaattaaattttaattaatttttacggaataaacttgagtatattttatttttctcaaaaaatgtaggtttgtttaagtaaacatgacatttttttagtttaatttatagttttttttttcaaaataattttatattttcattgaatttttaattatttttctttatttattaagatatgaatttataaatataaataagtttgatttttttttcaataaatcttagtttatttaaataatttattagattgtcaataatttttgtttaattttttaagatacgtgtttataaataaaataaagtttaaaaatattttataagaataatataatttttttaagtaaaattaatattttttaattaatttaatatttttgtcaagttttttttaataattttcattattttttcaaaattaatagaatattataatttttaaaattattttttaaattaaaagggagcaaaatttcatattaattaaaatttagggagtaaaatagctaatttttaacggtaaagataacagaacctaacagaa

SEQ ID NO: 293474 - DNA, 510 bp, Cannabis indica
gaagaagagaatatgatatgcagacaaactggaaacactctgactgaattgattttctcgtagctagcgctcatctcaagcaagaaaagtggcaattatgcttcaataattgtgggtcctttatttattaattaataattattttgtggtatacttatagtagatgctacactaccgagagatacatgttgtatatgcatataataatgtttacgaaaatatacatatatatatatatatgtatatctatctatctgtgtatgcaagtttgtatatgcaactctgaagtgagctcgtgaagaactgggttccatgcaaaaacaccttagctgtcaaaaaattaataaaaaaattaaatgtttatttatataattaaattactgaacaattagttcaatgaagtagtgactggaaaatattcttcaaaatcctaattctttagacagagatttggaattatcaaaataccctaatcagagaaatcgcatgcaaggtcacataaataataat

SEQ ID NO: 293475 - DNA, 434 bp, Cannabis indica
ggagttctgaaatattagaaatcatacatactgatatatgtagtccagatatggagtcacatggtcagaaatacttcatctcattcatagatgattactcacgctacatgtatatctacttacttcataataaaagtgaagcattagatgtctttaagatatttaaagctgaagtagagaaacaatgcaacaagcaaattaagatagtgagatcagatagaggaggtgagtattatggtagatacacagaagatggacaagcacctggtgcatttgcgaagtttcttgaagaaaatgggattgttgcccattacaccttgcccggtacacccgagcaaaatggtgttgcagaaagaagaaaccgaacattaatggacatggtgcggagtatgcttagtagcaactctaaccttcctaaatccttgtggactgaa

SEQ ID NO: 293476 - DNA, 423 bp, Cannabis indica
agaaataatttctagtgtttatgtagtaataactctgtaaggagtttaaatacctttagcatttgtatcaataataaaaacacttacacatacaaacataataaatataaaattggtaatagataagataaagtactgaagctcaacacataaattgcaatttaatttaaaaaaaaaattattataaaccaaaagtgtttgcaatattatgagaaccaaacagggaataaaatctcaaaacttgaaatctaaattgtttgaaaaactaaacaattaattcaaaaaaaaaatgagcttcttctttatcgtagacgatctccatccatcatccagctttctaatccaactcgctaagacagcatccgagtttaagaagcttgagctataagaagaataataaacaaggttagtagtccagaatta

SEQ ID NO: 293477 - DNA, 650 bp, Cannabis indica
aaggccatcagaaaaatagggcgttttgttgatgagtacttcatggtgaaggatccgagtatcacccggactcggtttcagcagattctgacatattaccatcctcccctcacccttgctcttagggatagagctcaaaaacttgcccggttgctggaggaagacaggaatatcatccaattgacctccaatgataatctggtgaagtatgggctttaccctgaggacttttctccttagtccgtggtggggaagaagaggaagtccggtgctggccggcctgaacgagctcatccggagaatgagttgattcaactgaagcatgaagctaagttgaagggaggtgtcagggccaagcagtatgctcaagagcctttggatcctgaggatgaggctgaggctgagcaggtgaccccattgaggaggaagaagaaactcccggccacgcccaggcctgttgaacatgcgattcgcataagggagcccatttcacctattcgcccatctcccccctttgttagaaaagggaaggctgtcatgtctgaaataaaatcgatgtcaggtgatgatggacttctgaatctctgcgcgagtggtcaccttgcattttacttcttttttgagcttcttgactttcatgccttgtgttt

SEQ ID NO: 293478 - DNA, 792 bp, Cannabis indica
aattcttttatttggcaagagggagaaaagaaggaagaggagagataaaaggagagggtctccctctaaacacactatttttaatccctcttaacatgagggaattcaagaaaaatacaaaaaaattatataaaatatattttttaccctttcaaaaataatatatacttgtattaaaaataataaaatggtaattttaatatttattttactctccatccttccacatatactcttaacaaccaaaaaaacataaaagagaacaaatatcctcctcattctttctacactctccatccatcttactctccctcattcctaccaaacataggtaataaaatactctattttagagcattgttattggcaccagacccgatacttaattatattcctaaaagttatttaattaagtatatgagatctaatacttaattacaccaataataatatgaaactgaaaaaaagtgctagacaccagtaagtattttttagcatttcttctttattttattatatattttattaaaaaataatgagtagtataaatatgaaaaattccttttaaattagttcttcatttactttgagtgtatgtacaataaaattaatgcatgattacaaacataaattaaggtcagctcaagaaaatttataaagtaaattagtaatattttctagcatcgactttaatttattcaatacaaataaagaatctcttagagaatacacaaatcaactcgaactatcaaatcttgaaaaaaataaaggaaaaccaacacgtgcattaga

SEQ ID NO: 293479 - DNA, 942 bp, Cannabis indica
cttgacctattgacaattgaaccatgggttaaaatcagatcattggatctgtcaacaagttaaccatggcaatttagatcaagcaataataggttttagaaaaacttacaaacaatctaaaacacatactcctgcaacaagttagattggatagttggatgtaggatttatttaatttaaaataaaataaatttcgaaaataataaaaaaaaataaacctacaatttttaaaaaattaggtatcaactaacctaaatatcatttaaaaaaaaaaaattgctaactaccttttaaatttcatgttattttataaattaaatattcaataaaataataaaaaaaaagataaatacatacccttttctgactttataatttaatttaagtaaaattaacaaaatttaaattttagcaaaattatcttatttccctttttaaaatatcatgattatagtaatcttatttaaatctaaataaggtcaaattacttaaaatagaatattttataaaagagtttaatagctgaccttagatttaaaataagataaaataatcaaaattaaaaaaataagaaaagaggtaagcaaaaaattaatttttacctattttcaaaatcaaattacactaatttctaaaattaattttaaaaaacaaattaatttatttatgataataagatttgaaatatgaaaaaaaaatcaaaatacaaaactacacaaaaaatcagaaattaattccatgaaatagcctgaaaaatcgaagtttgcatgctgtccgcgatcgtaggaggggagaattgccgagtaaactcggcgcaagggtccccttgcatgatttccgcgcgcgtgtgaagcgtgatcaccaccatgatttttctcgattttcaaaattcataactaattcaataaaatcgaaatcgagttctgtaaaaagtaaattgct

SEQ ID NO: 293480 - DNA, 869 bp, Cannabis indica
ccaagctgatcctagggcatcagtcggtggatgactacaatctttccaaagtcatctgctcgaatgtgagggctccggccgcagagaaggtattccgggatgacatcatcgccatggcggaagataagtaccagaagtacctcttcaagagggaacaggagctggcttacattaaggcccaggcgaccgccggaagggccctccggattggagctccattggagcggaggacccccaaacccaagcccgtggtccccgtaccaaatactggggctcccgatgccagcacttcgggttctggtaagtcccctttaataatacactatgttcctcccgtccgtgagtatacccgccttaggcctatagggttcgacgaacgtctctgtaggtttaggatgccttccacccagtgggggaatcatgccaaggagtattatttctcccatttaggccattatttaggtcggtcccggatgggttctggacctctagcgcccattcccttagaccattcagcccatttgtcctctagttggttccttccctcgggcagctttcttggggacgatgaagccagtgctatgattcgggactttgctagggccgaattagagagtcagagtaggattagctttattgccttttttgctaagtgtatattgttcttgcgaatgttctaacacttattttattgtgcagcagccagacccatggatgaactcttggccactcttgctggagcctacagtcctgatgcttccccaccacctgcttcttctcagttggtcactaccgggaggtcttcctccagtgccccttcgggcactattgtcttggtggacgaggaggaggttcttgaggaagttgaa

SEQ ID NO: 293481 - DNA, 552 bp, Cannabis indica
attaatcacaatataggtgagtgacacgctaaaccacttttcgaggacttaaactttgaaactaaagagtttccctatcgataaataacacggaaatacactaaatatctcaaaaatgggaaaaactagggttccaaaaactgccccaaccggcagaccggttcccaaccggaagtccgattccaagacacaaaccggtcgaccggttgctacaggtccccaagaaccgaaattccggttctgtgccgggaacacgaaaaatagctcccatgacctcaaaatcaagacaaactttgcaaaaactctccagtatacctaaacaacatataaccaacattttccaaccagtatttctacagaacaaaccaaagaaactcaacttgcgattaatgatcaaagcgttgaactcaaagcttaaacttgcacaaaactaaaacaaaacatcaaaaccagctgctagaacccttaatcaactcaaactaagtccagaattcgaaccctaagcatcccaaaccataacagccactaattttcaaaattacaagttcaaac

SEQ ID NO: 293482 - DNA, 633 bp, Cannabis indica
gattgaacctaagcatctcaggattaagatcttttgatctaagatcaaccagtgatattgacttagaaagatacaacggtaagattataatatctttaccaagatcaatatcggtccccgtccaatgtgtaaagaccgcttagcttaaatttggaaattagcagataattagggtttattatggaaattatttattaattttaaattattaatttatggtgatttatttgaattcagaatgcattttatatgtcatatataaaaatttcataattttgcatattcagtgcctagcaacattggaatgcggtgtttggctattagaatcacattttagtattttagtatagcgagggcggtatagttagacattgggaatgtcgggattttagaatttcccaaattacccctaagtgcctttttaacccttttagtgtgggaggagcaaaatggtcattttgccccaaaagccttttgtctttagtgaggttaattaagaaatactttaatctgatttttttatgttatgttggctgagatattttaataaaactaagctttatctcatttattcaaaaaatagaaaacttggtaaaggaaacactctctctctttcaactctctctctctctc

SEQ ID NO: 293483 - DNA, 392 bp, Cannabis indica
ttgacatttgagtggttaaattggaaaattgacgtttttgagaaaataagataggaaaataacaaaatgacaaaattgtaaagtggggcccattatccattccttggccagccacttagtgtcgattttaccatttaatttttttttcattattttaatgccaaataaatctaacttaaacttgggtggttacctataaatagatagtgatgactcacacttaataatatgatgaaattttactttcagaaaattttcctgagccttctttctattaggccgaaaccacattctcttcttttcttcttaatattttcaaaccttgagtgatatagtgagtgtccacacacatcaagtggtatctcaatcatagtatgtaagactgtgaagaa

SEQ ID NO: 293484 - DNA, 712 bp, Cannabis indica
tgatggctacttggagtgaaagtgagaaagaaagttctgaagatgaacaacatgagatagccaacacttgctttatggccattgatgataaggtaagtaatcctaaccatacaagtgattttgaaagtgaaagtgatgatgatgcacttgatatgtcttatgatgaattatcaaaatccttcaatgatttgcttgttgattttgaaaaattgcttgctaagaactcaactcaaagaaagaaaataagtttattgcttgaagaagttgaggctttgaaagtcaaagaaattgagtttttgattgaaacccaatgcaaaaagtgttccttatttgaaaaagatgttgtaaacttgaaagctaaaattgatgatttaaacaaggtggtttacaattttacaaaaggaaaagagaattttgaaatgatgcttgggagtcaaaaatgtgctttttcaaaaagtggtataggatataacactagtgtgaaacaaaaatttcttaggaatttctttgtcaaatcatctagtaatttgaacttaacttgcacttattgtaaccaagatggtcatactaaatcctattgccatgtgaaaaagaatgcctattttggtaaggctatttggataccaaaggttttaaagactaacatcaaaggacccaaagtcatgtgggtaccaaaaagaaagatataagtttgttttgtaggtatcaataa

SEQ ID NO: 293485 - DNA, 507 bp, Cannabis indica
gctccccagactttgatatctaccaaatcatgcccctcaaactttgatatgtattaaaacataccttttaaactttcatctatattaaattttttttactaaaattagataaaagtccttaaatttaacaatctcaatagttcggggagaatttttaataactaaaaaagttcaggaggcacgatttaatacatgttaaaattcaagagaaaaaattactaattaaccaaagataaaactaggtattggaaactttgaatctctatagcccaagtcacaccatttttctagataaatgctgtgtgtaacttttttttttgccctttgactttgtttaataaagaggtggtgggtgttgtatttctatttttgataaatcaaaaatttacaagtacactgtactcatattctataattattcatcataaataacaaaccttcaaaatttaattgtcaactatctatgactattataatttaataacgtatatataatatatcttatta

SEQ ID NO: 293486 - DNA, 853 bp, Cannabis indica
gctggccttggatgcatgtcatcccagggctttcgcctttttgaatttccctgatcccagctgctggatcatttggtcaggtacacaaggacacgcatgcatagtacgataacgtgtcgtggaagacaacctctgacgtcatacctaaaaaattctggtcagtaggtccgtaggctgacacgtataggcacagttatgcatgctaaaggcatggcctggattaatgtagtctcaaaatgccatggcccttctgggaaaatccttactcttcttgggagtcgatggcttggtcctagaacggtgggaaactttggttcacggatactctccgtgttgctagtaatcagggaatttcttatcacgacaactcttcctataaagttatggcatttatcttcctagagcatcaaatgaggaggttggtcagctaatgacttcttagcctttttttattaaaacccatgtgtcatgtttacgaaaacggggataacaattaataattagaattgtctttacagactttttaaggcataaaatcctaacattaaacaccatatccattgtaatcgaaggatgtgcatttacacattgaagagcaataaaagtccaagcaattattggttgatttccgctgaagagtagactatgaactaaacatgttcatggatcaaaccttgtaaaagctatgtgtatttacttgttcttttttgcattttatttcttgctgcattattgtttctactatttggtgatttgtgtgtttttgttctatttttcttctgttggtattcggatcacaacaataatatacattggtttagataaattatattagattagttcttgttttata

SEQ ID NO: 293487 - DNA, 871 bp, Cannabis indica
ccattgaaccctgtgagctggaaaccgcttggtgagaaatcccggtccgtgaggcctattgctgtgaaggcttctttgaataataaattcacagaacttccattgtcaactaagattctagccacaatcttgttggcaattggagactctatgaccagggagtcatgatgagggaagcgcactgtcttagtgtcctcttctgtgaatgtaatggggtgatccattagccggggcctttgagctgggagttgagtaacctcccaaacctcactgtgctttacggcccctgcataacgtttcagttccttttgggtagttccttcgatgtggggttcttcggagatcatggctactcttccattgggtctcgacggcaggccaggaatttgctgggcctctcctgggggagcgactggtgtcaatgctccggctgcaccccctagtgttccttggggcaaaggtcctattgcttgaaccgaattgagatgaggcagccggttcttgatccattcgtaaaggtgtcccaatcggatcaagttttcgatctcgtccttgaggttttcgcattcattggtgctatgtccaatgtcgttgtgatactcgcaccttttgttgggatccctccgggagctatccctatacaaaggaggcaacctccggtagtgcgtatttttcctagtagcgaaatacacacgctcctgggagtccgttagctccgtatactgggtgtactggggagtgtacccccttttctgccgcttatcctccgtccggttgctgccttttgaggacctcttgctccgagagccttgagagggacctgttaagcttgcggtcggagcagagtgagacgggacttgtccacttatcc

SEQ ID NO: 293488 - DNA, 502 bp, Cannabis indica
agcacagacaagggaaaaaacatttccaagtagggaatttcccatggcgaggatgaagatgttgatcctcgacttggggacccaagcaggaatgttggacctgtggaagagttaaaagagatcgagatccatccaaatatcccgacgagaaagctaaagattggaaagggtttgctgctcgaggtaaaatcagaattgataaaatttctgagagcaaacctagacatttttgcctggtcacatgcggatatggtcagaattgatccttctatcatttcacacgttctaaatattgatcccaatttctggccagttcaacaaaagagaaggttgttggacaaagagcgagcactagccctaaaggaagaagtagaaaatctacgcaacaacaatttcataagtgaagctttctacccagcttgggtcgcaaatctcgtattggtgcccaagccgaacaagaaatggcgagagtgtattgatttcacagacctcaacaaagcat

SEQ ID NO: 293489 - DNA, 592 bp, Cannabis indica
tttaattttttttaaaaataacatatacatatatatacatgtataatcaactaaatatcacactaccattattttaaaaactttaactctaaactaattaaattcctactacctctcattctcattcacaacaaatatatatacaatacaaatacacaaaatacacaaatagtatatacacaatatatatacacacaacatatatataaacacatattcaataataaaatacaaaatataatatcacacacacaatataatatcaataaaatgaaaaaatcctaaaaaaaatttacaaaaacgaaataataccaatgtacattaataaaatgaacagaaatcatatttataccttaatgaacgttgagattgaacgatttctccgctaaaagcggtggtcggagttaaaccaccacttttttttaaaataggttcgggtacagtgtaaatgggtgaaaaaacaaaacttttttagtgtatgggattagatattgaaaatagaaacttttaagacaaaaatgaggtgaaatggtgaagaaatgagtgagatatgtgggtttttagaggtggttggcgagggttttcgtgggtt

SEQ ID NO: 293490 - DNA, 692 bp, Cannabis indica
gatcttagatcaaatgatctcattcctgatatggttaggttctagttcagttgtattatttgtgttcttaaatatgttcgttagagtcaagcaaatggttcttctcgtgacatataggttaaggacatggaagttcaattgagtgagagtgctaatcatagatacagaatctatagcttctatcaggatattgaagtgaaacaataatttccttccagcttagtttaatagagataaatggttaagtactcatttcagtgattatattagttcactagattatcattaataggtagctaagtgttttaaggataaaatacacttaagggtgtaatggtaaattagtccctactcaatgtagatcatctatagaggatcattgattattaaaataataacaaatggataatctcatagcgtatctatattgtggaacatatagagcattctatataattgagagtgcaattccaaatctatttgtgcgaggaagaattaataagtaaaagatttacttggtaaattctagatctgcttattgaaatctcggttggataggcccatggtccccatactagttgatgagtgcatatttatcttataaatatgattaatttatttattaatattcttaaattgattctttaaattattgattagtgtgatttttaatttgttaggttatttttaaa

SEQ ID NO: 293491 - DNA, 563 bp, Cannabis indica
ctgttttcaaaaactaaaaattgaggaattatataaaaaatgttagggacaaaattttctacatgaaatgtttagattagaggtgattttaataaattttgtgaaagtgaaatttataccttaaattataatgatgtaaaagaaggtcatgattcatatgactaattatttctataattaaatatttatttgtcttactgttttgcaataattaaaatgataagtaccatatgaaattggttgtgcagtcgcgcgattgttttaaatatcatgtgcctagcgcggtcgttataatcattgaaatataaaatttaatttatgtttttttttttttatttaaaaattcatattttaggtagctattaatatttatacttaataagtgaaataatataataatccatgatgattgactatttttctaattattttttaaataaaaaaaaatcttttaattcctattttattacttttttttcttattgtttgatttaattattagtagatattattattagttactataaaaaaaaaaattagattacctattattaatttaaata

SEQ ID NO: 293492 - DNA, 530 bp, Cannabis indica
tataatacttaataaaaaacataccatacgtgcatcgcacataacaatatactagtatatatatatataattaagatttgtattaaattcgtctgcatcgttagcccttcatagttaattactaatgatgaaagacactattgacaaaaaaaaaaaaaaagttgagaggccaatttgctaaaaaaaaaaaattagagatcaatttaacaaaatttatatatatttacttatttgatttttttactattattttgcactccaccaaattataaatacaccctattattaaaaaatatataaacttaaataatttttaaaaattactcttgatatttttttaaaatttttttctcacattattttatgttaattttaatacttattttaattttattttcataattttttctaactcatgtatacatttttttttattttttacttaagaaaatttactataaaaaaatttaattttaaatttttttgtcatattatttaaaatataatttaattttatttgataggtatat

SEQ ID NO: 293493 - DNA, 669 bp, Cannabis indica
ccgattttttgtgtagttttgtattttgatttttacttttcatatttcaaatctaattatcagaaataaattaatttgattttttaaaattaattttagatattagtgtaatttgaatttgaaaataggtaaaaatctatttttgcttacttcttttcttatttttttaaaatttgattattttatcttatttttaaatctaaggtcagatattaaattccttttataaaatattctattttaagtaatttgaccttatttagatttaaaataagattactataatcatggtattttaaatagaaataagatatttttgctaacttttaaattttgttatttttacttaaattaaattataaaatcagaaaagggtatgtatttatcattttattttattgaatatttaatttataaaataacatgaaatttaaaaggtggttagcaaattttttttgaaatgatatttaggttagttgaaacctaatttttcaaaattgtaggtttattttttaaatttttttcgaaaatatttttttatttaaatattattttcgaattttttttattaattaatttaaaattaaataaatcctacatccaactatccaaattcaacttgttgcaggagtatgtgttttagattgtttgtaagttttctaaaaccta

SEQ ID NO: 293494 - DNA, 677 bp, Cannabis indica
ttgcatttgggaaacaaaaacctgcacttcagagttagaagtagatccaaaaacaagatcatcaacatatgaaaaaataatatcaaattgaatgtgtgtgatgaactgtgttttaataacatttccttttctataaccatgagagtgtaaaaactcagatagacgctcataccaagcacggggtgcttgtttcaagccatacaaagccttgtctaaaacatgatcaagaaggtgggaatccttaatcgctccattttgttgtgggattttaggagcagaaagattatgaaaaataccataagatttacagaatttaccatacacagtattttcaaaatcttttccatgattactcttaccacgaactatcttaccaatgttgcaatctttttgaacttttaatttcaagcaaagatacttaaaaacatcaaaagtatcaatgttttctctaaaaaattctacccatgaaaaccaagagaaatcatcaacacacataaaaatatacctcttaccattcaagctttcaacctggattggacccattaagtccatatgtaggagttcgagaactctggaagtattcacatcagaaacactcttatgagaaattttcagttgcttaccaagctgacatggtccacattttcccaaagactccttacctaatttaggtaatc

SEQ ID NO: 293495 - DNA, 611 bp, Cannabis indica
aaccttgccaaccgatcaaactgcgttgtgtactcagtaacactcatattttctttctgggtcaggtgggtgaactcttttctcttggcacttctgacaacctcattgtagtacttggcattgaaaagttcctggaacttttcccaggtcattgtggtgacgtcatgtatcatggacaccatgtcccaccagaccaatgcatcttcttgaaactgaaaagtggcacagacccctctatcattcccggtgacgcccatgaaattcaaaatctttgtaatcactgttagccactgttcggctttcataacgtccggaaagactggaggttcctgcttatggaacctttcatacagaggttccatccgattcactgcaactgtaggtttggcctgcacaacaggggcaggtgcctctagaatttttggaacaggcactgcagctgcaccctgctgtcttagttgctgaatttcagtgtcttgttcctcaattctggctcgcatttctgcaaacctattttccaaattctgggcttcctgagtagcatgggcagcctgggcatcctgtggcaggttagcatcaccccggccacgaaccctgcccctgggacctct

SEQ ID NO: 293496 - DNA, 570 bp, Cannabis indica
agtctaattctagaattataattgattaatgataaatcaattattgagtcttacaagcagtatgttctcaactagaatggggaccatgggcctatattattgagcttccaataagtagcaaactgaatttaccgagtaaactcgctaacttattaattctttgttgaatccactcttagaacttggaattgcactctcagatatatagaacgctctatatgttccacgatattgatacgctatcacatttaaccatcgttataatcttaatttgatcaaagatcctctatatagatgatttacaccgagaagggataaatttaccatttcacccctcaatgtatttggctccttaaaacacttagttacctataaatgatgttttagtgaactaaaatataatcactgaaacatgagctcatccatttacttctatttaactaagctcgaaggaaatcatcacttgacttctaaacacctatagaagctatacattccatatttatgttcagcgctcccactcaatcatactatcatgttcctaaaatatacgtatcaccctgacccaaa

SEQ ID NO: 293497 - DNA, 507 bp, Cannabis indica
cttaatttgcttgttgcattgtttctctacttcagctttaaatatcttaaagacatctaatgcttcacttttattatgaagtaagtagatatacatgtagcgtgagtaatcatctatgaatgagatgaagtatttctgaccatgtgagtccatatctggactacatatatcagtatgtatgatttctaatatttcagaactcctatggacaccagttttgacagacttggaggtttgctttcccttaatgcaatccacacaagtatcagagtcagtaaaatctaaggtattgagtaccccatcttttaccaacctttaaattctatcaattgagatatctcccaatctttggtgcaataatgtacaggaatcctctttcataacacatcttttagtgccagcgtgaacatgcataacattattagtggtattattttgtaaattaaggcagtaaagaccatcagacaaaataccatttccaacacattcaactttattatataaatt

SEQ ID NO: 293498 - DNA, 920 bp, Cannabis indica
gttgacgggtggaatgacaccattgatctggttggaaccatcaggtatgactcctcatgatgaattaccagacgaggtctgcttgcctaccgctaggcccacgagtggaactcgtgaccaaggattgggcggctgaccatttgtagtctgggaagttttcatcgttggatactcgtctgtctctcccaggggaatgacattcggtgattgctaacctacagtttggtaggctcttcgtatcaacacggtagcttgccagctacgatcttcgatctttgcatggtgagcccttaatgcctccatctctctatctctccattcggtgaacatacgcctttgttcgttgaacgcgagatttactgcagcgcgtagttcgtcttgatcatgatgtagggtattattatgaccctgcatgagtccgagcgcatcacggagattttgtaattcagtggcatctccgatagtcgtctgggcattcgttccaggcaaaaccgttgtgttatgaatgccctggttgggtgcggaactgttattcccagtctcttacacaccagccgcaatttcatctataggaactgtttcaccattccccacgttcaccggctgtccaggattaacagcaggcgaaaccctcatgtttcctaggttttgcgatgcaggatccagcgtctgtgaatttgctatattagtcaggcatctacgagtttgcaccatcgtattagtgattggatgttgaataaagagcgattcgtgatccttctctcaatgaaagcaccaaaatgttgacctcgcttttagccaacgataacgagtctattttataagcgataaacaatttataataacaaatatatgataaagcaataaaaagacacatgaattttatagaggttcagcctcgagcagttcggtaatagcct

SEQ ID NO: 293499 - DNA, 643 bp, Cannabis indica
acatttaccgacccaaacaaaagaaattaggggagcgaattagtttatataataatataataaaagaataatttgggtgtaaaaatttaagtttaactttcagttatggatgaatatttaaatttaattttttagggtaataaaacttaagttatatttttaaaactttcgtaccgttaagtgtcaagtcacatgtcatttttttattagtttatttaaataaaaaataaaaatttaatgacctagcagactaatcaaggactgtcatgtggctattcacttaacacttaatgattaggtacttacagaagttccaaatatttaacttaagtattattatcgtcaaaaattaaacttaagtatttatctataaccagaattaaacttaagtatttacgcctcaaatattaaaaataataataatatggtattacatgacaacaattgaaaaaaaaaaaaaaagaattattttagaaatacataaaacaacaaaaaattataaaaatacggttgtacagaattttaaatattttacggtttttaattatttacaaaaaatatgctcttttaaagttttctatgttatttattcttgttttattgttgttggttttttgttattttgttatattattttttatgt

SEQ ID NO: 293500 - DNA, 582 bp, Cannabis indica
tatttgaggaaattgaagctgaattgtatcccggttgtgattggatttcgtctctcaactttttagcaaagctattgcatttaaaagttagaggaaaaattcctaataacatctttgaagaattattgaagctgttaaagtttgcatttccgaaggaaaataatattccatcaacttactacgaggcaaaaaagagattgaagaaattaggcttgggttatgactctatccatgtctgtttgtataattgttgcttattttataaggagaatgcatccaaggaggcttgtccagtttgcggaactagtcgttgggttacttccgagaacggaaaggaaaaaaagttccttgcaaagtcatgcgatactttccgttgacacctcgacttaaaagattatatagttcgaggattacagcgaaaagcatgatatggcatcatactggaaaatcaaaagatgatggggtgttgcgacacccggtcgatggtttagcttggaaagactttgatgcaaaacatcccgagtttgcaagggacccaagaaatgttcgacttgggttagctgctgatggatttaatccatt

SEQ ID NO: 293501 - DNA, 533 bp, Cannabis indica
taggggttaagttactcttatttcatttttccaaagttagaaaagttagaaagttagaaaaattcaaaggctctcttttcttctccctagttcggttttgagcagctgggtttgggggggaattctcttggatttcaagctggttttggcatagattttgacctcaagttgttggtaagatccttgtagctcttcctcttagtttcttgaagatttttgatgaaatgttgatgtttgcatgcttagtttaagttgatgttgttgctgtgattttgtagttgtttgcagaggtttaagcatgactaattgatgatattaagctgcttgtgatgcatgattgttacgatgttagagttgtggaatttttagtgtaaaagtttaagttttcaaagagaaaattggaattttagtagctgtagttgttgcatgagttagggtttggtttctgctgttttagtgagcatgttgttaggctaaaaatagtctaagtttcgggtcatattttcggttagttttcactctttgtttctagt

SEQ ID NO: 293502 - DNA, 388 bp, Cannabis indica
actaacaaattaaagaacacgaaagctaagtcctctggaagatggcgtacaacatccagtctattacatcagtaaaagactcatcgaggccgaatgccgatatccgttgatagaaaagctcgcctactgcctcatcttagcaacaagaaagctaagaccttattttcaagctcatcccattcaggtgtacaccgaccaaccactaccgcaaatactgcaaaagccagatgcctctgggcgattactcaagtgggcggtggaattggggcagtacgaaatcaacttccaacctcgaacagctatcaaaggccaaggcttggccgactttatggtggaatgcataggaaaaactgaaagcatcccaaaagccaatctcgagccaacacca

SEQ ID NO: 293503 - DNA, 634 bp, Cannabis indica
gagtgactacccgcccagaaagtgaaaagttcatcatcacctgacatcgagtttatctcagacataacagccttcccttttccagcaaagggataggatggccgaacaggtgaaatgggctcccttatgcgaattgcatgttcaacaggcctgggcgtggttaagattttcttcttcctcttcaatggggtcacctgctcagcctcagcctcagcctcggcttcatcttcaggattcataggctcctgagcatactgcttggccctagcaccgcccttaaacttagcctctcgctttagttgaattaactcattctccggatgagttcgttcaggccggccagtatcagacttccccttcttccccgccacagacttaggagaaaagtcctctgggtaaagcccgtactgcaccagattctcattggaggtcaactgaatgatattcctgtcttcctccggcagccgggcaagtttctgagctctatccctaagagtaagggtgaggagaggacagtgatatgtcggaatctgctaaaaccgagtccgggtgatgttcggatccttcaccatgatgtattaatcaacaaaacaccctattttgctgatggccttgtcatccgtgtcgctcaacc

SEQ ID NO: 293504 - DNA, 708 bp, Cannabis indica
acaaaaatctatcctataaatgtaggaattattctgtgaattgcaagcttgcagatatatttgatatatctatgaaattgctaactcacaccccctggttggtgcatgcgagccacctatggaatctggtcagacatatgtgcatactgtgcttggatgtcacaacttctatttgtaaccttaagaattagtccttcctatatggcttgctaagagtagaatcatccgtctaggtaatgaaatatttttccacgtgtcacctagatggatgccacatcatagtgcaaaaatttggataacaaattccttatgcattggctaatgaactctatcaccgaaccaattcttggacacatcatcaactatcactcatgtactgaggtatggagtactttcaagcatctatttgcaccagatctagggccagacttcgacgaattcggaacctccttcaaataacaagaaaggatcatgtccattgaagattacatactaaagatgaagcaatatgctgatgctcttggaaaaaacttcccaaatccctaataaaacgatgatatgatcccgtaaactcttggaggattaggaagtgaatacaaagttgtggtggtgaatctaacctctcgattagatcctatttcactctaagaagtccagttcatgctccataatcagaaatgagaccagttcaggcaaatctgcaaactt

SEQ ID NO: 293505 - DNA, 635 bp, Cannabis indica
atataataacttttatttttattatttaaaaaaacaaaacaaacaatagtatttaaaaaattgtatttaaggtcatattacaaaacgaaatggactagtctaaggtaatttaaatacctgctgactcattcaaatccgccaagtagtaaatttttagaaagaataaaataagaacttcaaataattaacttttaaatatgtgtataataattaatgtcacatctattttttattaaaaagaatattatatatttaattgtatataaaccacaaagttgaagttagggggggccatggccccagcatccatcaacatagttccgccactagttattgctgctgtgattttatgttgttttcagaagtttaagcatgcttgattgagtgaaatgaaactgatgttgatgcatgtttggttggttttaagctagtttagaattttggctctaaaactatgattttcaaggtaaattgatgagttttgttgttgtgtttgttggggttgatttccattgtttgcagaagttttttatatgcatatttgagtagtttaaatctaggttttaatgcatgtaggtgagctttagccaagtttgagttttgaactcaaagcttagagctcacatggcattttt

SEQ ID NO: 293506 - DNA, 570 bp, Cannabis indica
gagttcaacctccttggacccagtagcaaaagccttcgaaaacatgaccataaactgcgaagctagctccgcggagcgaggcagcagctcctcagtaggagtcttgtcaatcttcgactggaactcatcgctgacaaatctctcctgaaggtacaacacatggcgagctcgaaccgctgggtcgatcacgactttcttccctttctcttgaatacccttagcaggcctcttggaagaatctgcgacaggagtaaccaccacgtcgcttttcctcttctgagaagcgataggggaagttgctgctgtcccaggcttcagcttgcggttaagagtaggagcggacttcaagaaagtcatttctgcagttacagcaaaaaataagggttaatactaataaggatgaaattctaacaccctagtttatgtatgcgataaactacctgatgatggtcgaggagtttgcttggaaagacgtttatcaattcgctcttgttgcttttcagaaggttccttatacaccgactctctccagagactcacgttctcagggatcaatttgtgttctcacag

SEQ ID NO: 293507 - DNA, 423 bp, Cannabis indica
atttttgctagaaaaaatggcacctaaaagaactaggaatgtggaagagggttcgtcttcaaatccaccaactacgggttttgatagaacccggtttggtaacatagaggcccagaatcgcttcatgagaattaaaaatagggcttatattgaagaccggggtattgaattccccgaaaatcctttgagacgtcaaccacggtttgagacaattcgagctcaaattgagaggatgaagtgggggagctttgtggatgctatgtgactatggcctgttaatttcttacaaattggcccgacctccgaaatggggaagtaaaggtgcgtggaaagaaggttcccgctactgctgatgcttttaatgtgatgttctctgtccaagattacactagggaagagcaatgcctccgaattattgaggag

SEQ ID NO: 293508 - DNA, 704 bp, Cannabis indica
agcattaattaagtaaattcatgaaaaataccaaaattgattaaaaaccgaatctaactcttctaatacactttataatctgtaataagtcataaataattttctttgaattttctaagcaacctaggtatttttcataattaaaataagaaataacatcaataattcatgaaaaatacataatcgcctgaaaattcaatctaccaattttataacagtttatatatcatagtccatcatataaaataaatctagatttttctgagcaacctaagtatttttcataattaatttaataaataacacaaataattcatgaaaaatacaaaattaaccgaaattcgaatctaccaattttgcaatagtttatatctcataactaatcatataaaatatatttagatttttctgagtaatctaagtatttttcataattaatttaacaaataaaccaaataattcataataaatcaaataattgcaagaaaattatcaaacttcatagtaggcctaagaacacctagcacaagtcaagaactgaaagaaaatcgaaaaataacctccagaaacccctgaacggagtgtcgccggagttctcgtcggtttcgtcgccggtaaagtgtaactttgtctccgattgctcttgaagcgtcctttcgattggggaagctctccacaatgctcaggacctcaaaacgatcaag

SEQ ID NO: 293509 - DNA, 1121 bp, Cannabis indica
gtcgatgatgaggtcgagtttattagaaaatatattataactttacactaatttattaatacaagtgaatactaaacataatattgtattaaataatactaatacaatattatataatataatacgacatactaaatgaacccttaaatacttgaaattgttaaaaataaaacattaatgctagaaacttgtacaaataaaaatagaggtttataaaagaaaaaaatagatttgcacctaagagttgtattcaatatgcattttttaaaaagatattttatttaatgatgtcaattatttttttaattaaataggcacatgtatatattgcataatatgtactcttataagtcagtcataaatattaaaagaaactatttgtatacaaccacttgataagagggtgggtgtgtgttaaaggtcgtgaatttgaatcttaaactatacattgttgtaatatataaacgtttaaataaaaaaaaaatatatctgtatactatatgaacaaaataagtgtgccaccataagattattatatgtattcattttattaagtgtataatcgtatctgattgggttgaacgagccataatttaaccagcctattttcgacctaaaatatataggttactaaaattataattcaaactaattttgactccattttttatattcattaatcaaaaataccttatattttattaaaatatacacacttttatgagtgggttgcccaatatacccatactctctagtgtaacatataatttacattaacctaaagagtctgttggaactttgtgaaatgttaaaaaatgatgtgtgtgagtaggagttccacatgggatagaaacacttcatttgaagtgtataactagtgcaagtttgagatatgggtttgggccccaaggggtacccagttttgtgcgcatgggtgaggactcacacaccggaccaccacacgcgcgccgccgccgttcgtgccgagcgggtgtggtgtcaccttattttttggagaaaatttatttcttaaattattatttatataattaattaaaacagttttctttttaaataaaaacgtgtttgattaattagtaaacagagatgcttcctgattt

SEQ ID NO: 293510 - DNA, 764 bp, Cannabis indica
ctctggcataccgctcttgtgacttgcagagtctcctgcgatatggggtcctccaatgatagttaagatgttgcgaggcgttctggaaccactcgcattttggttttctcctttgtcatccgctcggggatgactttcctcgcccttcttatacttgtcgaactttcctctccgaatcagctcctcgatttcatcctgcaagacccaacattctaaggtagtatgaccaatgtctttgtggtacttacagaattttttggggtctcttctgtcgcgatttcccctgatggggggcggcttcttgaagactccatttctctcttcgattgcatagatatggtctcggggtactgcgagttcagtataattgacgaaacgaggtccgcccttcctcttcggcgaggattccttcttgggaggagacttggccaacttcagacttcgctgtctccgcgggctgcgtctccttgggcttcggcccctggagttcttccctcggggactgcgagatcgtgaacgcggtattggtgatttgcgcttgtctttgcccttctctaactctgccagagaattctcgattctcttgtggggttcggccatggcgaagaattcgactaaggattctggccttcgagcttgtaactccttccagaagtcggtcctcggcaaaatacctgttatcagcatacaaacaagcgaagactcgggagccttctcgacttttgttacctctgcattaaaccgtttaaaatagtcttgtaaag

SEQ ID NO: 293511 - DNA, 691 bp, Cannabis indica
gtaatgatcatttaagtctagcgacggctactctgcgaagagtcacgtcaatcacaaggcaaaaaggacattcctcataaaaaccctacagcacctagggatttgaccatgcatcacccatggtatattcattggaaatacccaactttatggatacttacagatacatgtgtaagaacaattctagggattaccccaccaaaacactataaataccccctcaaagctcatttaatggggtcgagaatcttgggttgcataagagcaagaagagaaaatactcaccaagaacattctctgtatttatgagaaaaacattctctcaagtgtggaatctgtattaaatacatccattaataacaaagactcgtggactaaggctcattaacgccccaaccacgtaaaaatcttcatctcactttcttacagctctttactataatcatattttaatagttgccgaaaatctcggtcaacacttattttaccccttaaaatatacagcttattaagaatccccttaacttttacatttacagagttccgtcctattattctgttaaaatgatctttgttaattaattagtcaaccttaccctctaaactctactatcaaatcgtacctccttaaaataaaaatgagaaagttttaacattttttttagtaaatcttaaaaaaataatttagatc

SEQ ID NO: 293512 - DNA, 996 bp, Cannabis indica
accaaacagttatcgcactgccctagccttctatgcgatgtacatggaatatgttcatagggctccctcagtagaagagttcagctatttctacgacataaaaagcgtaggtcttcataacggcttctactgttttagcaaatgggcgacttctgagatcaatggagtagaaggaatggtatcgaacatgggggactggaaatcgaagtggttttacgtctttaaagtccctgggattagaactgactttaatcgcagacctagtatgtcgcgtgttttttaacttaggcattttctgaattacttttgagatcttatgctaactcgctctttcttgttctcgcagatagaccagctcgaccggcacttgacgcgactcgcagagagacagctgaaatcctcgggagccttccggtacaagatcgcgactggcgattactgtgtacaactgcgaagttgcgagaacaccagctgattcctgagaacgcaagtcttcaaagagagccagtatacaaagaaccatctgagaggcaacaagagcggatagacaaacgcctctccaagcaaacttctcgaccaatctcaggtaatttatctcttgttataaactgatgtcttgagttttatttatacttatctttcatttatcctcgcagatatgacttttttgaagtctgcgcctgtccttaagatcaagccgaagggtggagcaacgacgacctcgcccgttgtcgcccagaagaggaagagcgatgtggtggctacccttgccgcagactcttccaagaagctggccaagaccacgcaggacaaggggaagaaagtcctgatcgaaccaactgttcgagctcgcgacttcctggccatgcaggagaagttcgtgggcgaggagttcatgtccaaagcggagaagatcccttctgaggagcttgttccgcgctctgtggagttggcctcgcagtcgatgaccctgttcataaaagctgctgccgcagg

SEQ ID NO: 293513 - DNA, 558 bp, Cannabis indica
attgtgttagattttgaatctacaccaaattaatgtatttatgtataaattatcacaaaaataataactaatataaacactaacatatttgaaaatacaatacaacaataacaaaaatattaatattaaataaaataaaaacaacaaaacaataagttataaaacttactattttaagatcttaatttcttacgtagtagtcatatgttatgtataaattattaaatttgtaaacattgtacattatcataaactaagaaacaaaagtcttgtgttgtgcggtcttaaaaaatcataagctatacattattaaaaatggtttacgtttttaaaaaatattaaattagtaaaatattaattaattattggacaaataaaaaaatatattcacattttacatataaaaaaactttaatattttttaaaatgtgagtttttttacaaaattagatcatagaaaaaaactaaaatactctaaaaaaataatataaaatgtattaaaaaaatatatgattgatcttattattcttagtcttacatatatagatttttttttaa

SEQ ID NO: 293514 - DNA, 546 bp, Cannabis indica
aaatttgtgtttttggtgatttggatggaagatttgaagagaatgagaagaaatttgaggattaatggtggaatgaggttttgagggctgagaaaagagagagagtcgggttgtagaagtggaggttgatttttttagggttggtttgatttggggatttaaaatctgaaatttcgtgtcccgtcgcgacgggcaatggcccagtcgcgacttctgaaccccctttttttttttttttttttttttttgagaaggcctagtcgcgacgggcaatgctcccgtcgcgactactgtagctatggccttcttttgctattttttttttttttttgacaattttactgtaaaaattacaaatgcaaatctatcctaagtgcaatgaaacgaattaacatgcgacaaaacacttgtaaatgtcttctacaaattcaaaagaaaaataaagtaaaactaaattaaaagattgggttgcctcccaatagcgctgatttatcgtcactcagctagacgttgaccgagatcttcatagtggcgccagaatcatgg

SEQ ID NO: 293515 - DNA, 786 bp, Cannabis indica
gtccaggtccgggtctgggatctcgggttcgggctcagggtgcgggatccgagtttaggtccgtgtccgggtctggaccgggcccggggtcggggacgaggtccgggtctaagtccggggttcgacgtccaaggtcctggtgcgagtcggaaattggtgttgacaccaaatcttttgtaaatattacaagttaatacagaccatttattatgtattaaataatacaacatacattgtattaaaaaatttagtcgtaataattaatacaatacattgcttaatccaaacataatgttatttatcatttaatacaatacgacccttatacggcatactaaacgagcccttaaggtggttaaaaatgcgttctaaattattaagattcttagatttaaatttattcaattttattattgtttatatactaaaatatatttgatatctatcaaattatgcccttctaacttgacatatactaaatcattctattgaattttcatctaattttagactttttttcaccaaaattaaaaaaaaaaaacttactaaaatctaacaatatttaacgaccttaaaaattacaagaagtataatttaatatataaacttcagagcaaatatcctaattaaccttattattattaaggtaaatagtggcataaatacccaaagtttaggtttgtaagcggtataaacccaatgattttttagttgtacataagtacccaactgttataaaactgtaattctcttccagttttattcagtatagactctattattgtc

SEQ ID NO: 293516 - DNA, 1286 bp, Cannabis indica
tttttgcggctaaactacctaaattctagttccgtttcgctctgcacacctccgttcaaaaatcacagttaaatgtcacggtggactttccacgtgtacacatttgtcacgcggtaaattttagtggcccacgtaattataatttaaatatactaaaaataattaaaaattaaaaaaaaaacaatttatagaaattaaaaaaaacaatttatagaaattaaaaaaaaaattgtaattattgacataccaaaaacaattagaggtacgcgaggctctgagttggattaagaggaaaaattgacaacatgcgtcgattgagacagattggttagtggttgttcaagcaatacgaagttcaacaaaaatgctttctttgtttggacaaatcattattgaatgtaaacaataggggtgagcaaaaaatccaagaaaccgaccaaaccgagtaaaccgaccgtccgaacaccgaaaaaaccgacaccgaaaaaaccgaaaaccgaaaaaaccgccttcggttaaaaccgccttaacatggtcggttttagtgtcaatggcaaaccgaccgattaaaccgagaaccgaccgaacatatatattatatataatatatattatttttgtacatatttaatatacaattttattaaactaattttacttatatcttttttatttaaagtctcaattattcattattttattttattataatttgatgcatttacgtattatatacacacattcataaaataatactagttttttaatataactcatatcatattagtagcacaaataatttgaacaaatttaaaaaagtttattttacattatttatttaactaagaaaattttatttttaaattatatgatatttgatacaatactttattttttttggttttcaaatatttataaaaatttaaaaacttatttttttaaaaaaaataaagttcggtttggtcggtttaaaccgaccaaaccgtggattaaaacggtcgatttttttatatttttataatggtcggtcggttttcggattagaaccataaaaaccaaaaaccgaattttggattttttatgtgtaaaaaaaccgaccaaaccgaccgttgctcacccctagtaaacaactcctgttggagttaaaacatgtttctatttattttattaaacgatcagctaatgtggtagctcataactttgcaagagtttctgtattatttcctggtcgtatcttcggtatggagtctgttactaccgagttgttacattgtttggtaatagat

SEQ ID NO: 293517 - DNA, 201 bp, Cannabis indica
aattaaaaaaaataatttttaacttaaatttaattttctataaatatatagcaaaataattaaatattaagaaaatatcaaatatttaagtatcatgataaaaatcaacttaaatattaattttctatttaattaaatatcactagaaaaatacttcaagcaaacagataataactatctagactttcattgactaattaa

SEQ ID NO: 293518 - DNA, 750 bp, Cannabis indica
gatattacgctttggctagctagtagcaattcactaacaccccattaattcaaaaactgctgaaaatcaaaacacgtttaataagaatatctaataattctaaaattaaccagtatcttttaatttaaattatactaaaatttcttaatattaatccaattactattgtattaaaaaccttaagaatttttatgttataacactgattcttaaatttctttttatctttaagaataaaaaaaacaaaattaacttgatttaaatatattaaaaagtaaaattatgaataaattgttaacttttattttatttgaaaactttaatttctcataaaaacatggaacaattaattaaattaccctaagtaattagaggcaagcaaaaaaaatagacgcaacagccttaaaagacattaaagccaacaaaattatggcgcaacaaatcctcacaatatataaaagtattaattcattaaatatttgactaataataataagaattacattagacgatcaactaagcaaggccttttaatcaaagactgccaacttttgttatttaccctcccaaatgttagtttatttttaattagtacgattagcaaaccgagtagtacattatgttgctagacattctcagtatcaatctgatcgtagcatttttttatatttctatttctgataaactcttacatttttgtattcaaaatgctaaattattcaatgaagttgatatttcatctcaaaaata

SEQ ID NO: 293519 - DNA, 524 bp, Cannabis indica
aaataacaaattattagatattgccacgtaaagagttatcatcatatagttagttaaacttaaatataattaatccacctaaagtgttgcaattaataataaatttattcatattgtttatttaaaattattttcaaattttgatatttagaattagttaaattttaaatattattttaattaaatttgaatgtgttgatagtttaatcagatgagtcattttcattaatataaatttaagatgaataataatttttttttaattactattacaaagtataatagtaatttttgtttttatttaaattactattatacttttaattactattacttttaaatattattaatttcaaccctatttccaaagaaaaagaattatgttttctaattgataaaagtaaaacggtgcgtttattaaagtctgaccttactacgtaggaattaaactattccaacaaaacgacaccgttgcgagaggaacacaacacaacacaagtctatgactatgattcttcttatag

SEQ ID NO: 293520 - DNA, 543 bp, Cannabis indica
ccaataacaatgatatgtattatggtacccaatatagtactgggtaagtctatagtaatagaatattataaggtagtgatttataaatgataaagtgtatagtatactttataattgtgtatgtaatagttatttagagttacatataaatttttagaacatttcgaatagtttacaatatcaaatataaagtttaaatattttattgcatatgtaactatttttttttattacgtatggtaaataattatttgaattataatatatattatcatcaaaaacttagataaaaaaatcttcttgaatgttgaaacagataaatgatctattaaaataatttttaaaggtgtaccataattttttctattttaattgtaccttggggctaaaaaaaatatgtaatctttattaaagtaaaataaataaattttcatctgatcgtaacatttttatatttctatttctggtgaattcttacatcttttgtattcagaatgctaaattatttaataaaaattgatatttcatctcaaaataaataaa

SEQ ID NO: 293521 - DNA, 650 bp, Cannabis indica
ttgagggattcggatagacgaaaccctttcggaagttgagcctgccgcacctctgcagtaaaaggcgaggtgccatgcagcttatatataggcttacgctgctgctcgagcatctgtaaagcttgcagaagcatgctttggtcgattcctcctgtcgcaggggctggagtcgctgcgactgcggggctcgcaactactgcgacaaggtttgctgggatattaatcccagtggtcgcgatcggcgcgataggcgggttattatctgcgttgacaccctgatcgcccgcctggggatcacggagtgcctcggtattatgtgggccgcgggagcgtgccctgaaaactgcgttgagatgatcacgtagatcacctcggtgtacttgataacgtcctccctgttgtgtctgtacagagccggaccttgtatacctgctcggagtgcgtccatgcgatgacgaagaggctgactctgcgtcgttgtctctcgatggtcgactgcgaggattacggcgctcaggatcttcgtcaatttgtgcgctctggtttggaaaccttgcggattgatctcttgacatcggatggttcaggtccagagcttcagggttagttcttcgttccctgcgtacacggttagtatgacgtctagaagt

SEQ ID NO: 293522 - DNA, 570 bp, Cannabis indica
atagtggtttagtttttttttttttttaggtctttttatggtatttgatatgtcatatatatgtaattaggttttcaaatcccatatttaatgtttttattgtttaggaagttttatttgtcattgatgccgaaaaagtcgccggagtagcggtcagtgtcagaaaattcgtcggagttgctgcaggcgccagaaaattcgtcggaattggcattgttgccgaaaaaatcactaagaaatcggtttcttaatgaagaaactactttcgtagtgatttttccgttgacaatgccaattctaacgacttttctgatgctagcagctactccggtgacttttccggcaccgacaacaaacttcagaaaagtcatcagaattggcatagtcgccggaaaaattaccaagaaaggaactagtttcttggtgattttttcggtgacttttatgatgacaatgacaattctgacacttttctggcgttggtagcaactctgatgactaatacactggcaactacttcggcaacttttcagtaccgatagtaaagtttgggaaattcgtcagaattgg

SEQ ID NO: 293523 - DNA, 555 bp, Cannabis indica
ttcggttctaggtctgggtccgggtccgggtcctggtcacggtcctagtctctttctagggtccttgttcgacgattcttgttgaggttctaatttttggtcccaagtttaggtctgggttcgggtttggttcatcgtcaggattttggtcatagtatgagtcccagatctaaacactgactactggtctatttcaggccccatttacctgaatcccgagtcaagatctggatcaatgtcacgggtctcggtctggttctagtcatgtcccaggtcccatttctgaattttggttcgggatcgagactcaatgtagttcaaggtcccgaccctagttttgtgtccctagtctggttccataattggctcttagttcaggttcaggttcggctccccagtccaggtttgggttgggatccgggtcaggctcccaatttgggtctaggtctgatttgaagtccgggtccttatccatatacggttctggatctaggtccatttcagttatgattccaagtccaagtcctagttccagtcccgctcaacttccagttt

SEQ ID NO: 293524 - DNA, 657 bp, Cannabis indica
tttcttcttcctcttcaatggagtcacctgctcagcctcggcctcagcctcatcctcaggatttaaaggctcttgagcatactgcttggccctgacacgtcccttcaacttagcctctcgcttcagttgaatcaactcattctccggatgagctcgttcaggccggccagcaacggacttcctcttcttccccgcgacggacttaggagaaaagtcctcagagtaaagcccatacttcaccagattatcatcggaggtcaactggatgatattcctgtcttcctccggcaactgggcaagtttttgacctctatccctaagagcaaaggtgagggaggacggtgatatgtcagaatctgctgaaactgagtccgggtgatgctcggatccttcaccatgaagtactcatcaacaaaacaccctattttgctgatggtcttgtcatctgtgccgctcaaccacttgaagcctggctgagagaagtagaagtaccccgacctgccttacttgggggtagacttcaggtcgaagaaccaggcaaccttgtgggggaagagcatcccatccttgggaagcgtagaggcgaagagaaacggcaaaatctaaatgccctttggagtaattgggtcgggcagaggccaaagaagtctgccacat

SEQ ID NO: 293525 - DNA, 749 bp, Cannabis indica
attgatgagtttgacctgcaagataaatccagatgctatatcttgaggattttgcccaacaacacaatgaaccattctattctgcttggaggagatttaaagagcttggagagagatgttatcccactttctcaagtggatgttttacgtggctcttttataatggacttaatgatgaaacaagaagctgggttgattatggagcagaggcaactggagcgcctctattaatgagaggctatgatgtaataaatctgttgaataatatggcagattttgattacgactggcattgggatccatcacttcagggttggagtcaccaatacccaccttattgcccaaattcatcccaacaaactgaaaaagaggagcaactactatcacttctacaatcacttccaggagagattaatcgcttaactgacatggtgagatccttatgtgataattcaatgactcatgattcagaatgtaataactccaatgatgaaagttatgagagttgttggtacaatgaagaagggtcattatttgaatacaaggaagataatgagcctacaattgaagatcaagatccttgtgaagtggtattaactcaaaatttggctacatcagattcttacttggtaaataatgaatgtcgcgtagtgaatgaaatcatggaagagaatgaattcatccatgatcatgaaaatcattgaatatgaaatcacaaagcaagggtatggatagccaagtggagagtg

SEQ ID NO: 293526 - DNA, 841 bp, Cannabis indica
tttcataattaaacgtgattagctgctaatttccaaattaaactaagcggtctttacataattattgttttaaaaataaatttaattaaaatattttttttggtaaatttgaaataaaaaaaatatataattaaaactaaattttaaatagaataaaatagaaagataaaaacattaggtatggagttaggtttggagtttgttagttgaacctacagttaataatattaaagattaattataaataaaaaaatatattaattttggtctagttttcaagagttgatttgagctattggattaaatcaagggctataactcactatccctattgataggtaaaatacccaatccctaccataatagcccccataatacatgatttttgtataggatcggttctactatttttaagcataaaccccaatttagaagttatatatctattctataaaaagtgtgcctatataacagaattcttagtttatgagaaattcatgggtgactttttatttatattaaaaataaaatgatttatgagaaattcatgggttcacttttttatttatatataataaaataaaatcctattaaatacaaaaaatacgattgggtttttgttacttaattaaaattccattcaatataaaatcattttaacaataatatgtgaattaatgtacacacaccatcccgagctacacctagccccaaaccatcgatccttcagacgcaaagatcgtaatcgcaccatcaacatttacaccttaatcttattcaaaacagattatcatccatttcaaaaaaaaaaaaataaataaaaacccatatatatatatat

SEQ ID NO: 293527 - DNA, 560 bp, Cannabis indica
catttggttcaactatattcatatacaagttcagaaaataacagtaagtaaacatgtttgcaataataccaaaataaaacacattcaaagattttctaaggtttctaacaaactgatacagtgctttgttttagttgagagtcaaagatatcatccattgaatagagtagtcaactcatctaaaatggaaaccattctagcaaccttttattcgatcgaaaagagaatccaacgttgcttcgttttagtcgagagtcaaggtcattcatatttcatgagcttctatcattgtttcatactttgtaagtcctactcttatcagtcactattcggatggtcgttactaagaataaaacacttacaataatacttatctttcaaaattctacgacgttaaattgctaatgaacgtccatctgttagggatgaatctcactaaaacaagaactatgagaaccaacaatggagatcgaatatctctttaattaaagctcattatttaaaaaatatattttttaattaatcacttattttagcctatatattttaataataaaaat

SEQ ID NO: 293528 - DNA, 719 bp, Cannabis indica
ttatataaaataattttaattttgtaaaaaaaaaatgtaaatattataattaaatagtttaattgttaaaataattaaggtaagggatttatatataaataaaaaaaattatttaattgctaaataaaatatagtatattataattaattaaatctaaaaatggaattttaacctattggtaaccttctattataggtaaaaaaaaatgtaaccatatggttacaataaaaatgtaaccagtgaatagtactagatgaaagttacgttgcgagccacgtaaatattagttttatttaagttttagtgaattttttttttaaaaaaatcaataactaattgtaaattatttttttaaaagatttgttttataaaagtaagcttgttaagaatgtcataattgtatatataagcttatgatgtacacattgttattaataatactaaaaaattagtaatattagaaattaaaataaataacctatataaaattggaaaattgtaagaaaaaagaatgactaacatgttaaattagaagaaaaattcttttaaagaagaagaataaaatttgtataaaataataaataaaacatattttgaaaaagaaattttacaaaaataataaataaatacagtaggaatgaaaagtaaaattaatatataaaacatgagaaataattaaaaacataaattaaaaagttgaattataagaataaataat

SEQ ID NO: 293529 - DNA, 611 bp, Cannabis indica
agaacaagaaagaaaaaaaaaaaaaaataagaaaagaaataaaaaaaaaaaattaattaattagttttgaaagttatttaatcatttattttttttatttttttaaattattttaaattaaaattatgatttggaccaataaattattaatacagtatttttgagagcaacaaacatagcagttcagttaggtacttactataatttttaagttagaaaacttatctacattaatgttaactttttaaagactaccgcaatttaatatcaatgcgttacatttttggaacaactaacagatttattaaaatgaaaatcaacggacttacaagaatctcaatattggggccattgccgctattttttaaatttaaaacttatctacattaaaataaacttttggaaactttgacagaaattttaccttaaaactattatagtgtcattaaagcttcacaataactggcttatctataactttaataaaaatgagaatgttaatgggcttatactaattgaattaccaaaatagcatttattaaatatgaaaatacgaaaaagaaaactcccatttagcaaatcaatatcaatcaatcaatatcaatatatat

SEQ ID NO: 293530 - DNA, 607 bp, Cannabis indica
cttcttattagtgtaggagtcatatttttgaaaataaaaataaaagaatcttgcaatatacatcgttttgcacattgttagggtttagtatgtaaaatcttattaagaagcctgccctcttcttcatacgcgtccatgctcagcccgtttcttttatattttaacactcacagctagttggttgaagtctcactaatagctaggaaaagaacttttttatttgagaattgagacattaaaatatataacttttttataagaaaaaaaaaacaaacttatatagtcaagtaaattacttatattacacactagattaaattgagtttatgcaataattctcactagtttaccaattacgcaattatgttatttcaattagtataattaaggtcaaaaaaaaaaacgaacacaggtgatggttatatatgcaaaattagtagtgattttttatttgaaaattacatcgtttatatcagatatacatatatatatatgtatatctattctctataaagtgtacctatataacagaattcttggtttatgagaaatttatgggtgactttttatttatattaaaaataaaatggtttatgagaaattcatg

SEQ ID NO: 293531 - DNA, 508 bp, Cannabis indica
ctccatacatccgaaactagcatactttgccaatattatggaaagaacataacacttatccaaggtgtaagtatactttatcgctaactatcacatcattgtaaattcagatcactgatgaatcaagggacattatcttttgaagcatataatcacaattaccttccactgtgttgacatcactgtaattgtgaataactatatattctagatttaacagattttgtacacattaaaccataaacatgaaaactacatgtaaatataaatgacttctaatcttctattgataacaaatacagattgtattgaaatgagttttatttagggcataaaatcccaacaaactcccacttgcactaacataaaaacaagtagtgcatttcaatcaatctattgtcttgatatacatatcaagtgtagtgtacttgactaacccaaattcttggaactgtaagtctgtggtaagctactgctctctccaccattacttcctttgtgttcataa

SEQ ID NO: 293532 - DNA, 666 bp, Cannabis indica
gcgctatctccagggtactattgataaaggattattctattctaataattgtgggtcacaacttattggctacgcagatgcaggatatttatctgatccacataaagccagatctcaaactggctatttgttcacttgcggtgacactgctatatcctggcgatcaacaaagcaaactctggtggctacttcctcaaatcatgctgagatacttgcaattcacgaggcaagtcgagaatgtgtttggttaagatcaatgacacaacatattcgaggaacatgtggattaacatctaataaagaagtaccaacaattctctatgaagataatgctgcttgcatcgctcaacttaaaggagggtacattaaaggagacagaactaaacatatttcaccaaaattcttctttacacacaatcttcaagaaaatggtgatatcgatgttcaacaaattcgatcaagcgataatcttgcagacttattcacgaagtcattaccaacatcaacttttgagaagatggttcacaagattggaatgcgtcgattaaaggatctccacgaatgccaaaatgagggggagtaatttcatactgcactcttttttccttgaccgagttttgtcccactgggttttctcggcgaggtttttaatgaggcagttattat

SEQ ID NO: 293533 - DNA, 586 bp, Cannabis indica
catcacgctgaaaagatctttcatctttcagatgagcgacttgtcggatagccaacagctcggctctggaggccgtgcgttcgatggcgaagttgaccaggaggaagacagctttctcccaacctcgatttcaaaagaggaggctgcaccaatagagctaggcccgatgtcttctgcagacatcgaaaggatggtgcgggaacttgccgagcctgggtccatcgacattcgagatagcgagtccacagtgtcggcccgcgactaccttattcactcgaggcatgctcctgacatcgaggtcgaggagatggacgatgattggacggccccagctcgcgagtcaggcgaggatgaagaggaagcagaagggagcgggacagactcggttgacaacactcagctgaatgagcccttcgcgtgtgaagatctaatttcgagggtttccaaatcagatttcaccacctttgtgaggttaaacttgctgcgacttgcgtttcagcgacctaaaccgtcccagagggtgcatcttccgtttacaaaccctgcgattattcccacagaggatgtggtagtctcaatacccatt

SEQ ID NO: 293534 - DNA, 255 bp, Cannabis indica
agctccaagctttgagttcaaaactcaaacctggttaaatctaactaacatgcattaaaccttgaataaaattacataatcaagcctatagaaactgcggaaaccaacagcaagcatcaacaaaagcaacagcaacagattcttcattttttctttttttgagtaaaacttccaagcttgaaacaaagctacaatcatgcatcaaacccagctctactctactcaattaatcatgctttaaacttcagaaacaac

SEQ ID NO: 293535 - DNA, 623 bp, Cannabis indica
tttgtttctaaatcttctatttttcatacctaaaactatatacctgaaaagatcacatttttcctcattttttagggtaaaccgaaggtagaggtagtggtggtggtggttatacctccggccaccgtttttagtggagaaaacattgtatttcaacgtctattaaggtataaatctaatttctactaattttagtaatgtacattgctttattttttattttataaattttttagggtttttctatattattaaatatgtattatgttgtattgaatatgtattgtgtgtatatatattgtgaatgagaaatgtattgtgtgtatatatattgtgaatgagaaatgtgatataggagagtatatatgtatgtattttatgttgtattgaatatgtattgtgtgtatatatattgtgaatgagaaatgtgatatatgagagtattttatatattgtatatgtatatattgagtattttaaactaatagttttgttaattaaatattgtgatgagaatgagataggagagtattaaaataaaagtttagaaattaattttataaaattagtttagaaattaactatattttgtattattttttttttcctattttcaattttat

SEQ ID NO: 293536 - DNA, 787 bp, Cannabis indica
gtaaagagtaattttaagtaggatatgggacattcaatccaatttaatatttttttccttatctaatccaaatctactaattagatttgaaaaattatcatccgatcaaatttaattaaattctaaaattcaatctaattaaattaataattagatttgatcagttttttaattgtatatcaaattacacacctaattttttgatgttaacttaaaagaatgaaaaaaaaatatgtaaaatttaaatttcaccatttatttaaggtgacgtttggtaacactttatttttaaattttttaatcacaaaaataaaattaaaattttgtttttaaaaaagaaaaatgtgttctataataatcacttttatttttcaattttaaaaacaaaaaacaaaagtgtgtcttgtaaattttattttcattttcatctgttaattttatttaaatcgagtccaagactgagtccgaggtcgagaccggcagcaggtccaagtccaggggccgagtccaaattcaatttccaaagtctaagttagggttggattacaaaatattaattaagaaagttgtttaaaaaaaaatttgaaaatgatttctttttgttttaaaatttagattattaattaaaaatattaaaaagtaaaaataattttatagaacatgactttgaaaaatattttcacttttataattttaaaataaaaaattaaattaaaaaataattaccaaacgcactttaagtctaacactccataaaaatatatatgtttaatactccataaaaata

SEQ ID NO: 293537 - DNA, 675 bp, Cannabis indica
  modified_base (40)..(40): a, c, t, g, unknown or other
aaggtcaaataatttaaaaaatggaataatttaaaaaaanattaatatctgaccttaaattttaaaataagataaaataatcaaatttaaaaataagatagataatttagccaaaattagatatttacctatttacaagttcaaattacactaatatcataaattaaatttaaaaaaaataattaatttaattctgataattagaattgaaataggaatagtaaatatctaaatacaaaactacacaaaaaatcggaagttaattccatgaaaaagcatgaaaaaaatgaaaaattgcaaaaaaattgcatgtggtacggacagtatgcaatgcatactgtccacacgcacgaagaggagggcatgaccgagtggacacggcgcaaaaggcttcaagcagcctcttcgcgcgcgcccaggtggtcttcaaacatcccaacacatcaagaccgaggtttctcggtcatgtgcttgtcttagcgcgagcagccgagaaaaatagggccatccgctcgcgtgaatggggtgatgacaccctgattttttccgattttcaaaaattcataactaaaaattcaaataaaatcgaaatttagttcagtaaaaaagtgaattgcttaatttttttccaaagtatccaataaaaataatttcagaaatgaaaattaatattat

SEQ ID NO: 293538 - DNA, 483 bp, Cannabis indica
agacctagacataaaccgaacacaaactcagacccgaactcaaacccacacctagaatcagacccaaagctagacccgaacctggacacggaccaaaactcgaacccagacaaggatattgggattggaacttgggactccgacccaacctagacaaagacctaggacgcgaacccacacccaaagcctgatatggacctagattgaaatctagatctgaaccctaactcaaacttggactcgaactccaacccgaactcaaacccatacttgaactcacaatcgtaaatggaactagaaccaaaaaaggactacgaccaagacaaggagctaaacccaaacccaaacccgaacccagatcaaaacccagacggagacctaaaccagaacctagactaggactcgaactcgaacctagaccgagacccaaacccacacaataactgggacctggacctagaatcaggatagggacctgggaaa

SEQ ID NO: 293539 - DNA, 587 bp, Cannabis indica
caaatgcttcactccttcgaaattgcatctgggcaaaaggtgaatgtgactaagtcttctatttttttcagccccaacaatgcaacaccaaaccgtaatgagatttgtaatgttcttggcatgacagaagctactgatggctctctttacttggggctacctaacattataggtagaaagaagactgtgatacttggcttcctcaaaaacaagattataaatcggctcaatagttggaatggcaagttcctatctcgtgcaggcaaagaagttctccttaaatctgttatccaatctcttccaacttatgctatgagtgtcttccttcttccattggaaacttgtcaagagattgagaagcttatggctaacttttggtggaaaacttcaagtgctaaaggtcaaggaatcatatggatgtcttgggatcgtatggcaattcccaaacattctggtggtatgggcttccgccacttacatgattttaatcttgcgatgctggccaaacaagggtggcggtttcttgtctcccccacatcccttgccagccgtgtgttccaagccaagtactatcccaactctgattt

SEQ ID NO: 293540 - DNA, 640 bp, Cannabis indica
ttacaattataataaaaaacataccaataatataaaacattttatatatgtgtttattttattttctattaattaaacatactaatttaataaacaaaataataatattcacataagtttattatatcactctatgtgtgttatgtttattttttagaaaataaataatatatatataaaaaaaattgtttatctttatctttttctttgtttattgtgtcatgtttattttttctaattaaataatttttggagtttataaagttatgtttgtttatttattttttgatgtaagaattatacttcaatagaaaattcgttcactaattcattagaaaataatcaatatatagaaacaatagaaaaaaaatatacttattttagtatagtataaattgtctatgtctatttttatgtttacaattataataaacatactaataatataaaatactttgtatatatatgtttattttgttttctatttattaaacatactaatttaataaacaaaataataatattcagatatgtttattatatcactctatgtgtcatgtttatttttagtaattttaagtattgatttatatttatatacattaatgtttataattttgatattgtattttattaaaaa

SEQ ID NO: 293541 - DNA, 73 bp, Cannabis indica
ttaataagtcagtgaatttaggttataaattcttgatctgcttattggaagctcggttatatagacccatggt

SEQ ID NO: 293542 - DNA, 551 bp, Cannabis indica
attcttttaataaatatataattatttatatatattgccaattataacgaattttttagttttaacaatatttaaaatcaatgataaatgatggaatggaatataaataaaaattgtgattaataaataaggattaaggtgttatatatttgtttgtctctgattagtgcaggatattacaaatgcatatctttgttctttcttagatattttaatctcacattctaatcagagttataatgttctagttctttatctttagatgtttatcaaatttgatagcctaagttacattctgttctcaaagacttagatttttttgttttgttcatgactcttttggctttgtgccctttaaatagaaggacattttcataaactaatctaaaaaaaaatacaaaaatagggttgtataaaattttaagccacttctaaccgtttttaaaattttatttacgaaaaatacgaattattggtatttttttatatattttatgtcgtactcatgttattttgttattaatttttgttatttgtatattattttatat

SEQ ID NO: 293543 - DNA, 656 bp, Cannabis indica
taaccaaccgcctcaattatgacaccctcagccacaacattgtcaatgttatccgaacataattttacacattgacttacatcctcatagtccattggttcttggtgttcatagttgccactcggttcttggtgttcatagttgccactcggttcttggtcttcattttccaagggttgttcttgttcttcatagatgtcggtcggttcttggtcttcatttgccaagggttgttcttgttcttcatagatgtcggtcggttcttggtcttcatgtcgctgttcatttctatattcattgtctaaggcttgaagctcttctgtttgtgcatttttttgtgcttttagcctttcaatttcagcttttaatcttttgatttcagcgacatgttcactatcgacattgacctcaactcttttctttctttgagttctaccaaacacggtagaaatcttggcaaatgacctgcaacataatgtaccaacttagttagactctaaaatatatataaaaaaaaagaagtaatatgactcaattaaagaaacatcatacccagcagctctaacacgacctgggtgctcaggtgtgcctaaagcttgcgttaagatatcattccgacccttagcttcgatttcaccagtactaactttctcttt

SEQ ID NO: 293544 - DNA, 720 bp, Cannabis indica
tctattattattattttgaaaaaaaaacatatatttaattacaaagtgtatgaactattatatttatagttcaaaaacatttttttatagttattgtagagaaagtagaatttactgaataagaactataattttcataaaaaaagaagaagaattattatgtaatgatccattttaatttagtgaattacgatatttaattacatatctcattaaatgactattaagtatttataattatatctccatcaatatattttttaataacatgttaaaagttaatgctaaatatgtatattataatagttcatgttcatatatatatatatatatataaataatttttaataaatataaagtgaatattaatttactgtttctttctttaaatgtatttttttttctttttttttcttttcttaaatgatctttagatgaagttaattatacaaacttatttttgtaagaattaaggggggctagggtcacccagcgcatagtgtaccgtccgcccctaacctccaatattgacaactcaaagttattcatcatagttccacatcatattaaattaatgacttttagtaaaaaatattttttttctaaaaaaaaaacaataaataataataataaaaagaaagaaagaaaatagtcttgtggtcatggtctatattaagcaacactttagataaattcctcttaaaaattgaaccatcaata

SEQ ID NO: 293545 - DNA, 626 bp, Cannabis indica
atgagtgatttccttgaccgggacgaaggtttcatcaagcttgaggaagccattcaacgagcagaaggtgagcaaaagccaagcaaaatgaaggatcctcccactggaacgtccgcccaacttccccatgattccagcaattcaagtggcaagcgtccaggcaacaaccacaagcaaggaaacgggaagaagggaaagttcaccgaaaagccaggacagactccccgtgatcacgccaaacacactgcattcactatcttaactgaagatatagaaagtgtgtacatagcaactcagtcgttaattccgtacaagaagcccgggcccatgaaaaaagataccagcaaaagggacatgacaaaattttgtcggttccatggagactacggccacgacaccaacgaatgttacaacttgaagcgggaaatagaacttctgatcaagaaaaacaacccgcacttacagaagtacgtcaaggccaaccaaggtcagaataaccaggatctgatgcctccgccaatagatggacacttgcaagtcatcattggaggcccgcacatcgctgggacacgggcaaagctcgagaaagatatgcccaaaaagctcagcacgagcaagaagaagtc

SEQ ID NO: 293546 - DNA, 592 bp, Cannabis indica
ttttgttttgatattatttttataatattttttaagatcatcaaaaaaaaatttaaaaaatatcagtgtatatttttgtaaaggataattttataatttttttgactcatgtggacccaacgcgcatggataatttcagttttttttttttttttgttatttcatattagagagagtgaaaaaaagctatatattatttcaaagaaaaagctatatattatatttattaactaatcctttcgaagatagaaaagaaaaaggactgtatatgaatatattgcatagtaaaacacattaagctaattaaacgtattcataagatcaaatttttaacataatccaaatatagaatataacaacatgtttttttatgtgaaggttaaacataacaaatggcatagtttagtctccgtataacacaacaacgatgtgagttcattaattttgatagaaacaatgcagatttgaaaagatttaataaggagacaaaaatcccaaaatgttagaaaatgaaaaattaatcttaaaaattggggtatgatttacgaataaaaagaagacccaattggatcagaacctgaaatttggggac

SEQ ID NO: 293547 - DNA, 526 bp, Cannabis indica
ggaatagtgattccttcttcaacaattttccatagattttgtgatcgaaaataggtcctcattttgatggaccaaaaatcataattttcttcatggaaaattggaagaggtagtgaagagcgattgtacttagaactcatgtttatgactagaaaagattacgcccagtgatatatgatcgaacggagctctgataccactgatggtttgagaataaatttgtattggttttgtttagaataggtggatatgtagttaatagtttgatgatgttgataagttggatgattggtgggataaggaagagttatgtagtgttttaatttttatgtgtgtagtaagagaggagacaaggtagtaggctagtagtaaaagacttgctttggctactcaagcttggttacaatttggaagcttgatggggtatttatagttgctcaccccttacactttatggctagaattatttcttctagatccttcttttactagaagaaattatatccaaacaaatctaaatgtttct

SEQ ID NO: 293548 - DNA, 592 bp, Cannabis indica
aaatccataaccattcctatgacaatattcaacataaagtaattaaagaggaataaagaaagaaactgttggtggatgaattctggatcttcaatttgaatcactctgctcttcctgccgctctctgctgtgttttagggttccaaatcgcttcccctgacttccaatcgcagttttccatttataactaatttttagggttcgatggacaaaaatacccctgggccgtacgggatctcgccgcgaccaagcttcctctcgccgcggccagatagttgcctaaaaatacctttctgtaagtttcaaatggccgcggcgagggtgtatctcgccgcggcgactgtagcctcaaaaacctgcttccctgcttcgtgatctagccgcggccaagctgtatctagccgcggccagatatgcatctttcctcaaaaagtgtttttcttggctcagctcgtcttttattggactttttcatcccgagacctctattattccaaagaacctgaaaaacatagaaaacaagcgtaattctgtcccaacacagtgaaaaacgcacataaaatcgatccaaaatataggctaaaaatagcct

SEQ ID NO: 293549 - DNA, 590 bp, Cannabis indica
agtaaaaaagtcagtaagaaggctactaatgtccttcaagcagacagtgatgatgattttcagactcagaaggttgtggcggaagttgtttcaagcaagaaaaggaaggctgttagtgatgacgctagtgcgtcaaagaaaagcaaaactaaggatgcagtggaggattctaatttggtatgtctttttttttcttatattttttttggttgttttgtgtattgtatttgttggacaaatgtttattttttagttgtatatatattatctatttgtttattttaatagttttttttttcattttcctttaattgtattgtgttttatgttttttaggataaagtgtgtgaatctaatgttgctgatgatgagaagatggctaatgttgataagaaagttaaaaagaaaccagtttccaaatcccttggcaagaagaagagcgaggctcctgctattgacgctccattggtaatttttatttctaaagaaaccggtttcttgcttttttatttttcatgttttcaggttttctgtttacagttttatttgaatgtggtttctataatctatatgtttttatttttagtttt

SEQ ID NO: 293550 - DNA, 505 bp, Cannabis indica
atcaaagaggaggaagaggtccaggcaggttcagaggaagaggtggtggtaggagtaataactcgaaaccgacttgtcaggtgtgtggccgctatggacactctgcagcttattgttacaaccgatacgatgaaagttacatgggttcggatccatctgctgggaattctggttcgaatggcaaaggttctcaaggtggaaacaacaatggtgcttcggcctttgttgcaacacctgagatggtggaggatggagcttggtacgttgattcgggtgctagtagccacatcactgcagataccagcaacatgactcaaaagaatgagtacaatggtgaggaaacacttactgttggcaatggtaatcacttaaaaattgctcatgttggtactagctctcttgtttctgttgataacaaatgcttagttcttaataatgttttacatgttcccaacatcactaagaacttgctgagcatatctcaactaacatctgagaataacgt

SEQ ID NO: 293551 - DNA, 468 bp, Cannabis indica
gagtttctagatttgttcaagaccttgaaatcatcattaggaaattcaaaatctctctctggttcattcattatttgtttgatagatctgatttgtaagtttttttaatattatttttattttgcatattgtaagtgttgatttgaatgtggaaaatataatggcggtgcttgcagtggtggtggtcttgtcattgtggtggtgatgtgatttcagtgttgtggttttggtgagggtagttttatggtgatcgtgtaatggttgtggtgtaacagaaaaaagagggagtgaagaagttgagggaaaaataacttttttcttttaatttaaaatattttttagaaaagaaaaaacgctaattaggatttttgcccctgaactttgacatgtaccaaatcatgccccctgaacttttaaggtcattgaaaatgccccctgaactattgagattgttggattcaaggactt

SEQ ID NO: 293552 - DNA, 361 bp, Cannabis indica
ggagcatgctgtaagtgccatgttgatcagagaggaaaacaagtattcaacatccggtctattacatcagtaaaagactcaatgaggccgaaggccgatatccattgatagagaaactcacgtattgcctgattctagcaacaagaaagctaaggccctactttcaagctcacgctattcgggtatacaccgaccaatcgttacgccaaatattgcaaaaatcagatgcttctagacggttactcaaatgggcagtggagttgggccaatatgagattatcttccaacccccaacaacaatttgttggaaatattttactaggatctagatttactaacaaatatgtttcattaacatcct

SEQ ID NO: 293553 - DNA, 716 bp, Cannabis indica
actgctcatcctttgtcttgcccttacctacacatgtaaatatatttgtgagtcgataaactcaataagaaaagcataagcataaatatataaccagaccgtaaccagacgctcatacacctaatcacgatcctatcttgcgtccgactcgtgtaagtctagaaagttcgtacgataatatgattgaccataatattagtctatactcggtactctagccgatgtgatagcgtcaacccatacttaactatgttgtcaaacatatatccgtcgatattcagtgtaactctatgtgcaccaatactgctcttactgatatatgatctaataggcaatcgtaaaaacatttacgctgaatttgtatgcatgtatatcattataccgatcttgcatcaattctgaattcaggtgtgccaatctacttgagtagaaattgttgctcgatgacttaaggccataagtcacaatttacgtaaaactagtaagtgacccgctatgtcactttagaggatttaaactcaaaaccaaaagttttcctatcgataaacaaagtggcaaaaccctaaatatcgataaaacataaaaatttatgctctgaaatctgaaaatctagtgaactgaaacttcaaacagtttttctgccaaaaaagtcggtttatcgtttttagaaaaatggtggactgtttttcaaaaaaaaaaaaaaacacacacacaca

SEQ ID NO: 293554 - DNA, 516 bp, Cannabis indica
taccgagctactttttgttgatgagctaccaactttaagtttgcagttgctcgtttttcttcgatttcatcaagtgattctgcaaggagtatgtgattggtaccttggttgtacgtcaaccttctgtgggatggtcgctccagttcgacgggcagcatagcttcataaccgtacgccattgagaatggtgtctgaccggttgttgttttttccgttgtacggtatgaccatagaacttcggggagttcttccgaccaatttcctttggcatcttcaagtttcttctttagtgtgtccttcaaggtcttgttgactgcttcaaggtcttgttgactgcttcaacttgaccatttgcttggggatgtgccactgtggagaagcttttgacgatgccatggttcgcgcagaaatcagtgaaagattgactgtcgaactgcttgtcgttgtccgatactattttgtacggtagtctgaaccggcatatgatgttcttcactataaagtcttgaaccttct

SEQ ID NO: 293555 - DNA, 430 bp, Cannabis indica
tctctaacccttgtatcctgtttatagcagagtatcaccaagatctgagcccgaatgtccttttcttgattcctagatttttcacagccttacacactatgattgagataccacttgatgtgtgtgggaactcactctatcactgaaggtatgaaaaataatgaagagagaaagagaggggctagttcgaaaatagaaggaaagatggctcaggaaaatttgacagaaggtgaaattttcatcatctttaagtgtaagccatcactatctatttatacgcaaccacctaggtttaggttaggatttattacgcattaaaataatagaaaaattaaatgaaaaaaaccctagtaagtggtcggcatagtaagtgggccccacttggaaatttttccacttttgacaattttttttccttattttctcaaaa

SEQ ID NO: 293556 - DNA, 500 bp, Cannabis indica
tgattgtatgttccatttcgattttactattgtaagtaatattttgatacctataaagttctttgataaagtttcacactaccttaattgagtgggagaattttaaagttctatacccatcttcatcaggttgatacttgtgataggtacttaagaacactactgaaaagcaaatctaaccatacatgtaaagaccgcgtatgattaataccttgaattattaaataattaaggtttatgtatgagattaattaataattatgaaatgtgcattttggaaatatatttaatatcatatatgttattatgctatttaatgtaaattacccaatttctgtgtttgtgttcggaagctgtggaaagcgacgttgggcctttagagagtcatattttgtatttctagaatattagtggggtgttatagttaaattttagagacgttagaatattcggggtttgttatttgaccaatttacccttgggagtttatagttaattta

SEQ ID NO: 293557 - DNA, 818 bp, Cannabis indica
taaacaattgttattcattgaataagcccaaatctaattgggcctaaataaaattacttatgtcaaattttattttagcaacctagtccatttacttagtaaaacttaaatgggcttcctatatgcatctaagcccaatagcaaacatataggctcacacaggtcaaatgatttggatgggccctatcatgttactaggtttacacagatgaaagaagtacaaaatttacctgttacaaattatttataagatctattgacaattggactatgattaaaatcagatcattggatctgtcaacaagttaatcatagcaatttagatcaaataaataataggtttgttaaaaaaatttttgaataaacaataaaattaaacaaacattgtccatgtaacagatgtgaaataagatattaatataattaaattattattcttaaactaaccaactaaattttgaaaatttagggttgttaaaacaaaccttaaaatctcaaaatttaaaattcaaaattgaaaactaatttaaaatatctaggtttatttgaattatttttatcaaattaaattaaatatcaaataagataaatgatttgaaaaaatatcttcaatatcatcttctaatcttataatttaataaaattaaaaataataaaataaacgaactttaaaatagatgtggttagataattataattttaagaataaaataaaaaataaataataattatcctaattaagcaatatatgtcaaaatatctcaaattaagcaatattcaaatttctacaaaaatatctaagttatttaaatatttaa

SEQ ID NO: 293558 - DNA, 641 bp, Cannabis indica
cccatagagcgaggactcgtacagatcctgatgagggaaatacgacaaactgctctcggggggaaagaacagagtgtgaagaagcaagtgtgacttcgaggcggtcaagaacccacagtcgatcaactcgaagaggagaaagtactcaacgagctaatgatcgagaaagtatgggaaccagtaaatctgcaagccactcaaagacaaagtctatgagtaggacgcgatcatttagtaaatgaggtctgccaacaattactcccagccgatctgcgagagcacttgaatcagaagaaacttgatcttcgccaacaacttggtccaaagcaagaggatccaatccaattgcagataaacgagctggatgacaagttcaatagatatcaagtgggggaattaggaaaactatctggatatgactttgacgaggagcttgagccgtatcatctagacataatgaatacccctttttcttcaggattcaagaacccgcatgtctcgtcatatgacagaactactgattcggtctcgcatttgaataactttaactggagagaccaataactggcgaaaccaataactggagacataaaaaggtcgtgagggaattagggaataaaagtaattagggtttttttttt

SEQ ID NO: 293559 - DNA, 573 bp, Cannabis indica
ttaattagagaaaagaaaaagttattattatttgagagtgtgtgtggaagttaagtagtaattaggtatggaaacaaaaaaggcatccttcagagaaatcttgatggtaactaaaatctttttcttcttcttcatcttctttcttctttaatcgatcattcatgaattctttatttattagtgaaagagaattaattaactttaagagagtgaagtaatgagtgagataaattaagtataacacacatactccgaaagcaataacaaaataaaccaaagtaataattctagttttctgtacaaattaagctaatgactttataattacaagcgaaaatagattgatcatatatatatatatggctgttttgcttatgccttgtacagaaaactagattggaaaatttcttattgatacaacttaaaatttgaattaattaattcaataatttgattaagcaaaattataacactaccattttttattacttattaatcttgttattttaagatttattattattattattattatttttttgacgaaagacacttcattttttttattttttt

SEQ ID NO: 293560 - DNA, 438 bp, Cannabis indica
atcaaataccataaaaatacctaaaaataataataaaaaaaataccatataaattggtcaaatttaaaagtgtcatatttaagtaaacaacttttaaaatcctataataaatgtaggtgccgtttggtaacacttttattttttaattttttaatcacaaaatgaaagtaaaatttttatttttaaaaaataaaaatgcgttcggtaaccacttttgtttttcaattttaaaaacagaaaacaaaagtgtgttatgtaaagtttattttcatttttatttttgattttatttaagtcgggtctaggtccggggtcggattcggattcgggtcagaagatgggttcagtaccagggccgtggggaagggatttgggtctgggttttgtcggagtccaaaatattgattaagaaaaaaaactgtttaaaaaatattgaaa

SEQ ID NO: 293561 - DNA, 558 bp, Cannabis indica
accatcctttcgatgtctgcagaagacatcgggcctagctctattggtgcagcctcctcatctgaaatcgaggtttggagaaagttgtcttcctcctggtcaacttcgccatcgaatgcacggcctccagacccgagctgttggctatccgacaagtcgctcaatcgaaagatagaagatcttttcagcgtgatgcatgtgtgaaaaacaaaaataagtgatctcacccgcattaaaattatagaatcgcagctgccagggtagtcaacattcttgcgaatgctgaccacccaattcgtgtgcgagttaaaatgcgaataagtcacgcatcctgggccgagcgatatacctccagaaacggctaggagaaacacaatgacttaaggggcatgcgttttcgagcatgaccctgaagttactgaggtactcccacagttccgagactacctatcagccaaggagtacgctcatttgagtatcatcgcatgttgcaaatggctgggtgtatctcagtatctcaaggggcatataatcgtatatatgaccattagaatactg

SEQ ID NO: 293562 - DNA, 498 bp, Cannabis indica
agatgactgccatatcataaggtaacacgtgaaaacaaaaaatattaattttaaaaaaattattaataactttaaatatcatccatttgtttaaatctaatggtccataactaaatacccattcatggataatacacattaaaagcacacccccatatatatatttaaagaaatatatggtaaataaaatttcagagcaacactctttaattttttttctcattagaaaaataggagtattatcattaacacgagtcaaatttagagttatgaattgaaactcattgatcggaatgttaattatttctccttctaatctctccactgaagttggtaactaaaaataaaattttataatcatttgagagtggtctgtactcatttatagttaccacaattttcaaattttatacacagtacaaagaatattcactcaatagcttcttaaacttaattagaaactaatttttttcttatttgttgcatgcattagatttt

SEQ ID NO: 293563 - DNA, 662 bp, Cannabis indica
accaagccgaactccaccctcccaaatctacatctcttctttcccacataaaaatgcacctcgtgcggcttgtcagatttgattttgtgaagcatcaactaatgaaaaaatgctcctgaaaattgaatgggctctctctcgaaaaactgtttgaaaggggattccctcaccctgtcccataggttgaattcttgaaatttagccttaatcttcgggtagtaataactaccgccgcaccatgtgacacgacctgtgtaatggtccgacactggaattattagatgtggagttccctagaaaaaaaaacccagaattatcaacaattaataaaataattattaataaaataataaaaaattaaacaataattaataaattaataaaaaataaaacaattattaataaaacaataaaatattaagacaataattaataaatcaataaaacaataaaataataaataataaaatagtaattaataattaataataaaaccataaccaacaattaataaaacaataattcataattaataattaaacaataatcaataaaacaataaaattaaaaaaacaataattaataaataatactaaaacaataattaataatttctaaaaaaacaacataactaataattaataaaacaataaaaataaaaa

SEQ ID NO: 293564 - DNA, 677 bp, Cannabis indica
gttttatttctatgtggtatttgttatatgtttaagttaacattgaaattatgttctagaactaaaaatttaattaaaatattaaattattcaaattactaatagttttggattttaagacttaaatgaattggattaagtgattatgttttttttttaaaattttattaatacttgtgttgaatcatattagtataaaaaaattgtaattgaattagtacattaataaaataaaaattttcctcaaatattgacatctaataatattaagagttagtcccacactgctaatgtgtggaaataatttttgcctcttaaattttgacatctatcaaatcatacttcttatacttttttgaccgttaaaaattttccctgaactattgagattatcaaatttaaagacttttatcaaatttcattcaattttactaatttagtgattatttatgtactaaatcatgctcattagactttaatatttactaaatcacgtccctcgaactttgacatgttccaaatcatgccctatgaactttcatccatgttagactttttcttactaaaatttgagaaaatctttaaatccaacatttcaatagtttggaaaaaattttaacaataaaaaatgttaaaggagcatgattttgtatatgtttaaagttctagagacaaaa

SEQ ID NO: 293565 - DNA, 1236 bp, Cannabis indica
cggttacccgcaagactttggtcgcttccgtcatgaatctgctgatgtatgccctgagtggctcgcctggtcgttgctttacttcgaccaaatctcctaaatgcaatgggagctgacgtgaggaagagaattgtgcatggaattccgaagataaggctttccatgaactaaactttccagtagccaacttgaaataccattgctgtgcggcttctgacagagtggcggggaagattctgcagcatacgtcccctcgtactccttgtaaatccacttgcatttcaaaatacttgagatgggaaagaggatcttctctcccagtatacatcttccatgttggcattttgaacttgtgaggtagtgacaggagattgatctttggtgagaagggagtttcgcgagcacagtctaactcaagatcattattacgctgtccggctatgccatgaaacatatcttcaactcgtcaagctgggcctgtacgactgggctgactttctcggtattttggtcgatttggattacgtcagcgtctttttgagcggggatttgagtatgggctccaggcctacacgatcgttgtagtattctgtctcgtctgttcccctttttctgtttagatcgttccttaggtcataggttgttcccaacctatcaaacacagaagagcatggctgcctcagcgattgattcgcttggttgacaggtggaataatgccattattctggttggaaccgtcaggtatggctcctcctgatgaattcctagacaaggtctgctcgcctacctcttggttcacgagtggaactcgtaacctgggattgggcggctgaccattatttgtctgggaagtattcatcgtggggtcatcttccatttttcccaggggaatgacgttcagcgtttactgtcctacagtttggtaggctcttcgtatcaacacggtagcttgcccactgcaatcttcgatctctgcatggtgagctcttaatgcctccatctctttatctctccattcaacaaacagacgcctttgttcgtcaaatgcgagatttattgcagcacgcagttcatcctgatcatgatgcagagtgttgctatgactctgcatgagtccgagcgcgacacggagattttgcaattcggttgcatctccgatggttgtctgggcgttggttccaggcagaacatcgtgtatgaatgccctggttctgtgccaaactgttattcccagt

SEQ ID NO: 293566 - DNA, 619 bp, Cannabis indica
ccagagaatccatgcttgtaactgtacaccatggatttcacagattcttctttactgcacaagagatcattagtttaaacttagcgaagttcaaattataaaaagttagttaactttcccatgttgtagtaccttccaagaactgtagtaagcacctcatgatgagttttcttgagtagctttagatcttcatgttgatttttccccatatgaatgatgtaaacctgtttatttaatttgccaaaaaagttaagctttaacacacccaaaaaagaagaagaaaaagtagaaaagagttgtgtaaagggtcatactaacattgcttttagggtcagctgaagtgagcaagtattgttcacttaatagtgatatcagaagataaatgagtacatgtataagacttgtgttatgttttttcatttgtagagaacatttcattgctgcagaatagaaaagaagcttgatgagaggaagataagattggcttttgatttgtttgtgtgtagtggattcaaaagagagagagagagagagagagagagagagagagagagagagagagagagagagagagagagagagagtagagtaggagtagtgtagtgtagtagtagtagta

SEQ ID NO: 293567 - DNA, 745 bp, Cannabis indica
ataaatatcacttaaatctctctctctatatttttgttcattaatttgtaaacaatatgaatgatgcattgttatgtgtctttccaaattctttgatgtttatctaaaataattatgttttaatttattgctttataataagtataaatactaacttgtatcttcaatccatcatcaccaatccatataaagtccggaaccctagcaagatgttttttgaaatagtctccatttggatcttcaacccaacaagccagcatacataaaacctgttttaaattagaagtgtgagtaactttataaagtatacgagaattcttaggtattttgagaaataataactcaatttttttatatgatagtatacagttgtacactatacttgtagtatttggctaatattctgaaaatagattgttacatgtatgtttaatatgttcttttataagaatggaaaatatactatttgaactctaatttcaactatttattcactattattgtattgtaaatctctaaaatactaaagacagttgcatggtagtgacatttttatagcatataagcagggacagacccattaagattgatcatgtggggcgttatatagccccactaataaaaatattgccttttaaaaaagtaaatgtaatttttttaatttaataattataggtcaaaatagtagaaaagccctcacaaaattagataaatttagtaagagtaattataatgtagttataaa

SEQ ID NO: 293568 - DNA, 969 bp, Cannabis indica
tttttccttttcttttctttttctttcctttcttttttttttttttttttttttttgaacaagaggcaacatgttggatataatgatggaaatgttgctcttgtattcttcttttttttttttgcacataaagaaaataattacacaaaggctccttaataagatttgtctataaaaaacttatcccttaaagcaacatccaatcaaaccctagtaccatgtccaaaataattataaccatttctaagaatcaatgaaaattcaaaagttgttttctcaaatctcgccactcacaaaaatatgaacacttaaacttggcaaattttctaagcaaatatgtgctaacaaccatcttaccacaaagtttggcatgtgcattttgtaactctagaaaaattctaagcaataaagatagcaaaaattggcttgaaaataatattttacaagaataaatgagtaatttttgaaaaatttgaccatgaaaatattaatatgacaaaaaattaagaaaaacgcttgaatatgctcaccacccccaactaaaattagacaatgtcctcattgtttaaaaatatatacatgaaatgcatgaaatgagaacacttagagagtgagccaatgcaaaatgacatgatattgattcttagaaaaataaaactgaaggaagaaataaacaaataaaagttaaaacataccgaaaataaaagaaagcaaggaaagatagaacctgattagtcttagcaaaccagagacaagtctcctcaggtgggcttaccaactcaatattcttgactatccagtatcaaaaatgaattttcttttatcctgtgtctcaaaaatagaagcattagttacattttcaggaaaaagaaaatgatcattatctaagtcgtacaggaaatatggtaaatgactaagtgaaaataatttctaatttcctcaacggctttgtctatcacatcagtatga

SEQ ID NO: 293569 - DNA, 216 bp, Cannabis indica
attccaagtggggcccattaacaccatggccggccacttggagagggtttttccaattaatattttcattattttaatgccaaataattacaaacctaaacctagtggttacctataaatagatactgatggctcataccaaaatatgagtttttagtgattcaagagattgcctttcagaaaattgagccactcactatccttctatagtcgacc

SEQ ID NO: 293570 - DNA, 598 bp, Cannabis indica
aacttctaacttcagttgctgacttaggtcgaggccaatctcgtaccgcttcaatcttcactggatccactaaaataccatctttacttaccacgtgtcccaagaaactcacctgaggcaaccacaattcacatttcttaaactttgcatacaacttatgctccctgagacgttgtaacaccatccgaagatgtctttcgtgagactcttcttagtctgaatagtttagaatatcattaataaagacaataacaaaatcattgaacactcggttcatcaaatccataaacgctgctggggcatttgttaatccaaaggacattaccagaaattcatagtggccataccgggtctggaaagctgttttgggaatatcctcttcccgaatcctcagctggcgataaccagaccgaagatcgatcttggagaagacggtctttccctgcagctgatcaaataaatcatctatccttggaaaaggatacttattcttcactgtcaacttatttaacttccgataatcaatgcacattcgtaaagttccatctttcttttccacgaacaaaactggtacaccccaaggtgaagtactaggtct

SEQ ID NO: 293571 - DNA, 658 bp, Cannabis indica
tgttaattatccataatttcatatcaatttcgttattattttatgtgcaattttttgtttataaatcttaaaactttaggggttttattgattattaaattctcgttctattgatatattatatgcatgaaatcattgtgtatattaagagaattttaaatttaaagttttagggtttatatgattataatatgaaattatattttgtgtattttgattttattgtttttgatctacaattgataatagatttctcataattaattgtttatcaatgttcctacataattaatttcggatttaactaaggttagcattacaatttttttcttttgtgttcttcaattttgggagtgattttagccatagatctacccatttattttttaatacacgaaattaatagtgtaaatcaactagaaattgaatcccgagcaaaacccatccaaaatccccacttttcgacgaatttttggccggaaaacagttgcagacccgactggccgaaccgggtcacgtgacccgaactgctgacccgctggaggttgaagacaactcccagccgcgaagcccactcgcgcaggcggcgcgtgggggcgcgtggggccggctgggaggtccgttttcgacgatttttttttcagcgttattagaattt

SEQ ID NO: 293572 - DNA, 720 bp, Cannabis indica
aatacatttacttccatcatgcatttatataaaaataattttagaagctataaatcattttcattattgatttccagatctatgtttgagcattatttttaattttgtatttaaaagaatttagttgggtttaagttttcaacctttttgatttgttaattttatggtgttgatgaagctgtttgttgttgttttgttgtcgatttttacttttttttttctatatcgtcggaataaatggttgttttctggttttttgtggttctgtttgtcggtttggaaggtggaagcatcctaattcacttttctgtccatgaaataaaatagaaataaaaatgggtcagggcagtatttttgtaaattctgtcatgtggcaatataattgtaatatttacccctaaatctagtatttatgtaaaacctctttcaatttttttttgttgagaagtactaattacaatcttataatcaattttcacatccgaaatcatgttagaatatttatttcattttttttaataacagtattcaatttagttacaatatcatcaatataaatttgtaaaaaaaattcaaataatttacaatactgaaaataaaatcttgatatttcaatttaccactctcgttcaaagaatttcaaacttatttatgacactgtaaactattcaaaattttataaaatttaccaggataatgttgtaactataacgaacacca

SEQ ID NO: 293573 - DNA, 944 bp, Cannabis indica
tgatattccaatttattgaagctctttttagtcatgtatattgatgttacctcaccttattatataccactatataaaaccagcttttatgcaccccaaaaaagaaagtataataaataatactaatattaaaaaaagtgcatgcaatggaactatgtttttggcttcacatgcatgcatgaaaacatctcatataataataaaagataaataataaagaagataaatttttttatattctccacaaaaaagttgggttatcaacttatgtcctacattaaaagagtaagtatgaattattttaaatatatgcgttttatttattttattagtacgaggtcttaaaataaatggattattttttaaaaaaatatataaaaattacaaaaaaaaagtcatacgaaattttaaatatttttataattttatttacataaaatataaggtcttttaatgtgtttttatgttgtactcttgttattttattgttaatttttttttatttatttttttacattattttgatattattttcttgttacttagtgattttcttattgctatcatgtttcttatagaataccgtaaaatatgtataaaaatattaaacgtaaaaaatgtaaaatttttaccaaaaatagtagtttatatagtttttcctaaaataaaatcgtgagagtttagacccaaatcagagaatattatataggattatttacaaaaatatggggggtaatttttttttttatttacatggcaagcaaatttaattgcagcaaaatatgacatttttttttaaaaaagaacttaaaaatataagataaatcatcatagttaagaaggaataccataaaaacttaaaactcatatataaattttacttctatataatcaaaattgtttttgaagaactagtttcttgatgaaaaaactagttttctgat

SEQ ID NO: 293574 - DNA, 651 bp, Cannabis indica
aagacccaggacgcgaacccacacccggagcctgatcttgacctagactaaaatcaggacccgaacccaaactcaagaccaggactcgaactccaacccaaactcaaacccaaactcgaactctaaatcgaaaatggaactagaaccgaactagcactaggaccaggacaaggaccaggatctaaatccaaacccgagcccagatcaaaaccaagacagagacctaaacccgaactgagactaggacttgaacccgaacctagaccgggacctaaacccacacaataactgggacctggacccggaatcaggatagggacctgggaaacagaactaggacatggaccaattacccgaaaaagacctgaactggaacctaggacccagctcgtgacccgggacttaaaatggaaccagactcggacccgagattgggatccggatctggacccagagcttggacaaaacctgtagtcggtgtctggatttgggacccagcccaagacccgaaccctgacgaggaccagaacccacacccggacctgaagttagtcccaaacccaaaagttgaccccaacccgtaccttgtgaccctaaattggaaccgaaaaaggaagttgaccgggactggaactaggacttggactttga

SEQ ID NO: 293575 - DNA, 614 bp, Cannabis indica
atgaagaaattgtattaccttcaattatttctctgattcaatcatgggtgagtttcaatgattacagatctccttctcttcgattcttctcctctgaacgcgttgggcttttgactgaatgttgtttttgagtttttttttttttgtacaacaatggaggttggataattttttttccctttttgtatttggattttcgggatctgagtagtttttctttgagatctacatttttttagatatgattttcctagttttggaatgaaaatggttgaaaatggttgttggggttctacagctgggtcacgaagaaggaggatcccctctgtttttttttggcaggtatttttgtaaataacaacttttagtttctatttttgtttattttctctatgtaggtcataaatgtaaattttttccattttcagtttattatagaaaaaatcccgttttgggtcagggttcaacgtcaaaaagtgagagagttagagagagaagtttttttttaaaatataaaaatatttttgaaagggaaaaaatattaaaagtagatatactatttttatttggatagtatattaaattactatattttacatttaagtatactaacc

SEQ ID NO: 293576 - DNA, 482 bp, Cannabis indica
attcttaatttttttttaatttatttttgctaatttgggtgggaaaagtctaattaaatagtattaactaaaaaccaaaatcatttatataattgtgcgatctagtgtcaagaatatattataatatttaatgaccaaagaaatatatactaatacattaataattagagtcgtatctgactaattatgtcataataacatgtcagctacgaacgcactattaatctttgactcttcccaaaacccaatgtatttggagccgtctctattccaagttgtgtggatttaaattaaaacaatgtacacctagaaaactaaagataccacctacactaaaccacttgcataaaataacaaaaaaaaaaaaaattgttaagagtttacttttccattatatctttatatattaaaagtgtttatctaacgatatttcttggtttaatagaatattcttaaaagtaaaagaatattctgttaaattt

SEQ ID NO: 293577 - DNA, 652 bp, Cannabis indica
actctactaataaatgctatattttctgaattctgactataaacacgctgcaacagattattattttataaatatatttttttctttaaaaatgaacacagggtaatgatattgaagcagtaatatttggcactgaaattgatgctagagaaaacactttggaagtgttccacacttactacatcagcaacgcctatgtaaaaaaaaacagccccacctttcgataaaaagcaagactacaaatattcttggacagtgaactcaagaacagaaatcaaagaaatccaaacagaagacaaccaggtatcagcaccaaactatgatttcattccgtttagcaacctgcatacacctaaagaattcagcaaaccaataggtatttacaatttaattttcataaatatatatttctcattaactaactatttaatatttcaatttattagatattttggctattgctctcaaaatgaacccaccaaaagaagtcaacactccctatgaactacatacaattcaagagatatatttaattgatgaaaggtaaactatacatttaatctaccactataaacgacaccccttgtgttcattttttaattgtcgatatattaaatactatttaacaaaattaatgctaatacattttttt

SEQ ID NO: 293578 - DNA, 734 bp, Cannabis indica
ttttgcaaatatgctgtatcttgtacatttctcgatcttaaaaagagggagaggaagtgttaaggcccaagttgattcggcccaaattttgtgctcttgcagtggctaataatcttaaaaaaacctcttgcatttaacacacatccgctaggagattgttgtgttgagacagcctattttttaagaaaagaatcatagttatttggttggataaaacgacgtatatacattatttttctttttttattgagaaaaattgacttcattaaaatttcaggagcaaatgcaatggtaaaaacctgaaaaagtgtgcctagagataatattaatcaatcataatttaccaccaaagcggcacttatacaatcaagatagtctcaccaccacagtactaataacattagcatatttaacaaaaatatatatttattagttatttatgtacttctaaatgcattgatagcaaaaaaaaaaaaatgaagaaattaaagaatctaatgatgatatatttccacctaagttattctcccaggaaaagtgagacatttaccaaatgatgcacaaaagatttcccacattacatattcgcatccaaaaaacaaagtaaagcagtaggaaagtcttgaaatatacgacctcttttgttacaatttttttttttaatttatctaaagagcatgaaatataaataatcaaattttcttgttgagtttaaattcacgactttgaaaata

SEQ ID NO: 293579 - DNA, 595 bp, Cannabis indica
agtatcccaatcagaagcatcaagaggaggaagtatttcagatttaattaaacgatcaaccctttctctggaaatatgacccaatcttttgtgccataacaataaggatgtttccttaatatgaggtcttttacccacagtattcacaacattaaaagaggaatctaaaggagccaatgacaacttgtaaagaccatcagaataaaagcaatttccaataattcgagagtcaagcataatgtcaacattatcatttgcaaaatgaaaagaatatccttgtttaaccaaaagcggaagcgaaactaaattccttttaaaagtaggaacataaaaagtattgttcagaataatcttatcacgagactgtaattcaagaataaatgttccaacatagataacgtcaactccaacatcattgcccactttaagcttggactccctctcacttggcttcctgagatcccttagcccctgtaaggaagcagaaacatgaacagtagcaccactgtctaaccaccaagaatcaataggaacatcaactagattagattcaaaacaaacacatgccaatggattacctgattgtgcttgcttc

SEQ ID NO: 293580 - DNA, 590 bp, Cannabis indica
atcacaattttatttatcatacataaaactaaatttaaatttacccatcaatccaagtagtgaccatgtactgctgattatttgacatttttttgatacgtctatacaaagaagagacacgtgcatcaagcgatgtaaaacgagtggctacttcattcggattaacaaattgaaaaaattgttggcgattatcatttgggtctaccatattttccatacaaaagtacataaaatttcattgacaatacgatcaaatcaaacaagctaatatttatcaataataacaaataaaattctaaaaaaaattggacagcatttcccctataataataagctaacacaaataattcaaacaattcaaccaacacgcaataagttttcatccttataccaccacaacacaatcaaatttttcgcggaaaggcacacaagttagaaaccttccgttatcaccgcaacacacaattaatatcaaaacctacttcgctatggatgaatatttaggatattcaaactcctctaacatttgtataatattaattaacagaaaaaaattaaatatgcacacgtacctcttctaattaaaatga

SEQ ID NO: 293581 - DNA, 552 bp, Cannabis indica
gagatggcgatgatcgcccaagaatgtaggtccagggggagaagagaagaccatgaggtcaatagtgactaccatccaaactaccctgacggtcatggtgatgatgaagctgaaagtcgggctaacaaccaaccaaatcttgagctggggggttatcaagccaaaaggccgtatgcccctaataggcaacatcaacctgaaaatccaccccaaaggggtaggaatgaccaagtaccacctccagctgatggaagggctaacagtcagaatgccagaggaaggccaagaaccgggtctgtttttgaacgggtaggcccccgagggggtagagacctgcgggacgcccttaacagaaatagaaacaatcgtggttccaacatagtgaacccacctgagccgattcaaggggaccaagcaaatgctggtgtcaatattgctcaacctcatacagccacatatccggtgatccaggctcagttggacgagttaacccgattggtcaaggaccttaccgcatcaaaacccactgacttggatctagaaaggaggaga

SEQ ID NO: 293582 - DNA, 583 bp, Cannabis indica
tcactatccctaatcacaagtggttctttttgcctgatcacaggtggctctttttgctctacttttcggatcggcatttttggatttttggtagctcttttttatttttggctcactatccccgaatcacaagtgactttttttttactttggctattggatcaatttttatttttatttttggtagctcttttttttcggctctacttcgatcggcttattttttgggggttggatagtcgctagagatttttttttgttgttagtttttgctctgataccatgttgagaatcatgggttccatctcaaaaccaattggcaatgagtggagtagcccatgttcttatatatggctcacttctctaccatttattccatgtgggacaatgtccacaatattccccctcaagatgatggctatttttttgctcaccaatcttgaaccctatcagagtggacatggtcactatctgtataggtgcggatcggatatgatcacttgcccgcaagagatatggctctgacaccatgttgagaatcatagggttccatcttaaaaccaactagcaatgagaggagtag

SEQ ID NO: 293583 - DNA, 676 bp, Cannabis indica
ttacccagaagaacatgaatgcatgttgaatctttacagatcctatcaatgtaagtttctaagacaacgaagaataccagttcgccttatcttgaaggatttgaatcccaagcacatagaagcatttgctaaggtctttcatgtacaaaatggtcaaacagagtttttttttgctcagccaacagatcagaattattagatgcaagcaggatgtcatcaatatgtagtaccaagataatggaactgctcccactgaccttcatgtatatacattgatccaccatattctccctgaaaacattttgagtgacaatcatatcaaccttgagataccactgccttgatgcttgtttaagcccatatatcgaattcttgagtttgcaaaccatgtgttcttcgccaagcttctcaaaacatacaggttgagtaatatacacatcctcagataggtcaccattcaagaaggcagtccttacatccgtttgtatgagttctagatcaaaatgggcaactatagtcacaatgatttgcagcgaatctttggtggaattaggcgaaaaagtttcttggaaatcaatgccctttctctaactataacctttcgccacaagtcgagccttgcacctctctatttgctcatttgagtcacgtttgatcttatacacccatttgcacc

SEQ ID NO: 293584 - DNA, 699 bp, Cannabis indica
acaatcacaacactataagtgatacgctaaatcacttcccagggacttaaactacgaactaaaagttttcctatcgataaaaagcatggcaataccccaaataacataaaaacgaggaaatctaaggtttctgaaaatcacccaaccggcagaccggttgtccaaccggaattccggttctggaaattttcaaaacccatccggaattccggatgcacaaccggaattccggttcctcgcaggaatttttcaaaaattcacacaaagctcaaatccaatccaaacaataccaaaacttccagacctgttctaaatgtcccatataacaattctaaagcaacaaaaccacccagaattcacagaatcaaaaatcaccattggaggttcaagattgagttcaaaactcaaaacttgactaatccctccaaacagccactaaaacaagcataattcaacatatttcaacatcatttaacaccagaaaaccctacctaaccataacagcaaccacagcaacaaaaatcaagaatttgctttgaaaaccaaacttttgagctaaaaatcacaaacttaaacaaggtagcaagcatgcattataacctagttaatccattcattttagacacaattaagcttataaaaacataataaaaaacctagcaacactacagccacaaaactcaaagcatgcaataatca

SEQ ID NO: 293585 - DNA, 236 bp, Cannabis indica
ggcttcaggaaaaagatgatgcatctattcctttagagaaaactcaaagccttctcctaacctagccgccaccttctctctctcttcctctcttctaaaaactgaaccctatagtgagtgagtgagtgcccacacacatcaagtggtacctcaatcatagtgtagaagattgtgaagaatccagattgttagcgatctaagttgaaggagacattatattctgctgcaaccactat

SEQ ID NO: 293586 - DNA, 650 bp, Cannabis indica
aattaggtttcaactaacctaaatatctatttcaaaaaaaatgctaacaacttttcaaatttcatgttattaaattaaaattaaatattcaataaaataaaatgataaataaatatcatttttcggattttataatttaatttttaaataaaataacaaaatttaaaagttagcaaaatatcttatttgaatttaaatttttttgattaaaatatacttattttaaatttcaaataaggtcattttattaaaaaaaaattaaataatttaaaatactaaatatctgactttaaatttgaaaataagataaaataatcaactttaaaaaataagataacaaactaagcaaaaagatagatttttacctattttcaaattcaaatttcacaaatatacttaaattaattttaaaaaataattgatttaattctgataattagatttgaaatatgaaaaataaaatactaaatacaaaattaacaacaaaaattacaaattaaattccaaagaaaaagcaatgaaaataaatagaaaaaattacatttggtacagatggtataccatccgtgcgcgaatctgggtgatctggccaaaaaaaactcaagcgctagaggctgcacgcagcctcttagaaattattttaccaggat

SEQ ID NO: 293587 - DNA, 594 bp, Cannabis indica
cacttaattacaatgagttaagaaaaattatggcgacattaacgtaaaaattgctcttttaatttcgagttattatagacccatgatttcgagtaatatatgttagtattaaattaaccctacttatatgtgttaattttttcattaagttccttttatgttattctgtttaaaaaattattttccaatttaataattttatatgaattttacctttattatttttatctcacctttataagttaaccattttattataggaaagtattaattataattagttttagtgtattaaagaagttttattgatcaaatattttattttaatggtaaatacatttattataattttaatgatttcgttatttataatatataatttttgttttatgcatttcttaatttgatagctatttattattattattttttctcattctgaatctatagattgtttttttcattctttttataaatttgggaattattcataattatttttaattattttttaaccttcctgattttgtgtagtctatcattaatggaattctaatcctaattttgtgtagtctatcattaatggtaattttt

SEQ ID NO: 293588 - DNA, 517 bp, Cannabis indica
ctgggaagccccttcgcattggggactcggctgagagaagggcttccaggccaaagccttcggctcaggagccgaacactggggctcctggcgccagcacttccggctccggtaagtctcctttagcagtacattacgtcccttctgttggcgaatatgccagtcttaggcctgtagggttcgatgagcgtctttataggtttaggatgccctcgacccggtggggagaccatatgaaggaattttatttttccaacttaggagatttcctaggtcggtcccggatgggttctggtcctccggagcccgttcccttagacccttcggcttatatttcatccagctggttccggccttcggacagctatctcggagacgatgctgccagcgttaagattcggaactttgctagggccgaattagagagtcagggtaggactagcttgattgctatatctgagtgtttgttgttttccatggatgttctaacacttgccttttttcttttgttgtagca

SEQ ID NO: 293589 - DNA, 558 bp, Cannabis indica
tccaaaactgtttcggtataatatctatatctcttacgttataactccgattttaaagattttagtgtcattagaaagggaattcgattttctaaaacttttatgaagagagtattctctgatttggaatatttcagtatcaaaactttgtattttcgatgtctcctgtgattcgttactccatattccttctcagaaatagtttcagtaaaactatcataactccctcagttttaatccatttttaatgatctatatatcgttggaaagataattgaatttcctataatttttatgaaggaaactttcattgaattcgtgtagttattgatcaaaaatagtgttctttctgctgtactgtaagagtgcgaattttaatgttagggccttgacccatgtgttattataggtagtagtgacgagataacaagtcttaagcagcgggatttgaggtaaggaaattagatagttttgtatgtgtttatctgcataaatttaaattctttatgtattgaaatatgatttatgatttgttattatgaatatgtatatggtact

SEQ ID NO: 293590 - DNA, 566 bp, Cannabis indica
ccaaattggatttcaaatattcagagccctacaattctacaccctctccctcagtcccaagcttttgtctcatttttcttaaatgaagactcaacctggaatacccgaaaacttaatcactatttcccttcttaccaagttgatcgtatcctctctaccccaattgatcctcattctccagattctcttatttgggggtttcactcctcaggcattttaacagttaagtctgcttaccatctcgcctgcacccttgactcggttcaagttccttcctcctcaaatcctaatcctcatcttcattggtggaaatccctctggtctctccctgtaccctccaagattaaacactttatttggagagctttccatcacatattgccttgttctctcaatctattcctaaaaaggagtctccctaatccttcttgctctggttgtggttatgacaaggaatctgtctctcatgctcttattggttgcccacgagcaaagtctatttggaaagcttcatcttttaaacagttttatatgtctcattacagaagtgacattaaggattttct

SEQ ID NO: 293591 - DNA, 770 bp, Cannabis indica
aaattaactatgttgtgcacatcctcaatactaaatgcactatatttgcaagaaagatctggaaaattagaacaaaaaaaaaccacactaactcttatattttcaaaaaaaaacgtaactaagaacttcaaaaaattaaaaaaaaaagaagaaaagaaaagaagatgaagaagaagaactgaacatgaaaaaaaataaaaaagttatatgttgatggagagaaatagagagaacttgaggaagtagagagtgaaaaaaatgaagaagatgatgaatagtaagagagaataatggagaagtgagattaaagtgaaagaaatgagtttgaaatattttaggtgacatatttttatcatcaatttcaattaaaaaaataataaaaaaaaaatatatgtcactaaagtgacaacacaagtcacatcacacctttatacctttaaaatataatataattttaattaaaagaaaattaaaaaaaaaaaaccaactgcacacgttttttaagattataatatatatatatatattttatgtaaagtttgcaaaggcagtatactgccaaaaaaaaacagtacaaaagtaaattccaccgtgtcacagtacaaatgaaaaaaaatatggaaaaaacagtaatgggtgtaaatttcccaagagtaaacatgtaatttagtaatattccacagtcatcacatatttcaagtgtgttgtaactttgtaaggtgtacattttgacctttttttttttttaagtttcttccatctagagaatt

SEQ ID NO: 293592 - DNA, 531 bp, Cannabis indica
attaagaactggtagatattattgaaatagactacaggaagatatcatagaaaaccaagaaaaaaaaaaaaaacagagttaactatttagcttccaaatggaggtgaatcaaaagaaggtggtggaagctgaattggagacagaaagggctgtgatggtgggagctgttgcactggctcattaaactgaagtggttcctgtggattttctggaatcggaggtggcagaaagatatttggtggttcctgtgtgacgggtaattcaggtggtgcaatcaccccagcatctggtacatttggtgtgaaagaaaatggtggtaactggggttcaggtggcaaaaggggttgagttggtgtgaaagaaaatggcggttcaggtggtaaaaggggttgagttggtgtgaaagaaaatgggggttcaggtggtagaagggttgagttggtgtgaagaaatggtggttcaggtggtaacagcggttcagttggtgtgaaagaaatggcggttcaggtggtaacagcggttcagttggtg

SEQ ID NO: 293593 - DNA, 623 bp, Cannabis indica
ccccattaaatgagctttgagggggtatttatagtgttttggtggggtaatccctagaattgttcttacacatgtatctgtaagtatccataaagttgggtatttccaatgaatataccatgggtgatgcatggtcaaatccctaggtgctgtagggtttttatgaggaatgtcctttttgccttgtgattgacgtgactcttcgcagagtagccgtcgctagacttaaatgatcattactgtagcgctgctgtttgggggttgtgccgtcagactttattgcgtgttacagtcccaacacgcttcctcccatgcggcattaaatgcgacttgattgctcaggagaggcctgacacatcccggagaggcttcatgctatgcgagcttccgggagtaccttgtactccgggtgcctcctccgggacctatgcccatggcgcttccttgtggcgtacaagacttatcaaatatttacaagttatctgatccacgtgtcccatttcgactggtccacgtatttgggcgattcaggggcaacattatatatataatattatatattaattgtcatttatcatatatctatgttgtcctaatttttagcactctcacatggcatccca

SEQ ID NO: 293594 - DNA, 657 bp, Cannabis indica
agctttgcccgtatctccagcgatggtctgggcctccaacaatgacttgtaagtgtccatctatcagtggaggtaacagatcctggttgttttggccttggttggcctagacatacttctgtaagtgcaggttgtttttcttgatcagatattttatttcccgcttcaggttgtagcattcgttggtgtcgtggccgtagtctccgtggaaccgacaaaatttcgtcatgtcccttttgttggtatctttcttcatgggcctaggcttcttgtacggaattaacgactgagtttccatatacacactctctatatcttcaggtagaatagtgaatgcaatgtgttttgcatgatcacagggagtctgtccggctttttcggtaaacattcctttcttcccgtttccttgcttgtggttgttgcttgaacgcttgccacttgaattgctggaataattgggaagttgggcggatgttccagtggaaggagccttcgttttgcccggcttttgctcaccttctgctcgttgaatggcttcttcgagcttgatgaagccttcggctcggtcaaggaaatcactcattgagtcgaccggttcgttcttccttatatccttccatagttcaccaaggaattcaatgacccccagtatcgcgg

SEQ ID NO: 293595 - DNA, 773 bp, Cannabis indica
gatcaaaagcccgctaggaatatgactctgatactatattgagaatcatgggattccatctcaaaattaattggtgatgagtagagtagttcatgttcatatggatagctcaatatttttacatttaatccatgtgagacaatgttctccaatataaaagaagcataaatatatattaaaggagtaaatttttttattaattaaaacgcaaaatgctacaaagaccaacatccacaaaataaaattaaaaattcgttggtctctcttagagtgattcctcctaatcaagtaataatctcgctttaagaacaactccaatcaaattattcacatagctttcaagaagctatgagaagtaaagataactgacagacatggctacaggccaaccaagaagagatgcagcctcttaggaagaataaaatatgaattgttgtgaagaaactagagttttataagctcgtaagaattaaatggcttttcaagcataaaaaaaggttcagaaaatgggcctaccaaattcaaagcaaacttagtcgcaaaggagttcactcagaagaagtgacaacaaattatgtgggaactcttttattacattaatatgtatgatcaataaaagaagattcaaggaatgagcctaccatattcaaagcaaggttagttataaaggggttcactcggaaggagtgacaacaaattgtgtagcaactcttttattacactaatatgtgtactcaataaaagagttacaagtgacaacaaattgtaactcc

SEQ ID NO: 293596 - DNA, 1090 bp, Cannabis indica
gatgatacaggatttcacagtcatagtcttttaccaattctaaccaccttctctgtctcatattcaaatccttctgagtgaagaaatacttgagactcttgtggtcagtatagatctcacacctttcaccatacaagtaatgtcgccaaattttcaaggcgaacaccactgctgcaagttctaggtcgtgagttgggtaacgctgctcataatctttcaattgccgagaagcataagctatgactttatctgcttgcattaacacacagcctaaaccctgccttgaagcgtcacaatacaccacaaacttttcttgatcagatggcaaggctagaacaggagctgtaatcaatcgttgcttcagctcttgaaaactcttttcacacttatctgaccatataaatcgctgattcttcctagttaactcggataacggcatcgcaattttggaaaatccttccacaaaacgccgataataacccgctaaaccgagaaaacttcgaatttcagtgactgttttaggtctaggccaattcttcaccgcttcaatcttccctggatcaaccataattccgtcttttccaacaatatgccccagaaaagacacttgtgacagccagaactcacactttttgaactttgcatagagtttatgatctctaagtcgctgcagaaccattcgaagatgttgctcatgttctgcttctgaccgagagtacacaagaatatcatcgataaatacaattacaaaattatcgaggaaatccttgaataccctattcatgagatccataaaggctgccggtgcatttgttaacccaaaagacataaccaggaactcataatgaccatacctggttcggaaggctgtcttcggaatatcctcttctcgaattctcaactgatgatatccagacctcaagtcaatcttagagaataccgttttgccctgaagttgatcaaacaaatcgtcaattctgggcagaggatatttattcttaatggttaacttattcagctcccgataatcgatacacatccgaagagttccatctttcttcttcacaaatagcactggggctccccaagg

SEQ ID NO: 293597 - DNA, 501 bp, Cannabis indica
accatctagcaaccttttattcgatcaaaataagaattcaacgttgtcctggtaggtgagagttaaggttattcttattttatgagcttctaccattgtttcatacttgtaaatttatctttaagtagtcaccgtaggggagagtctaatagagacaaaaacttacaaaatacttatctttcgagatctttacggtgttaaatgttcaatgtaagaccatccatatggggaacaaagtctagcgtctcgaggtcccattgaagtattaaccatgtaagaccaacaataaagatcgaatatccttataaataaaactaatattttaaggagttgtattttcatttgatatgtattttaatctatttattttaatattaatatagttatttaattaaaattactaatttagataactctaaatattttaatttaatatttataaaaattagatacatacttggatagatctaaaaataaaatttattttctatccttagtatt

SEQ ID NO: 293598 - DNA, 791 bp, Cannabis indica
atgacattttaaaactgtcacaaaaaccttattacgtctgttcaaaaatgccatatctattacgaaaattacttttttttttaaacctattgcgtcacttataaaatgaagcacaaatataagtaagaaaaaattacaaaattttcatgcaattttccccacctgcattatcaaattttagaataactctatataatagtaaatacataatacaaaaaaaagttaaaaaaacatttttaaaacttacataaaattagtaatcgattctattaactaatcacacaataccaaaattgttaataaaatcgatcctaaaacttaaattccatgtatatcgtaacctaaatataaactaattacatatgcaaaagataacaacaatcatgataaaacttgttactcatgtattataacaaaagtagtaaccttaagtacttaatctataatcaaaggcttcacaaattcggcccactcatcccgtactgcattgatctcctcattactatagggagcgtctaacttgaactataaaacaaaagataaaaaaacattaatcattatattaaaagtataattaaaatacaaacttaataaagaagagttattcatgtttacatgatttttcaaaaaacttgcaggattaacaaccgtcatgaaactctagataatcttcataacataataattaaccacattgtactccattcgactgctgccgacacgtgtattggttgatttttattggacccttatttcgtatatttttttggaacctgtacatgtccacaaca

SEQ ID NO: 293599 - DNA, 848 bp, Cannabis indica
ttataggtggtatataaaatagctataagacattctaagatagcataagacattgtaatatagcataaaatgaaattcttatcttcatttgatctctttggttataaactaaagttaggatagaacaattttgtttgtattatcacctagtgataatttcttttacacacacatttttctttacacctgtttggagaggctgagttatagtaaggactcttaaatacgctactccaaattatccaagactttttatgtccgtaaggatagtttgggcttgttgtatacctatagtgtgatttcttattcatttgattgtttctttgttaaagatttcggtacgtcatctcctttcacgttcttgtaagttggcagatttgttgatagtttgcttacttatgagaactgtggggaggtgctgccgaaattttgagaaaaaaagtaatcttaagagaatagattgcattatatgtatattacaaatctgaattggataggtacgttctttacccttttaaaaatggagtgagaaggtggactaggacacttgcacattttcaacattaatttgaacttcctctttttatatcgtgtagaaatatggtgagcgacagaagctagatgactttaaagatacgatctgtaaagttttgtatagtgtggatgagtttgttggagttgcttgaatgtaaataaattctgtcagagttacactatgcccttgcatgagatgtctaaatgtgaacttcgagactcccgaaaatattagggtgcatctatttgtgcatagcatccaacgatcgtaaacgacctggtattttcatgggggagttgttcgcacaaccgct

SEQ ID NO: 293600 - DNA, 557 bp, Cannabis indica
aatgtaatttactttcttgcaacttacaaatctatttttttttagtttagaaatttaatttattttaatatttttgaaaatagaaatttatttttttttataaaagaaatataaatgaattgacgtataaatttgataatagatcaatagtattgaaaacaaaaaaagacaaatgtgtgttttaatttagttaaaatgtaatttactttgaacagagatcactagtttcaattaacttttcaccttaacttttttttggactttcttagtcaatatccaccttaaatatattcaatgaacatatataaagaaaagcaacatacttttcacaaagagtaagatcttatttcttttttcttcatttacaagaaaaataaaatgatattgttatggttttttttttttaattattattgaaatgaggttttattttatgaaaaaattacactatatatttttttaattttatgtctacaatttttattctctttctaaaatttattatgttttacttttttgctaattattactattaattttacccatatcacttcacg

SEQ ID NO: 293601 - DNA, 513 bp, Cannabis indica
tgacatcgactatgaatataatgacaactacaagtaagatacggtgatggcagtggttttgaagtaagagttttttttagatagatctatttaagtttttaaattggaaaaaatataaatctaaacttttatttttcttgatttgagattttgaattattctgatttatattttgtttatgaatttattgaaatacttgaatatttatttgttctgattttgaattgttctgatttattcatacttgaatatttatattgataattgttaatgaaattagtctgtagctttatgtttctagaaaaaaaaaaaaaaggtattttttaatatagagtttaaattttatattgatgattgttaatgaaattagtctgtagctttatgtttctagaaaaaaaaaaatgaattattttatatagagtttaaatttaaatttatataaacatatctattttttaaaaaagagtaaattcataaaaaaaaaaaataacgcataaataacacaaataacac

SEQ ID NO: 293602 - DNA, 893 bp, Cannabis indica
taagaaaatgacacgtggataattatctttaatatttaaccgtcatatatctatagagttccaacaacataacttaagtatttaccacccaaaatcaaacttaggtatttatttaaaaaaaaatcgttacttttattaattaattagtaattttatcatttgaagtatgctttttttaaggtaggttcgtcgagacgatttgaagctttgttgcatctttcaaaagcgattttatttattttgtgactagggaactaagccgcgcttcgcgcggtgttgtccaatttatataatttaaaaaataatattttaacgtgtatattataaacaaattaatagtgttgaaactaaaaatataatttgctattttaaaatatataaaaaaaatgaagattttgtgacaaatattattgttataattattaaaaaaaaattattttataattagtttttcgaattttttatttcataaatttatattctaataaatagttgcaaatatttttactaaatgagtaaaaatattataaatcatgatcgtttgttattttctaattatttttcaatttaaatgaaataatatgtaaaagagaaaaaataataaagaaaaaagaatcctaaaataataggatgctgcatttaaaaaaataataaataataggatgatgcctcacatattctggccatatattttcgaacacaaattagtgtaagaatactttatttatagtttagaaatatattaattatgtagttcttaatccatatgagatttttaccaataataataataataaattttactaagaagtcatatttctcaacatctacaaatatataaaataaactaaatttattaaaattcttttaatagtaaaaatggatcaaaatat

SEQ ID NO: 293603 - DNA, 553 bp, Cannabis indica
aaacatacttgtgagtagatctaagatcctggtaaaataatttccaacagtgatctagtcctaacaagggtctttccagccactcaggaacccggagtggagggtacttaggccaaattgggaaggaccatacgaaattgaggacgaaatcggctccgggacctacaagctaaaacgaatggacagaaccattggtgcctagggcctagaatgttgatcacctccgaaagtattaccaatagttgaaaaaaataaaagtttatgttatgtaaagtaatttgtaccggacaaacatatgcaacctctaaatccaaagtttataaaactgagtgacctaaaattgaatgtcgtgtcactcaggggagtagtagagcataccacatggacaaatgtaaacagaccaaatttaataaagttaaaagctaagtatgtattcaaatgtgaatataaagtgctcggatcccaaagaaaagctcaaaaataaaagataagggcttggggacgggccttaagtagtactccactttaaaaaatatatatatagaagtaaatt

SEQ ID NO: 293604 - DNA, 623 bp, Cannabis indica
tattaaaaaaaatcaaaaaattgcaaggtctatatattttgaaccattttaaaaaatacatggactgaattattatttaataaaatagaagataccaatgagtaacttttagaaaatgcaagattttaaaatagtatttattctttatttatagataacatttgcttaaaaaaagtctatttttaattaattacatgttactagaaagataattaaaaatatatattttataaataataatttttatattaacatttaattaaagtactaattattttataaaataataattttcatatatatattattttacttgcaacaaaataattatttttttttatagcaaatagtgatatatatattttaattaaaagaaatagaaagtagtagataattagtaataaatgtaaaaatgagatttatatggctattcttgtgtaagtaggtagctattattttatcacaattatgaatggtagaaatttcttctttatttttccttcatgatattttttcatgatatttaaactattgaccatgcactcacaattattggttggtcctacaaataaataaaaaaaatattttctttttcttttagataaataaacaaacaaatttat

SEQ ID NO: 293605 - DNA, 552 bp, Cannabis indica
tgttgtttgtttaattaattggctgaagtgaaatattatatgtggctttgtttccatttattcatttttacaaaaatacaagttagaaaaaagaattttcaaacactctctctctttctttcctctcatttcggccaagccttggagcagcaaggagctgatttctccattgatatttgcttgataattcatctcttcttaaggtccattgcaagctaggttagctcttgttcttccttctttaatttcttgaaaaaaatgatgaaaatggtgatgcatgcatgatgtttttagttgttgttgctgctgtatgttgtggatattttcagaggtttaaagcatgtttttagatgttaatgaagcttcttgtagtacttgattgttaggttatttaaggttatggttttttatgcaaaaatatgtgattttgatggaaatgtagtgaatctgtttctgtgttattgttattgtttttaattgttttcagaggcttagttaagcttgattaagtagaattaagcaggtttgaatgcatgtttgtgggatttgctc

SEQ ID NO: 293606 - DNA, 625 bp, Cannabis indica
aagaaaatcaattaccatggctctggtgccagttgttggaatttattttaccagaatcttagatctactcacaagtatgttgatttaacaacctaaatatgaaccttctaaaacgataaaaaacacatcaaaagttaagaaaaacttacattggttgcagcggaatattatcaagatctgagtccgaatgtccttctcttggatttggatccttcacaatcttccaaactatgattgaggtactacttgctgtgtgtgggcactactctttcactagggtatttcgaaattggaagagcaagagaagagatatagggttcggctatagagagaaaagggaaggctcaattttctgaaagaggcagtttcctgaattactgaacaattgcttaactgcttgatttggtgtgagccatcactttctatttatagacaactgctaggtttaggttagtaattaattggcattaaaataatgaaaataataattggaaaatgcttgcacaagtggccggccatggtgttaatgggcctcacttggattttgcagttttcacaatttttatttctattttctcaaaaatgccaattttccaattctaaccatttaaatgccaaaactaat

SEQ ID NO: 293607 - DNA, 733 bp, Cannabis indica
aatgcttgagtatttgtctgacacccattaaatgcgctggatcattaattgacgggaaacgaattgttgcttgcaaaaagtaacaaatattaatgatgactgtcataaatcttagataaatcgactaagtctgttagctttagaagtgtcaccaaggatataccctcccagaggagaggtaaaagctccacgtactcctagagacaagaggaacgccatgttgggttttatgccctaaataaaacccattacaatctgattagttatcaatttagaattttgaagtgaattatgattacatgtatgttacatgtttatggtttaatatatatacttgatatatgcacaaaatcagttaaatccagaacatatagttattcacaattacagtattgtcaatacagtggaatgtgattgtgattatatgattcaaaagatttggtccctgttcatcagtgttttggatttacactgatgtgataatcagcgatgaagtatacttacacttggagtaagtgttatgttctttccagaacattggcaaagtatactggtttcgaatgtatggagtatgcattggactggaccgatattgaacttggtcaaagatattgtaaacttaccgttgtatctttccaagtcaatgtcagaagttgatcttagattaagagaatctaaatcctgatatgcttaggctcaatctcaggagtgctattcttgttctttgatttta

SEQ ID NO: 293608 - DNA, 1023 bp, Cannabis indica
ctctccacatatgcagcaatggccggattcatctttctaagcttctcgaactctctatcgcattcagtcttcgaccatgcgtaagcaacattatatatttggttgtgaaaagcatcagtcttgaatttggcgttcacgttcataacaatgtggtgatagcatgcacagtggactgcttcgggaaaaacgagttcaacagcatgatcaatgctttgatgcctatctgacacaaacactaagttctcaaccacgccaattgctaccctcaacttctgtaagaaatacgtccaggagtcgttattctcactgtcaacgataccataagcaaccggcaacaattggttgttcgcatcgtatgccacagcaactaacattataccgccgtacttcgtcttcaagaaggtgccatcgatactcaaaacaggacgacaaaaagaaaagccccttctacatgcaccgagtgatataaaacagtacttgaaccgctcatcctctaagtacaagtcagtaatggtacctggattcttctgttccagcatgtacaagtacccaggaagcttcatgtatgaaaactcaggcgtacccctagcatacgtaagtcccatctccctgcacctccacgccttcacataactcatactgataccgtagttgtcaaacatgtccctctgtatgtctttagccttgtacttagttccgtcttgggtgtacttccccttaataaggtggccaactacccatggtgctgcttgacggtgatctgaacgtctcgcattcaagttcatgtgtgttcattgtgaaatacagtgacctcaaagttgtcagaatgcatctcttcctcccctcaatctccatttacaatctggagccttgcatgtaacgtacaacacatcgggggctgacttcttcaccatccactcaaaattgttattaagtgcaaacctacccaccacttgtctcaattcttccttgttttcataaaattaccaagctctataacccctgcttccttactttgtaaac

SEQ ID NO: 293609 - DNA, 555 bp, Cannabis indica
atatatctcctaaatatcctaaattttaactgaaatttaaatatctaaccaattttaaaaattttcagtttatttaaataatttaaattaattaaatatcggataagataattaattaaattaatttaaataagttatttaatttaaattaattaattaaataatttaaattaattaaattaattaaaatttatatatttctaatattatatttttaatcgtataatttaatgaattaaatataataaaaataaacaatttgaaaaataagatatttgaggattatgatattatcaatttgatttaataattaaataaaataaaatattctaagtttgaaaaatatatggttagaaaacctaaaatttctattaaaaccaaaattaacaaacttttcgaaatttcatgttatttctttccaaaaataaattaattaaaataaatatataataagataaaatgtcaaaactaacatttttctaatcttataatttaatttaataaaatatatttcaaaataacaaattttgaaaatctggtatggttagcaaattt

SEQ ID NO: 293610 - DNA, 518 bp, Cannabis indica
atagatcttttagatcatatcaaaaaagtctcaaagtctaaatctaatccatattcatatcaaaaagtatcaatctatcaatatggatcagatcaaaagtcccaaattctaaatctaatccatatccatatggatcatataaaaaagttctaaagtccaaatctaatccatatccatatggatcatataaaaaagttccaaagtccaaatctaacccatatccatatggatcatatcaaaaagtccaaaaatctaaaatataactagtcaaagttcataaccaaaagtatcaataattcatcttcataactattcaaaagtatttacttcccttgtgtatattgtgttcttctctttgcgtatcctttttttttgcttggtgtaatctaaatcattccttcctttgaaatgtccattgtccaattcacaaactccaaagtccaaaaaagtccaaagttccaaacctttcaatattttttttgaaaatgaaaaaaaagataaattagcaaatgaaatca

SEQ ID NO: 293611 - DNA, 509 bp, Cannabis indica
gataaatttataaaaaaaaactcatcatataatttcaaaatcattatcattgccatgctaggtttgccctcaacataaaataaatcaaataatgagttatcattgccatgcataaaagaaaagtattatgtcactaccttatgtctcaatcattatgagttaactactatgcaatgagttaaaaaaaaatagataaaaatatttaaaataaatttaaagaaaaaatagttaccaatattgttagatatattttttaatactcaaacaaattaaagtagagatgtaataatatcaactatctccaaatatacatttatgcacacatatatcatcaaagtagtaaatatacagttgttaaaaaaatgtgctacaattattttaatatattataaattatattaatatcatcaataaactctgtataatatcattaatcatagtattaatacccaccatagtatttttataacttacaacctaacatacctaattattaatgtattatgtaa

SEQ ID NO: 293612 - DNA, 789 bp, Cannabis indica
ctaaaagcaggcggtaagcttgaggaatgagttggtatggcgcaaggccgacaaatacaagaaaattaataaagtaatcctgaaggggaagcatggccccggtcatcaagtgcgtttggctccaagctccgaagcctccgtaattgtgattgggcgtctccgcgtcccggggcggccggtggtaagtcccggaagtcgcgggcttgatgcctgccaccagcacaatgtgctccagctggtgggggcaagtaagggtagagtgaagctcggccgcttcccaccccgtggcacgaggcttatacccttcctgggccacgggacccttcatcacctcctccagggtggccaggcgctttcctcctttctgagaagacttggaaccggatgcagacattttggttctgaaaaagatttaaaattccagcagtcaggccccaaaccaaaccctaagtcaaaaaagggaatgggggtcccctaaccgctggaaagaggccccctccggacggttgtcaataagaaagccttagaaggttttcctggacaaaagtcgggtgcaagaatcccacagatggtgacattacgaataagcaagaaaagaaaaaaaaaagagggtaaaaatcgagaaagacaaagtcctctctgaacccttgaaggtcattacgtaaagaaaagatgggcccttaaaaaaaatataatacgcataataaaagtaactcaaacaccagaaaagaggaatctaacgcaatcacacagaaactcaagacgaaaattcccagaaacttcaaacat

SEQ ID NO: 293613 - DNA, 203 bp, Cannabis indica
atactatatataaaaaatttacaatagatataattccagattttgtgtgtgtgtgtttcaaatcatattctttgctttaatcataacacagataatattgaaaaatctttaaagtaaaaagtctcaactccaaatcctcacaggtattgaaatatttgaaaagaggaagggttgtcactcttggagttggaaatatatgttaa

SEQ ID NO: 293614 - DNA, 598 bp, Cannabis indica
acgggtcagattaagtcagatcggatctaatctgatccgagtatgatgtagaggtgacgggggcacgataaatctgtacataatctagattaggtcagattataactggatcaaatttgacccgacccatttacacttatattaaagtccttaatgttagttgagtgtcttgtgttctcaatttgatgagttttgtcgtaacataatcaatagagttagagacgtactcttacaattacaagtaatgagaatttagatagagatgggttatatttgaaaaattataattcgttagatcatattatacaaatatatatatatatatatatatgtgtggttgatgatgacgattatagatcaatccgaatttgaaagtgatcatgaacttgtgtttatgtcaactaagaagttttgttatggaaactcattgatgtagacttggggatattccctttataaagtccttttagtgttaattttcaaactaaataattttgagctcaatatttaaagtaataagaataataataattttgagcttaaatttataattgaaagagtaatttgcagtataaatatttaagtttaactcttaatt

SEQ ID NO: 293615 - DNA, 773 bp, Cannabis indica
aaatatattttgggggaattatcccatatagtattttttaacttttttttttttttaaatttacggtttgggtttctaaagtggtttatccggtgattctatgtgagttgttatacgatttttggttgcgatttaggttgatccgctagctgcaataggggtttctatgtagaattctgtaaaaaaaataacaaaataataaataaaaaaaaactagttttgaaatgtaaaaatgaaaaagcccctatattttttgacatttttttaaattaagtaactaaactaaatatagatataatacccattaaaaaaatattccatatatatccattagtattaatttataaatattcgtatttttgaactcttaataataaattaaaatatgttaattagctaacttatatattaaataaatactacaaataaagaagtataatataattatacatttaataatttattttaattttaaaattactctaaatatatgtttaaatataaatgtaaatatgaatatggtgttgatgcataagttaatacctacaattattacttatgaaaaggccttctaaaacacaatttactaaacatacacaatacatgtaaattttaaaaaaaaatcaagggggggcgtactgcccctatgagcttgtatatagctctgcccctggttgacacatcaaatccagttgcatacaaagtatacacatgaaatgccttgctcataaagtttattttggcatatacgcctatagtcatatatgtcaaat

SEQ ID NO: 293616 - DNA, 294 bp, Cannabis indica
tctttaaattatagagaaaaaattacaaaattgagcttccaacaagtgaggtaaaccttaactattttacatattttttagtttaatgaatagtacttagttaaatgtagaaataactattcattaagctaaacatattttaatattattttctttaactttctatatatgtgtataatattatataaattattaatataaaataaataaaatatattaaaaatataatatttaaataatatacaagaaaaaataagagaagctggtgtatataatataaaagtttgagataaa

SEQ ID NO: 293617 - DNA, 532 bp, Cannabis indica
acgacatgtcgtttttcacaaaagagaaaacgacatgtcgtacggtcttgggttcaaaaattacatgctgaaaaacgacatgttgttttctgcataagggaaaaacgacacgtcgtacggagtggccaaaaaaactctctacttaaaaacgacatgtcgtttttcacataagaaaaacgacatgtcgtacggagtcgtctcctacaaccaacctgggtcgttttgacccgtttttgtgcatgcgggtccgacgaacccgacccaaatccgatcggaatagacaattccgacgacgaaattgcgtgttttcaaatctaaaatgttctaaatcaaataataaagagatccacatagattttatgtacgaaaacacgaaaaaatataaactttaataacacgaagttaattgggtccttaaaaagctttaactgaaaaaattttcatctttaagtttttcaagggattttcaatgcttagatcgatttataatactatacgaatatagtaatatatttagaattcgaaataaaca

SEQ ID NO: 293618 - DNA, 626 bp, Cannabis indica
ttgttctaagtcatctccctcttttatttgctgtaatttcgtgtatgttagtagaacttgtaattttgcggctcataatgtagttaattgggcttttattcacaagttatatggtactattccgacctcttcagttttggatgaccttttatgtaatgaccgcaaggtctaattctggttatttaatggaacgaatacgcttattttcaaaacatatgattctatttttattttcggtgaattaattatggttcatttcttgaatatattgagttatcttgtacattaccttcaaaccaatttttttttggaagacttcaaaccaaatttaaaaactaatgaattaataaagtataataagttatcatacaatttattaataaaattagtacagaatatattttttttttttgaaatatattgccttttatgatgtttgaaatacatgttggcttccaattttgttttagaattctatcaaaactgctctataaaatattacgggtgattctacaatgcacctccttaaaagagatgtattgatacacccctacttgtttcggtatctagaaaaaaaactttaagtctattttttttttttacatattcatgtacgttatatctat

SEQ ID NO: 293619 - DNA, 774 bp, Cannabis indica
cccgaccctggttctgtgtccctagtcttgttcaatgtttgaatgtatgttcaggttcgtgttcggctccccattccaagtttaggttgggattcgggtccggctcctaattctggtctaggtctgatttggagtctgggtcctcgtccggttacggctctggatctaggtcaaatttcagttatgattccaagtccaagtcttggttccagtcccggtcaacttccagttttggttccaattttgtgtcacagggtacgggttcgggtccacttttgggtttaggactgggttaaggtctaggtgtgggttggtgtccttgtgagggttcgggttcagcgcttggtcccaaatctagacaccgactacgtgttccgtctaagccctgggtccagatctggatcccgatctcgggtcctagtctggttccatttctggtgccgggtcacgagctaggtcctaggttccaatcccaatctaagtctggattaagttttgtgtctaagtcgttggttctaatcctggtctagcttcgagtttgggaccgggtacgggtctagctctgggtcttattctaggtgtgggtttgagttcgggtccgagtctgtgtccaagtttggaccccgatctgggtctaggtttgggtccaggtccaagtgggggtcccgagtgcgggtccaagtttgggtcttggtcaggatcacagcgcagatctatgtccagcatttcgatcctagtctgggtcttggtccgactccaagttcgtattcggat

SEQ ID NO: 293620 - DNA, 595 bp, Cannabis indica
tctttgcgacttacgaccgggtgaatcttgacgtcgggggcttagtcacgacggagaactgccggaaggccaagcttatcctgccgcaccaatcagtggaggactctaacctttctaaggttatctgtccgaatgtgagggtgcccgccgcggagaagaccttccgggatgaactcatcgccaccgcagagaagaagtaccaggaatatctctaccggaaggcctaggagaaggcttattccaaggcccaggcagcatccgggaggccccttcgcgttgggagcccggtcgacaggagaagccaggcgatcgctgggaagccccttcgcattggaagcccggctgagaggagggctcctaggccaaagccttcggttcaggtgccgaacaccggggctcctgatgccagtacttccggctccggtaagtctcctttagcagtacattacgttccttccgttggcaaatatgccagtcttaggcccgtagggtttgatgagcgccaagcattccactggtactacccccagcccttcgatttcactatctgaagctaacttagccagcagtccgcgtgagcgttcttttcccaggg

SEQ ID NO: 293621 - DNA, 768 bp, Cannabis indica
ggtaaattctaggtctgcttattggaagctcggttatataggcccatggtccccatactagttgagaccatactgcttgtaagactcagttaattgattttagttaatcaattataattctaaaattagactatgtctagtttatgaattttcactaagcaagggcttaaatgtgaagaaaagagattctaggtcttatttattaattaagagactttattaagtctaattaataaatatattaaatgacaatattatttaataattaatttttagttattaaataattagaattggcatttaagtggttaaattagaaaattggcgtttttgagaaaataagatgggaaaatgacaaaatggcaaaattgcaaagtggggcccattatccacatcctatggccggccactgagtgtagattttaccatttaattttttttatttattttaatgccaaataaatctaacttaaacctaggtggttgcgtataaatagatagtgatggctcacacttaaaaattgatgaaatttcctgtctttaaaaaaattgaagccaccttttctatacctatatctgaaccactattcttctcttttcttcttcaaaatttcataccttgagtgatagagtgagtgcccacacacatcaagcggtatcttaatcatagtgtgtaagactgtgaaaaatccaatcaacaagaaggagaatcgggctcaagaaggagagaaagagatccaggttcagatcttgataatgctctgctac

SEQ ID NO: 293622 - DNA, 548 bp, Cannabis indica
cccatggtccccatactagtcgagacaatacttcttgtaagactcaattaattgattttaattaatcaattataattctaaagatagactatgtctactttatgatttttcactaagcaagagcgaaattgtaaagaaaagatattctgggtttatttattaattaagagactttatgtgtctaaattaataaatatattaaatgacaatattatttaatgattaatttttagatattaaataattagaattggtatttaaatggttgaattggaaaattggcgtttttgagaaaatgagatgcagaaatgacaaaatggcaaaattgcaaagtgaggcccatcatccatatcatggccggccactatgcaagtattttaccatttatattttcattattttaatgccatataattcaaccctaaccctatgtggtattctataaatagaaactgatggcttcaagaaagtaagacatgcacttattcctttcagagaaaaacctgagcctcctattctattcatagtcgccaccctctcttcttctc

SEQ ID NO: 293623 - DNA, 544 bp, Cannabis indica
agtgtcaatgtctcctaaaatgacaagtagaataaggatgtggagtactaggaacttatcttacatgggaagagtgacactgattaactcagttcttctagctatacacacatactgggctcaaatctttattcttccaaaaaagcttttgaaggatatagaagctacttgcagatcctttctctggaagggtacacaagagggagcagggcctggtttagtggcttgggactatgtttgcaggcccaaggcagcaggggggttaggctttcgaaatgtacaacattggaacatggctgccttagggaggtatgtgtgggatatagctagtaaaaaagattgtctctttgtcaaatggagtcataatgtgtatatcaaggagcaggattggtggagctataatgctcccttggattgcagctgggcatggaggaaaatagtggctgtcaagtacaaaattcagcaacagatttcactaaccagttttgttgtgcagaaatacaagatccaacaagggtataacttgttgtttgctgaatatgat

SEQ ID NO: 293624 - DNA, 562 bp, Cannabis indica
acgaccaaaaaaaaaaaaagaaatttgaaaagagaaatccatcaaaaaacatgcttctaccaaataacttttgagacattatatcaaacagttttcttgcaatgcaaattcaacaactttcagagtataaatttaataaaaaaaaaaccttccaaaaaatacacctacaccaaaaactattaatctttctcatgctcaactttgatcaaatacattgttcaaaccattcacaaaaactaggattaacaaattaagaaaatatcacataaaacacataaatctaataaaagcaagagaaagaataagagtagaagcaagatccaaaaataaaattaaggaatacttacctttacccatgcctatgagagatcgaggaaagggagatctttacaaaagaaaattgagataaagaagctactataccatagattcaagatgcttatcaatggaagatacttctccttgaatagagttagcaaggcatcatcgatagcaataaaagctcggtaataccagcagcaacctcttgcatttgcctccgaatttgctctgcatggactcg

SEQ ID NO: 293625 - DNA, 1147 bp, Cannabis indica
aggcagtcacgaggcacccagcagcctcaagacccaccaggtgcataggcagacaccaacaattctacctagacttctagtggtaaaagcactagaagcaagtgcggcaccaacagctctgggaggaacaatggaaaaaaggagaagtttaacacttctcccacgccacagaagaataaggagaagtacacctgcttcaccctcctaatagagaagcccgaggccatcttcatggccactcagagaacagtcccataccggaagccctttcctatcaaaagggatatgggtaagagggacatgtcaaaattctgcagatatcacaatgacttcggcgacgacaccaatgagtgtcaaaatttgaagagggagattgagtacctgataaggcataacaatccccacctgcatcattatgtataagatgaccaaacttaggcacaaggtgcccagaatggagatccactagtagatgaaagacaccttcgatattgatttcgaaccctccttcattgttcttcaaccaattttcccttagtgatagagtgccatgcccacacatagcaagtcaagtactcaatcatagtgcggaagacggtggtaaccaacccgaaagagagaaagtgatccaagctcagatcttgataatactatgcaacagaaaggaataagagttagagatctgagcggaaggagttatattattccgctgcaatcaatgtaaggttttctaaactcttatgtgtttgatttcatcgtattagagatattcatatttaggatgttaattcaacatacttgttagtaaatctagatcttggtataataatcccaacaccatcttcatgtggcagtgctctccaaaaagaaagagaacactgccatcttcatgtggatgtgctctccaaaaagaaggataacagtgccatcttcatgtggcagtgctctccaaaagaaggagaacacttccatcttaatgtggatgtgcactccaaaagaagaagaacactgccatcttcaagtggcagtggtcacataggccatattgcacggggttcttgtgcaattttgactttatgttcaagtctaagcctttttatgcctatatgagtcaagtccttgttggtctccttgtcggattgaggtc

SEQ ID NO: 293626 - DNA, 957 bp, Cannabis indica
ccacacgcgtgttctaacacttttagtctgagaaaacatgcaaggggctgtctaaacaacccttacgcgcacggaaatcttgctgtgcaaggttggtgtgcgacattcctcggcagccccttcccatcacgcgtgcaccaaatccattttttttcgaattttttttaatttttttttattgatttttcaaggaattaatttcaaatttttttgtgtaattttgaatgtagattttaattttttcaaatgtcatatctaattatcagtttgaaattaattaatttttttttaatttaattttaagtatattagttagattttgaacatgaaaatagataatatctattctttttttctaataggctattcttatttttaaaatttgatttattttatcttatttttaaatttaaggtcagatattttatattttatattatttaaataattttataaaatgaccttatttgaaatttaaaataagatatattttaataaaataatctagataatttgaaaaatctaaccagatattttaccaacttttaaaattttgtgattttatttaaattaaattataaaattaaataaatgatattcatttatcttttattttattagacatttaattttttttcttttgaaaataatataaattttgaaaagctagttgatatttttgaatagatatttaggtttgttataaacttaatttttcaaatttatacgtttaattttaaattaattatataatttaatttaattaattttttaaaataatattttattattcagattttttgaaatttaatttagttaattaattaattaatttaaattaaataaatcctatgaccaatcatccaatttgttgcatgtatattttatttattgtttattattcaaacttattttttaaaacctattattgtttgatcttaattgttatggttaact

SEQ ID NO: 293627 - DNA, 322 bp, Cannabis indica
gagatggtggttactctggggtggaggaatcattaaaacccatctataataataaagctccatcagtgaagataaataactttgacgttttcaaaaacattggaaagttattgaactgaagaaaattctacactgtgttatctctattccattttggatagaatcagagatatgtcttctgtttattcagatgcacttaataagcagcaaagaattcagtattcttaaatgagtaatgcatatcaaaaataatgttgcataatgttttatgaaaacaaaggaagtaatggtggagaaagcagtagcttaccacaaacttaca

SEQ ID NO: 293628 - DNA, 655 bp, Cannabis indica
gtttattaattattgtttttatttaattattaattattatttttattttttttattaataattattttattattaattattaattatgaattattattaattattgttatattttttatggttttagtaataattattaattatattttattattaattaataattattttttaattattaattattgttttattatgaattattaattattattttattattttattatgaattattattaattattattttattatcaattaattattattgttttgttattaatgattaattaagattttttttcggtgagatttttgttgtaaattataactgtgtttttttaaatgtatgtgacaggttcaactgttaatgcgtgtgttatgtataatggtgtttgggagtttgatggtagagattgggtttataaacggggcgacaatttgacatttgacattgatccgaacctaagctactcaggtttggttgatgttttgtacgaagaactggatgtcgacaaagtggagtatgacttgaaattggaagtacattacaagtacaagaaaggctttgagtatcgccctgaagttattggaaatgataagcgtgcaaggtactttttatctacacttgcgaagaagccagatgaattta

SEQ ID NO: 293629 - DNA, 573 bp, Cannabis indica
ctccttaaataaatataatcaaaatcatgcacccctaaactttcatctatgtcagacttccgttagtaaaattggacaaaacaaattattaactccaacaatcttaataattttggggaaatttttaacagtctaaaaaattcaagaactataatttaataaatatcaatattcaagaagcaaaaattctaattaactctctctttttttaaccacgtcatatttacacatcaggtaacttctcgttcatttgatcgctaagtgggcaaattgtcaaaaaatttcaataagcttcaattagggctgagcatgaaatttaaaaaatcaaaaaaaccgttaaaaccgacctaccgaacatcgctggaactaaaactggcaaaaaccgaaaataaaaaaattgctagtttaaaaccactgttgaacggtcggtttttttttttgaattaataaactgaccgaaaaatcaaaatcgactgttatacatatataataatttattaagcttattttcactttatgtattgtagttactcataatatataataatatattattattttattaatattaaa

SEQ ID NO: 293630 - DNA, 530 bp, Cannabis indica
aaatatatgttataatttaattaaatttcatgaaacagaaacaaataattaagtatcttgaataaaataatattaattattaattctatttaagttctaagaaaaaatatttaaatttaagttggtctaaaattaattaacaaattatttttgaacttaaatatatttttctacttaattaaataattagaatataaattagttactaaaattactatctagaatcttttctttaaactatgtgtatttttctaaattaatttcgaaataatctaataaaaaattaatttcatttatttcaaaaataattatgttgccaattcaaatttaattaggttaaactagtataattagcctaacacaattatttaaataaggcaaatgagccttcacaattggggttatcatgtaagggagtgttggattcagtatatcgtacccactactaatggtctcctaactctcacacaagacccaaaggagagaaatttaaccttaaataaataattgttattcattgaataagccca

SEQ ID NO: 293631 - DNA, 484 bp, Cannabis indica
agactcggacctgcccgattttgatctcggacttgacttaaataaaatcaacaaatgaaaataaaaataaaaataaaatttacaaaatacatatttgttttttgtttttaagattgaaaaacaaaagtggttatacaacacattttgtttttcaaaataaaattttacttttatttttgtgattaaaaaatttaaaaacaaaaaatattaccaaataccaactaagtatttaatttttttaaataataccaataatagaggttctttttggagaacttataaaaatattgtaaaattgaagaaagtttacaaaaatactgtgacgtgaatttttttacatttttactcaatcaattttacaaaaatgctgagtttaaatttttaaaattacaaaaatattgtgttttagtaaaataaaaaaacaactaaaaaacaactaaaaaataactctaaaataacttaacaattagcatgaaaaaaatta

SEQ ID NO: 293632 - DNA, 603 bp, Cannabis indica
ctggaaattagaatcagatatgatatgagaatccagtatccggagttgttcaggttagatttcgaggacgaaatccttttaagggggatagttgtaaagaccgcatagtttaaatttagaaattagcagataattgagatttaattataaaaattatttatagatatttacataattatttatgttgttatatttgaattctgaatgcatttttatgtcatatagtaaaatttcataattttgcattttcggtgcccggcaacgtggaacgtggtgtatggctcagtaaaatcacaatttagtattttagtatagcggggcagtttatttagacattgggaatgtcgggattggtcgggaatttagaatttcccaaaataccctttaagtgccttttaatccttttagtgtgggaggggcaaaatagtcatttttccccataagcttttgtcctttagtggacttagtgttatgtaactatgtgatttatttgatatatgttagctgaaataaaggaaagatttatgcatttttatcatttattcaaaaattagaaaatttggaaaataaggaagttcatcctctcaagctctctctctctct

SEQ ID NO: 293633 - DNA, 507 bp, Cannabis indica
aaaatttaattaatttaattatgatatttggaattaaaataggaacagtaaatgtctaaatacaaaactacacaaaaaatcgaaagtttaatccatgaaatagcacgaaaaatcgaagaaaaatgaaaaaaatgcgagctgtacggacagtatgctgagcatactgcccgcgcacgcaaatgggagtgcatgtccgagcaagctcggtgctggggaagggctggaggatttccacgcgcgtagggacgtggttcagaaagtaagctcggtcgagcactgtctgaacgcgtgctgtccgagggtgtcaccctcgtccgcgcacgtggccctgttgcacgaccataatttttctgaaacttcaaaaaatcctaactaattcgaattaaatagaaattgagttctgtaaaaagtaaatggcataatttttttccatactatccaataaaataattccagaacagaacatcaatcaatcatcatataacacacaacacaacatgaaccatc

SEQ ID NO: 293634 - DNA, 629 bp, Cannabis indica
gaacccaaaaaaacacagaaactcaaaatataccatggatgaaccaagcttgagttttcaaactcaaaattgagcatccatgctaccaaacctgtagccctaatttaaaggacaccacgtgtatgattttataaactaatttaatactaatagattaattatttattaaaaaccgtgataatatgaaaaacttgaactaaaatataacactataagcggacattataatggcataaaaagcgtgtttcgggagtccctgttataaaaacttttgctaaaaaaatatatatgataactctttaaacaaaaaattaaaatacacagcagatacaaccagcctaaaaaaactcctgtcaactcagcacgcaggctggtgtggtcaatatgtacattgctggagaagattctcaccttatggttgatctagcttttctttgcctttacctgcaccacatagcacccgtgagtcacaaggactcagcaagaaaagtaataataacaatcatatagtttattattcgaatattgtcatttatacacaataagaatcaaaccatcacactttgttcataagatgaaatccaaatcactactggcatctgccacgaataaacattagtatacagata

SEQ ID NO: 293635 - DNA, 687 bp, Cannabis indica
tatcatgaggaaagaaaaaaaaacatgtggaatattaaattaagtttttggtatatatatattttccactatactggtggtatattaatttttcactatagtatttatgcttatgattgcagaatatagtttttatatgctattatatatcgtgaaaaaaaaatcatttaatagtatattagtttaagtttatggtatatttatattggtctaaggtatatcgtttgtatgtgatatgtatatcgtgaaggatagaaagaaaaaaaaactattaaatattaatttaagtatgaggtatagttatatttgactgaggtacagtagaaaataaatcaaagccatatctattaaaaaattcaggaaattcattaaaaaaatagacttatttttttcaaaaaaaaaaagaaggaaaaatactattttggaccctgtgttttgtaaaagttatcaattggatcctctattttgttaaatgacaaaatagaccccgtattttctaaaattgtacaaataggaccatgaattgattttttatcaaaataaatttaattataatatgatctaaaagttttatgacaaaactgtttaaattttttatatctattcgtattaggaattgtctttaagttggttatattaaaaaaattgtcaaaaattaagctcattaaggtcttatttttaccattt

SEQ ID NO: 293636 - DNA, 571 bp, Cannabis indica
acttcaacacaacttatcaacacccataaatcaagatgtccttcaatcaaaccaagagagcattcaaaaacttttcaaaactactccaatatttcaatgtcctcccaacaactccacaatatcaacaatactcaaatcaaagactacaactacctcttgatccacttcaaccaatccaaattcaaaaaaattttgtttcacacacaaacattcactcactatgcggcagccaagatatgatccgaatataaaatgaaaaaaattaaaagctcactcttgattgctcgctgtcgaacttggtggtgcgggttagagattgatgcgcctggttgtgagtggcgtcaggttgcaaatggtgaacagaggcaaagattggttcgaacggtgagtgcttggttgacttcgggggtgctactgctgagtgctcgaaacgaagatggaattgagagtagcaactggagctgggcatgggtcgtggttctgatatgagtgaatggaggttgagtctcggtttctgggtgcgattttggtggttcgaaggtgggttgggttcacgggagtggatgggttg

SEQ ID NO: 293637 - DNA, 517 bp, Cannabis indica
tttaagtgtagctctactactatatggaattgtttttgttaaccatgagaagtaattattagttaattataatatacaactaattaagttataataattttcatcttgtattgagatgtaatggtcttattatgtaagctagctagttaatcaaattatggttctttcaaatatatagtgtaatattattaatgtttttcaatataccaattattttctctttattcactacaagaaatgtcacttttaccagcacagttcgctactgcgtggtaaaagtaacttttaccagcgcatttcgccaactgcgctggcaaaaagatcaaagttttatcagcgtacatttgcagtggctaaaatctaacttttaccagcacatttacgcgttaagtaaaagtttttttgccagtgcttttcattttatgctggcaaaagttctaataccaacattaatttgccctaacccccttttgccaacacatcataagtaattctattttaccagcgcaatactaat

SEQ ID NO: 293638 - DNA, 601 bp, Cannabis indica
ataaaatttaccgacaaaattaaaaaaaaaattataataaatattaattatttatgctgctataaataaaaattaaatttacagccgttgataaatttaaaattttctgtacggctatttacctttaaaaaaaaaataatggggtacctttctatatttctgttttttttaactaacttttatctattttttattggaacgtgttggctccccaaatgtatggcctagtatatatgcgcgtgggaagagtgagacagtgagagtgaagagtgaagaggaagaggtgaccagagggtgactttgttcgcatgtgatgctcttctcttctgttgtaccattcaaagttttccaccctctatcatgaccccccctccctcctaatcctacgcccatctattcaaatttatttatttatttcttttttaaataataataataatatctaacccaagggcaaaggccaaagggcattgatagccttacctgccctaccctcatgaacttactacattatcatctgagaacgacaattatttatggttggactacacattatccaattggatttgccttttgctaatgtcactttatcaccattcca

SEQ ID NO: 293639 - DNA, 513 bp, Cannabis indica
taggagtagtatatatcaaaacgaccacctcgacgagtagatcacactcatgccaaccgtttgtcaaaacggtacacgaggtcaccggaaagtcgccggaaaggggcggagctacaaaaatgtcaccggaaaaagttgcgaaccgggaaaaatggtttagtgtaggttgttctcctcgacgagctgagtgtagtggtgaaaacctctcgtcaaacggacgccggaggtgaccggaaaacccgttcaaagtttgaaatcccaaactttgacttgcgatcccgagtcaacggcggcgagaggagcggcgccgcttggggggtgaggtcgccggcacttgggctttcgatttgtccggcgcgttgggtcgggcggtggccggaggtgggtcgccggagtgtggtggttatggaggtttatgggttttatttttggtattttaaagagagagaaagagagaaagatagatagaatgagagagggggacgaagggggttcagtaatattcaaaataat

SEQ ID NO: 293640 - DNA, 681 bp, Cannabis indica
acgatctaatacggcgttccaaacgagccctaaatgagtcgatcatcacaacacttaatgttgctgctattggttcacattgaagatacataaggtacaaagttgaaggacccaatgacatcagtagtattttatttggtggggttccttcaattggtacctattgtagtacaatcaagtcctaacccagaaagagatttgatatataataaaaaaaaattaattgcatgcaaacttttgagtaatttgtatgtcatctcttctaaatatattattaaaattaaacttttactactataaaaatgttataaaaatgtatttttgcttcaatttttaagtagcatataaagaacttacattggtttgtataactaacgttagaattataggcgcaaataattttatttttaactcacttagtaacagatgctaaaagacttttgcttcagttcataaccgaagcaaatagtaaaacactgacgcaaattagttttttgcttcggttatgaactaaagcaaaagaaatgaaaaaaaaaaacataaaaccttcaaaccaccataaacccttcgcaccaccacaaaaacccaacaacaacaacaataaatattgctaccacaacaatccattgtaccattaaaaagcacattaaacaaccaccatcccaccagaccaccaccact

SEQ ID NO: 293641 - DNA, 535 bp, Cannabis indica
aatacgacctaatacgacgttccaaacgcgcggtctgtattagcttgtattataatatttacaaaggcttcggggtcaacaccaatctccaatccaaacttgggacccagacccggacctagatccgtacccggaccccaaaccccggacccgatcccagaccccggaccctggacccaaacccggacccggacctggacctcgacccggacccaaacccggaccccggacttggaccccagacccagacccggacccgaactctgacccagacctagacctggacccagacccgaaccccgacccaagacccagacccggacccgagaccgggactgggactcggaaaaaataatactaatacaatataatggaatatattaatacaagtcaataccaaacatagtattgtattaaataatactaatacaatacaatacaatataacacaattcaacacaatacaatacgacataccaaacgagcccatatagtattatattaaagtatattttatataatatttttatataaa

SEQ ID NO: 293642 - DNA, 550 bp, Cannabis indica
gtacatagtcaaagttcagggggaaaaattactaattagacctaaaaaaaaaaattaaaaaggagttttttttataaatatggaaaaatgtggtataatttacttttttatagcataaataatttttctacatttatatgagttttttttatgctatatttttgttaaaaaaaaaagtaaaaattctatatttgtaaaacaataataagtttcgccgaaaaaagttaccggagccagaaaagtcgctaaaaaagttagtgtcgccgaaaaagtcgccaaaaaagtcattatcgccggaaaaattatcgaaaaagttatcgtcattagaaaaagtcactgcaaaagttaccagaaatagatgcctcacatataaacaaaaatagaactgattctataacataatgaataaaaataaataacacaaaataactcaaaccgattataatagaaatataaccgattctgtaacataatgaataaaaataaataacacaaaataactcaaaccagatataattaaaatagaaccggttctataacagtattataa

SEQ ID NO: 293643 - DNA, 518 bp, Cannabis indica
ccactcccgccccccacgaccatcatctgtctgcgtcgcccgcacgccgctcgcccacacgcccactgtctagtcgtgtgcctgcacatttcctattgtccgcctgcacgattgccattcgcctgcgtgctcgtgcaccgcgtgctgtctgcctgcacgcctgtcgttttcctgcacaattgccgtctacctgcatgcccgcgcgtcgcccgccatctgaccacacacccgccgtccgccctcgtgtcgcccactataacaccctaactagcataggcgtgttagcgtgatttttaacgtactgtgcagctcgttgctaatcaacgaggttattggaaaatgtgaataattaaaattttgctcatttaattaaaacataacatataacttttataaactttcgggatcccgtttacaaaatacagttataaaagtttactacatgtttacaaaatacttgtcgcctatcgacaaaacaacaaaagccctaatgtcccgaggatcgtactctccaggcc

SEQ ID NO: 293644 - DNA, 669 bp, Cannabis indica
taatttaatttaataattattatgaaaaatcattaatctgtaaggcaaaactatccctactcacatagtatataaagagaagctctgaatacaccaaaataattggttacacaatttatgttcctatcgtattttcagtacgtaaaataatttcattttgttttattgtactacactttagttatttaatatattctgtatattttaaaaataatttaaataatttatagtattgaaaaatatagtttaaatattttttttgcactcgtataaattttaatacaagagtgaaacaaattgttgaactaaattttaaaaatataaattattaaaattttattaaaaatttgcaagatattttaaataactgcaatgtacattgttatttttttttaaaaaaagattatacatatataaacataaggaagatgcatcggcacacctatttttgcatcatatatataagcccctaaatataaaaagaattttgtggttatcttaaaaaatacaatcatttaaatttaaatagtaaattacactcatgtatataatattttcatggtataacatttaaactttaatttgtaataatcaattattcaaaatttatcaaaatattgtaaaccattttaggatctctaacttgataagtaacattaaatatttaat

SEQ ID NO: 293645 - DNA, 518 bp, Cannabis indica
accgattttataacataatgaatacaaacaagtaacacgcaataactcaaatcgattatacaattgaaaaaaaaaaaattagtttctaaaatactgaaacataaattaaaaataaaactaatttcataacaaataatatctcataaaattagttgtatttttttttaatataatgatgaccttaagaattattaacgtcaatattagttactagtttgcctagcaaatgtaaatatatcgtcattatattgagccccaatatttgattagatcaataacaatattaacgaagaatactaaaacgttaagcacatttctatattattatatatttaaactaaacatttaaagaatataaaaagacttaattttaaaatggaaatagagtttatatcatctataccagcttttaacagaagagtagctctgttagacttttatttgggcttacattaaattttattggttttattaaaacttgggttgattggatagttctttgctgtgttagcccatgt

SEQ ID NO: 293646 - DNA, 764 bp, Cannabis indica
aaaaatagttaaatagtgtttagctcactctctctctctctcttcttagctagatgtagctacaatattattttgaaccaagagcttagctattatagctaaattatacatcatctattggagtcccatttatacactttagcttaattttttttttcattttttgagaggtacaaggtgtttacctcctctcttgtgagtgctcttagttttagatttattgaatatttgtttaaagagtaatttacgacataaatacttaaattttattttttatggtaataatatttaagttatattattgtaatttctataggtacctggaaatcaagtcaatagtcatatagtggtccttgattggtccatgttattaaatttttatttttttatttaaaaattaatttaaatatactaataagaaaataacacgtagataatgacttcaaacttaatgatcaggtacctacagaagttttagaaatattactaaagtattattactatcaaaaataaaacttagatatttatttataactaaaagtttttggagtgtagcgtattagtatttcacaatcatatattagcttaaaggtcctgggttcaaacccactcacctctctatttttcccatccctccctcaccactaagctagctttagtgacttatttataagtaaaagttaaacttaaatatttacgctgcaaattactcttatttaaattaagagtaaatagttaacctcaaaataaataaataagtaaat

SEQ ID NO: 293647 - DNA, 490 bp, Cannabis indica
aacacacaagatgagtgttggacggagtatcaagcgaaaaaataagcaaatatgccgaccaggagtacccaacagattaaagaacgatcatgttcagagaaaagtctaaactcaagaagtcagaaagtttttcttgagttagggcaaaaaagttcatgaagcttgaaaaaagcagaatggaaaacagacgcaatgcagttctaaaacaagccttacggctgaaagctaacacaaggacatggaaaagaagagtcacagaagtttcaaaccctagggtttcctacagtgttctttctacaacaaagttacattcaaagcacaagcatgcaaaggaaaaacataaagggaatcagaaacttactcaaagattcaagtgtccgggttcaagcaagccagaaatcgtctgtaaactcttcaacaactttgaagccagaaagctctctctttttgctctgaagttttctcaacaatgaagggtgatgaaatgagg

SEQ ID NO: 293648 - DNA, 837 bp, Cannabis indica
atgatcttgcttgaagtttcgaatctggaaagagccattttcactcgattgtttccagattggtttaacagcatgaaggctattgaggctgttgaacgaggtatgaaaaagcaattttcttcaaaactaaacgagataggttggaagattcaagagctcaagaagaagatgaaggagaacaaggaagagttaggaaccgttcatcatgaggattggaatttgaagttcaaggaaattcttgatttcaagattccagcaatatggcgcaaactggatctaaatgtaaagatcactaatgggaaaaataaggtagaagccttagctagctagctttagaattagtatatactataattaattgtgctactataacaagatttggaatctcggatgtatacttgaaattttagtttgcattctattaacaaagctggattttctagtgactcgtgttttaattgtcataatttttttgttagtgtccgagttaagatcaatttggaatatttacataatcaagtggaatgttctaatattataaagcaattaaaaataataaacaaaaatatatagcaatgaaaacaggattgcaattttgaaaaatgagaatcaagctagatgcttattaaaaataaactaaccgttattattctaacaacaagctcactatctattaacagaatttaaagcaaccctctacatgatctttgattaattgcacatacctaaaaaaacgacctacctagtttacttcgttgttctgtcactttttcttttgtacattgttgtttagttcacttagtaagcaaaaaaaaaacgtaaaaaaaaactaaaaaa

SEQ ID NO: 293649 - DNA, 735 bp, Cannabis indica
tattaggtattttttttattaatattttatattttataatatgtgtttgtattctagtgttttagtatcatttttataattttttaagttatgttttatataataattagtatattgaataataaataaggtgtaatattttaatttttatgtaatttaatatttttatacatttaaattttataatatgagtttgtatttttctagtatattagtattatttttataattttttaagttatgttttgtataataattagtttattgaataataaataatgtgtaatattttaatttttatgtaatttaatatttttatacatttaaattttataatatgggtttgtatttttctagtatattattattatttttataattttttaagttatgttttgtataataattagtatatttaataaaaataatgtgtaatattttaattttgatgtaatttaatatctttatacagtttaactttttttaaaaaaaaaaacctttactctaagcaaatgtattacactaatattatcccaatatttttgtatttttttttagcttactatatctatccttaacactcaacaatatctatcctatgtattaatattattcgaaaattactctaagtatttaaggattatctaaatatatataaaaaaatattcttataaaagtaagttaaagaaaacataccttataccaaaaattatatacttgacttccgataaagtc

SEQ ID NO: 293650 - DNA, 618 bp, Cannabis indica
ctcagatcgggattggaacttgggactcgcacccaacctagaacaaggccaaggatgcgaacccacacccggagcctgatctcgacctagagtgaaatccggacccgaacccaaactcagaccaagactcgaactccgacccaaactcaaacccaaactcgaactcagaatcgcaaatggaactagaatcgaactaggactaggaccaggaccaggacctaaacccaaacccgaacccagatcaaaacccagacagagaccgaaacccgaaccgagactaggactcgaacccgaacctagaccgggacccaaacccacacaataaccgggacctagacccagaataaggatacggacctgggaaacagaactaggaccgggacctagtacccgacacagacccgaacttgaacctaggacccagctcgtgacccggcaccagaaatgaaaccagactggggctcgagattgggatccgaatctggacccagggcttggacaaaacctgtagtcgttgtctggatttgggacccagcgcttgacccaaaccctgacaacactactacaaaaaggagtaatttcgtcagttttttagtgacatataatgattttgcgtcg

SEQ ID NO: 293651 - DNA, 584 bp, Cannabis indica
ttcattaaaccttttagccatattgcctcctttatagcttcagttgtggccacatactcagcttctgtagttgatagtgccacaacaggttgaagctgaactttccagcttacacaattacctccaattagaaagaaataggcagatgtagatctcctattatccctatcccctgcataatcagaatcactatagccttcaattatagtgttagccttctgtctattgtagattagtccaaccttagttgtcccaagtagatatctgaacacccatttcatggctaaccagtgaacttttcctggattagccatgtatttgctaagtacactcatagcataacctaggtcaggtcttgtgcttaccattaagtacattacagaccctacagcattagagtagggtacatccttcatagattcaatttccttttctgtcttagggcattgttccttagaaagtgtgtactgactagtaataggttgcttaacaaccttagcatccctcatagaaaacttatctatgatcttctcaatgtagtcttcctgtctaagtattagttttcctttatccctgtctcttag

SEQ ID NO: 293652 - DNA, 640 bp, Cannabis indica
tggttggggcgttaatgagccttagtccacgagtctgtgtatttatgatagtatttattacagagaatgttcttggtggagtttttactcttctagttcttatgaaacccagaattctcgacccctctttaatgagctttggggggtatttatagtgtttttgtggggtgatccctagaattaaggtacatgcatttctgtaactatcagtaaagccacacattcccaatgaatatatcataggtaatgcatggtctaatccctaggttctgtagggattttatgagggcagtccttaatcctttttgactgatgtgattcctcacagagtagccgtcactagactttattgatcatagcctagtaggtacagattgggggttgtgccgtcagactttattgcgtatggcagtttcaatacgcctcctcccatgcggcattaaatgcgagatgactgttcagatagaatctgacaccacccggagatgctttgttgcaaccttgctctccgggagcatacgagatttacatgccttctccgggaggcatgtctaaggtaatcccgcgctaaagaagacttagctgatttattcaaatgctaaacccttttcatccacgtgtcatcatccggttggtccac

SEQ ID NO: 293653 - DNA, 527 bp, Cannabis indica
aagttaaaaattaatttgttaattaattttagaccaactttgttatcttaatttttgcactctgacatgtcatcacatgaatggtgacacatggaatccacttggaatatctgcccgggaagcatagtctgaacaggacatatcgctggcacgctcagagcaaagtattcagcaatccgcgtagagcaaccaacacttagcgaattcaatttttgcttcatgagtcatcagcacaatccctataactcagggatcagtttacgtggatatggcatacacatgatcccactatcagtgtattcagcctcaatcccacgatccttgtattcagcattgatcccacgatctttctgtttatacgcattgtaacgagaggggaaactcttcctctccaagcttactagccctacaaatattgatgtatattcactgggcaagagattgatcaaaaagcagttgagctaagactatactattatctaataattatatatttagagatactattgaaagagctataagaaaag

SEQ ID NO: 293654 - DNA, 491 bp, Cannabis indica
gtggcctcccggaagctgcctgggccttagaatatgccttctcctgagccttccggtagagatagtcctggtacttcttctcggtagtggctataatctcatcccagaaggtcttctccgccgcaggcaccctcacgttgggacagataacccaagagaggttagagtcctccacggattggtgcggcaggatgagttttgccttcctgcagttctccgtagtgaccaggttcccgacgtaaagatcagcctggtcataagaggcaaaggcctgggctctccggagaaagacctgagtaggtgcggtccgttcgtaagaaggaatcctgacccactcagtgaggagctccggatggcaatactccttaacatgagtttgcctattatacgggaccaccccttcattaggagggtgggcccggaacccataaaaccgtccttaagtttgtccccctttttggggacaaaacaagttcgtaaaaatacaatat

SEQ ID NO: 293655 - DNA, 549 bp, Cannabis indica
cgatattagggggagttgttttgatcgaataaaacagaaaacaaatgtgtaatttcagtttcttcacagtttttctgattttttttttcgtcattttcagtttagatcattgcaggtattcttttccagttgattttgccagaattaatagttgtatttttctcgttttggtttcattttggttgttttgcggttttgaaacgagcgcgtattttcatcttcatggttcgctctgtacagctgaaggcttagtgcatgtggtatttttgtaaatatttgtatgtggactgtataaatgtttaatgggccgaccaaagtatttttgtaattttttttcctttttgtatttttttgtttttttccctaattaatttttaaaatttactaggtaatagaagtcaattccatttctcatatagttcaataggaagtttgataaaagaatgaattatgtcaattatgaagctagtgggaattcatctcaagggattgaaaaatatgaagaacttggacacaagttgaaacaagtgctagaatgcaaccaagaaa

SEQ ID NO: 293656 - DNA, 470 bp, Cannabis indica
aatagttgctagggaagcttaattgtatttagctactattgaaattttcagatatacatacaaatatgaaatacctgggtttttttttgctgcatcatgtacaaaattgcatgtatatctgcatatgactcttgtggacaacctctaatatactccttagccttctctcgagccctccaagctttttgatatgaaattgagacactgtagtcatcaatcagatcatcaactatttcatttggagggtaatttcgctttggatttatatatttgctctttataacattcccaactagtttgcttgttgcttgaggatggtctccagaggttatgtctattgagcaagtgtgtgtatattcaatttttcttattctgaacatctttgtttttccatgctttgatgctagcaaactccatttgcaattgtcatccaaacatactagcttgtaatctactgctgatgatctttt

SEQ ID NO: 293657 - DNA, 596 bp, Cannabis indica
tttctaggaacagatgatgttctgcaaagtcgttaccggaaaaaagttaaaagagtttcattttccgatgacgagggtggtggcggaataaccagagacatgatttgggttgttttggtttaagctttattactttttatggtaatttatatattatatttattacatttattattttcatatatagttattacatttattattatatttatataattttgacttttgttattaatagtatcttttcttgattttttccttttatatgtttagcagtaaagtttgcttcttttcatttattgaatcagaaatttctaaatttctttctttaatattttattttaataaattttattattattcttaatttgtggtatttattttattttaatatctttaggaatttttttattttaatattttaaataattaaataaatatttttttcttttaatttattttccttgatttaaactattgtatttctaccctattgatagtttataaatttatatttagcagattattattacttaattcagtgccagtttgatagttgagttgcgccattgataatggttttggtgcctttcaag

SEQ ID NO: 293658 - DNA, 847 bp, Cannabis indica
acgtttttcgagaaaattctttgattagcaaatattgcactataattgaaaaagcactgtaggtgccttagcattaaggcgttacatacttgcactccataaaataataaagacactctattattaaaaatatctaaataatttttaaaaattactcttaatatttttttaaaaaacttctcacattattttatgttaatttcaatctttattttgatttttttcataattttttaaatcatttatatttttttattttttgtaagaaaattttatataaatttttttgtcacaatatttaaaaaataatttattttgcttgataggtatattttttaagcttatgaattagaacaaaaaaagttaaaaatatagtataattaaatatatattttatataaaataaaaattatcaaaattagtgtttttgaaaattttttggggctttttttatttttacacttcaaaataatttttttttttacatttttacgaaattctacatagaaacctttattgcaactagcgctgcaacctaaattgcaacaaaaaatcgtacagaaactcctattgcaactagcgctgcaactactttagaaactcaaaccctaaatttgaaaaaaaaaaaaaattaaaaaaaaataagtatatggaataatttctaaaaaattttagggtgtaaataaaaattttctctaaaaaaaataggtaaaaaattaacttaaaaaaacttttagagggtaaatttagtgaattaacccctaaaaaataagtaaatatcaacttatattcatggtacaatatggtggagtggagataaaataagatgtgtacataggtaatatgt

SEQ ID NO: 293659 - DNA, 705 bp, Cannabis indica
aatctttaaaaataaaatacattcaaaatcttaaaaagagcaaaatcttaaatgaaactagcaatacgtggctcggcacgtacattcacctagtatatatatatgggtatgcttttaatgggaattacccatgtatgactattttattcttgaccattgaatcaaatatctaatggttgataatttataatcattaattaaatattaaaaaattaatatttcttatttttccacttctttgattttgttattctctatattcctaaaatagataaaactattaatagaaataaaaaatttataaatggaattgttatttaaaaaataaaacacactaaaaaactaacaaactattttttttaataaaaatcaattttaaagattaaaaagaaaaaagtgtatatttatctttttataaaatttcttcaaactagaattctaaattgcattactgagaacaaaaagctttaagctataatacatataaaatgtataagatttttcctaaacctaaaatctttaatttcataataattaacaattatttatatgtttttttttaaaaaaaaaaaaaaaaaaactgaagcttaccaaaatctataaaaacaaaaccaatgaaagaaaattttaacaaaaaaaaaaaaaaaatagaacgaagaaaaaagtagtcataaacattattgaataatgacaattgccaacaca

SEQ ID NO: 293660 - DNA, 640 bp, Cannabis indica
gaaaaaaaaattaataaagattataatgaattgataataaaaatagtaaatgaatagatattgatgatatattaatgtgtttcacttattgtttattaatttttattaatattgtcagtcaaaaatttaaatagccgctcgagaagcgcagcatgttgcctagtatatatataaagatgaagtataagacggtgatatgacactttagaattactctaaatgcatttatctattttctctttaattctctcaatttttaattttttattaaggtaaaattatttataatatatttatgaaatttttacatgaaaaatccattttacacaatttattacaaaattactcatacacgcctatgactacatttttacttacaaagttgcttttattacacaaataccacttagtcatcattccatgcatacacgtgtgctctccccatccatcatcaatcaaatcctactctcttccctctcttttttcattttcttttcatttcattttcgattcttcatttctgttttctaagttcatttgaattcaagtaacctccattaaccacccataattgatcacgtttttccctcttctttttggttcatccacgaattttcaacttcctcttagcccacgattt

SEQ ID NO: 293661 - DNA, 666 bp, Cannabis indica
tttgtaagtttccctatttttaaaaagtactatatattgaagtgtttttaaaagtaagagtgtcaaaaatgatgtgaaagaaagataaagtaaatattatatttttagatggtgtataaatttttaaggatgctaccattagagatgttctagtgtaactaattaatgacaataatgaagtattaagttctaagcatttaaaaattcagaaattaaaagatgataatttacatttttttcttttggatgaaagatgatactcttatggatccagctttaaatttgatgatctttctgtagaaaaagtgaagactgaattaatagttatgagctgaaaattttatcttctggtcttttcattaataatttatttatgtttataatatgagaaagaaaaattgtttgaattttaaacttttatactctaaataaaaatatataagatcaatataatggtacttgtatttccattcttgaaaaaaaaaatatagccaaaatgaaagctcaatattaaatacattgtaatagtatactactacaatacaactattaataatcttttaaaaatcaatatcataccaaacataccaaataaaaaataaatcataaaaaagaaactactaatataaaaaatcacacagactcattacaaaataaaataaaaaa

SEQ ID NO: 293662 - DNA, 579 bp, Cannabis indica
tttagggcacaaaagccaacattacctgcctggggcctttcctgctcagggcatcagccactgcattagccttcctaggatggtaaaggatctcacagtcgtaatccttaaccaactctaactaacgcctctgtctcatattgaagtctttctgagtaaagaaatatttgaggctcttatggttagtataaatttcacacctctctctatagagataatgtcgccaaatcttcaaagcaaacactaccgcggtaagttctacatcatgattcgggtatcgctgttcatattccttcaactgacgagaagcataggcaataacccgatcgacctgcatcagtacacaccccagaccatgtttggatgcatcacaataaaccacgaacttttctgtatcagaaggtagggctaacactggagctgtgattaatctttgtttcagctcctgaaaacttgcttcacacttatccgtcaacacaaaacgctgattcttttagtaagctcagttaagggtattaaaattttagagaacccttctacgaaccgacaataataactagccagacccaagaaacttct

SEQ ID NO: 293663 - DNA, 755 bp, Cannabis indica
gaaacttttcaaattagtttaagattacgatttagacttcaataccaacaatataaagattatacaatttgctatattcatatgaaaaccgaaaagtgcaactagcaaaaagagaaagtaaatttttcaaaaaaaaaataactcatttaatcaaactttccattaaaagaattcttttgcttttatgaaaacttcctaaatgaaaatgacatccataaaaatgcaataaaacacaagaaaaaaaattatattattcttacaaaatattcacaatatattaaagaatattttgataattaaattacaaaaaaaaagacctagaacactaaaaaatgtgttaatatactaaaagatgtgttaaatggacaagttcatgattcattatacctgacatatttgttagttcatttagtaaaactgaataatttataatcgactacatatttaaaacttatatataagtagtatgtctctttgttacaaatatgtctctttgttagaaattatctccccatgttacatttttttttctatatttattctgtttttatgaacaatgagtgatgtatatgagaattaaaagatttacgagttgtttgatattattttattctctgttttaatgttttcaaaagtgacataaaaataattttgtcattttccaaaatgcaagacacgtttttgctaaaaatgtttttagaccttcttaactctaaaaaataaaataaaccttcaatatcccacatctcaacatg

SEQ ID NO: 293664 - DNA, 469 bp, Cannabis indica
tgtaccacatgcaggacgtacctcccctggtactcgtgttggtaacactataactactctaaaatcctacactgtactaacacccttaaaaccacatttccattagtgttagtagtataaacaactaatacaagcataaaatcatatatatatattatttatgctatcttacttcgttctagattcaagcgtgccggtcgacttgaatagaaaatccttgagttaaacggaggtcctaagtcacataacacaattaggtaaattactcgaacaactattccaaaaccctagctcaaaaccaagggtaatctggatgacatatccaatatactactaccctaaacgctaagggaaactaaactatgctcgggaaataactcagattaagagaatttggaattttagggtcctggcatgtaaaccggttaaccggttttacagaccttgtaaaactgttggaaattatttt

SEQ ID NO: 293665 - DNA, 733 bp, Cannabis indica
taagtgcccgaaccgatttcgtcctcgatttcatatggtccttcccaatttggcccaagtaacccccacccaccggttccggtttcggttggggtcgtcggtaggggaaacgtacctttccttttaacgttaaaccgaacctaattacttccttaacttaaaattaagtaagttttaactttttcgttttttggtttttacgtttaacgtttaaggttaaaaagtttaaaaacttttacgttttcgtacccttacccttttttcgttttagtaaagtaacgtcgtccgacctaccgttaccgttttagttttggtacgtaccgttccccgggtacccgggttacgttttccttaaccttaacgttagtacctaccgacggccgttccttttcgtttaggttaaaaggtaaacgttcgttagtttagttttaggtacgtacgtaagtacgttaacggttaaccgttcccgttccccttaccttagggtacggagggaaacgggtaaaacgttttaaccgttttacccgggtaaccccgggaacctacgtccgttccttaccaaacccgtaaacccggtacccgaccttagttaaaagggaaacgggacggtaggtacgtacgtcggtcggttcgttcgtgggggtcgtccggtaggcccataacacccttggcaactcttcaggccagttgtttttgcaggccagcaactttttcttcaaggtgacctttagga

SEQ ID NO: 293666 - DNA, 502 bp, Cannabis indica
tttaaagttctagagcataactgtcgaaaaaaattacacagctgagtaatagttgttgcagtgtcacgaggtagaaatttacggacaccaaccgctagtactcgctgcataatgacatgacaatcgtgggattttaacccaataatgttagactcatctggagaaactttgctctttaaatttgaacagaagccatcgggaaactttattcctttaacaaactgacaaaaaagttgtcttttctcacgagtcaaaacataaggagcatgcggtttcattagcctcccattcccatcttcataaatccacaacgattccctaatacccatcttctttaaatcatgtcgcgcattggttgtgtcctttgatttatcattatccaagatggttcctaggagactatcacacacattcttctcaacatgcatgacatcaatgttgtgttttaaaatattcgtgctccaatactccaactcgtagaaaatacttttttcctccaatt

SEQ ID NO: 293667 - DNA, 681 bp, Cannabis indica
atcgataacaactcgcataagtgactcgctaaatcacaatcgggacttaggtttaaaaccaaaaacctatctactgcaacttaatatggcaataccctaaactagcagggaatcaaccaactagaaacctaaaacagatgcaaaacgacaagctgaatttttaagtttccctgctacaaaatccgggtaaccagttttacaagcattgtaaaaccggttagccggtattacctagaaaaaccaaaaaatttcaaacgctaatcaaatcatttccaaactcaaccaaactttccatacctgcataatacaccccaataaaacattttccaagtgataaaacaactacacatgctcagaatcaaatttcaccattagagctccaagtttgagttctaaaactcaaaacttagttaaacttactaacaacccctaaatcatgctcaaaataacatttctaaacatatttaaactccagaaaactaactcaaacagtaacagccgctaccaaaacacaaaactctaattcatgcaaaataccattttcttaacattcaagaaaacaagaataggagttaagagattataccttggcttgagactactacaatcagttgagaatcaaaggaaaaagatgaagaacaccaaccctagctgccctaggatttgagagagagagagaga

SEQ ID NO: 293668 - DNA, 590 bp, Cannabis indica
atattatgttcttcacaataaagtcttgagatttctttgatgtaatggttgcaagtggtttggcttcagtccatttagtaaagtagtcaaccgctaccactgcgtactgcaccacacctttacctttaggtaattgtccgataaggtcaattccccaaatggcaaaaggccacagactttgcatctatgttaactcattgggcggagctcttggtatctttgaaaatctctggcatttgtcgcacttcttaacataggctctcgaatcttcgatcatcgttggccagaagtaaccttgccttagaattttcttggataagctctgtccggtggcatgatttccacagaatccatcgtgaacttcagataggagtcgtacagcttcgttttgagtggcacatctgagcaatggcatcaagaatcctcttctgtacatgactccttctactatgatataccgtgaagctttccttctcattttacgagcttcattagttatccaggagttccctggagttgaggtaggctgcttttggcgtcatccagtttggggatgtatcaatcattttgatttcttccgtgccagtgat

SEQ ID NO: 293669 - DNA, 582 bp, Cannabis indica
tttttcaaaggcaacatggcattcattatcaaagacaaaagcattttcttttccaagtaaatgacataaagggtgtgaaatttttctaaagtcttttattgaatcttctataaaaccagcatggcctaagaatgatctaatttcttttactgtcttaggtggaggaagttttgaaataagatctacttttgctttatcaacttctattccttgagatgaaatcacatgacctaagacaattccctttttaaccatgaaatgacatttttcccaattaagaactaaattcatttctttgcaacgaattaaaacaagagaaagatggtgcaaacaatcatcaaaagaatttccaaacacagaaaaatcatccataaacacttcaagatttctttcaaccatatcagaaaatattgcaatcatacatctttgaaatgttgcaggagcattacaaagaccaaaaggcatgcgacgatatgcaaaggttccaaaagggcaagtaaaggtagtcttttcttgatcttcgggggcaatggggatttggttatatcccgaatacccatcaagaaagcaataataagcatg

SEQ ID NO: 293670 - DNA, 1052 bp, Cannabis indica
gaataaatatccattacctaggatcgatgacttgttcgatcagcttcaggggaagacggtcttttctaagattgatctccgttcgggttatcatcagttgagaatccgagaggaggacattccgaagacggctttccgcactaggtatggacattacgagtttctggttatgtcattcggactaaacccaaatgcccctcgtcgacgacgacttacttactaggtacggttaaactttaagtaagtaaagtaaggtaagtttacttaacggaaaggtttaccttttcccgtacgtaattacttcgttggttggtagttagtttggttttagttttacgtaccggaaccgaactaccttcccgttcggttacgttaccttcctaacttaaagttaaaggaaagggaagggacgactagtaggttaacgttaactactttcctcgacgaagtaggttacggttacgtcgaaccggaaccggttccgttacggaaacgaaaccaaacgaacgtttacttttagtccgaaaccttaaacttaacgaaaagtaaagttggtaagttttaaggttttcggtacttacttcctacggtagggttccgtttcccttttacgggttacgggaccaacttagttttaggttacgaaacgaaagtaggtagggtactaacggtaagggtgtactccgtcgggaagatagaatccgtcagggattggccgagaccgaagacagtgacagaaattagaagcttcttgggtttagctgggtattatcgtaggttcgtggaagggttttctaaaatttcaacacccttaaccgaacttacaaagaagaatcagcggtttgtctggtcagacaagtgcgaagctagttttcaggagctgaaacagagattgattaccgctccagtgctagctttgccttcagacaacgagaaatttgtagtttattgcgatgcatccagacagggtctggggtgtgtgctgatgcaagccgatcgggttatcgcttatgcctcccgtcagttaaaggattatgaacagcgatacccga

SEQ ID NO: 293671 - DNA, 498 bp, Cannabis indica
tgatataatgtgattgtttgaggcttgggttttgtagtataggtgatgggcaatgtgtttttggctttgatttggttcaatttgatgaaaaaataaggaaatttgaaacttttaggttggtggtgttcttgaatattgaagaacactatgaacatgaaaagtttcaatttccctccattttttcatctttgattttcatcaaattgataaaaatgtgtttgtggtggtgaacattgatcttggcctttttttttttttgtttcttggccgccccccaagatacccctttggggggtcggggtggtaccccgaccacccttcttggaggtaggggcagccacttgatttggcttccttggatgtcggggtgacatcccgagactaggtgccattgccgatccttcttgcttgatttaaaagtcaagcattacttttagataaaattatccatagctaattatggcttcttagcttggataaatgatggaatattgctac

SEQ ID NO: 293672 - DNA, 506 bp, Cannabis indica
gggattccccggtctaaatggggaacggggcgacgaggatcacactccccgccccgtacggggacccgtttagtattttatcttatattttttaataatatttttataattttataattttatgttttgcatttttttagtatattagtatttttttcatgaattttaagttatatttttggataataattagtttattgaataataattaatgtgtaatattttaatttttatgtaatttaatatttttgtatattaaaaaatttcattataaactttattttattattaggggattacccgccccgtcccccaccccattaggggattccccgcccccatccccgatgggaaataagtggggatggggattaaaattcttaacggggatgggacgggggagtactccccgccaattccccgctccgtgtgcatccctaatcacaaatctaagattttccttaactatcgattttcttcaaagtctaaaatttgtgatattttat

SEQ ID NO: 293673 - DNA, 1129 bp, Cannabis indica
aagcgctgctttaactccaaaaaacttttctcacaccgatcagtccaaacaaacttcaaattctttcgagtcaactccgttaagggtacagcgatctttgagaaaccctcaacaaatcgacgataatacccagctaagcccaaaaagcttctgacctcagtagccgattttggtattggccaatcccgaacagcttcaatcttggccgggtccaccattatcccatctttatctactatgtgccccaagaaagagacacgagataaccagaattcacactttttgaatttagcatagagcttgtggtctcgtaatcgttgcaatacagatctaagatgcaactcatgttcctcttccgattcagaataaaccaagatgtcatcaataaacacgatcacacatctatccaggtaatccttgaatacccgattcataagatccatgaatgccgccggggcattggtgagtccaaaagacatcactagaaattcataatgtccataccgagtacggaaagcagttttcgggacatcttcctctcgaattctcagctgatgatagcctgagcgaagatcgatcttggagaagccatcttccctttcagttgatcaaaagatcatcaatcgagtaaggatattgtcttgatggtaagcttattcaactctcggtaatcaatacacattcgcagagaccctctttcttcttcacaataataccggagcaccccaggagagtaactcggcctaatgaatcccagattcagtaattcttgtagttgtatcttcaattcttttaattctgctggagccattcgatacggtgcctttgatactggttccgctcccggaaccaactcaattacaaattcaatctcccgggtaggtggcaatcccggtagatcttctggaaagacgtcaagaaactcgcataccaatcttgtactctcaggtccagatgtcacaggttggctggtatccactgcagtaactatgaatcccagacaacctctgctcatcaggtccttagctttcaaaagtgttattcttggtatgcgtgccccctgaactttacccacaaacactgttgggttggcactatcaggctcaaacaccaccatcttccgcttgca

SEQ ID NO: 293674 - DNA, 525 bp, Cannabis indica
tttcaactcattgtcttgaacaaatgccttccaaccaccctcgattgtggctttcgaagatgttcctagtggcctgacatagtactttacacaccaggtcctcccatcctgaaccttaaggatcacatcttgaggactattactggtcccgacaaggtacttttttccaaagagagatggcataccctagacattagatgaacacaagagtaaaatcaatatgagaaacatatttgaaaagataaacttgtaattaagaagtttattatttaccatacaatacttggatttggatccaacaaatgatggttgcatgggaacaatgaaaaaggggtcttcagatttaaagtcttttactctcttgaaagcttcatccttttcttttcttacccaactcctgatttcttataaaattttcaggttccaggagattctccacatactttatatgaaggttcaattacttctttctttggaaatatgtcatgtgaaatcatacttgtcattgtcataattattgctagt

SEQ ID NO: 293675 - DNA, 537 bp, Cannabis indica
aatagataaatggttgagaaaaatggcaaaaatttgactagtgatggacccaaatagggccggccactaactcctattttttgctattattttatcattttttattctaaataattcaatcctaaccctaagtgaattagtataaaatgaaaagaatggtctcaaaatccaacgaatgactcttgacctagttttcttcttgtcagacaactagagagtttgagacttcttcttcttcttttctctcttctaattcgaaattcaatactcttcttcaccattaaatttcaagctttagtgattgagtgcatgcccatccatagcaagttagtcctcaataatagtgtgtaagactgtgaagaattcaaacaactgaaggagtttcgggctcagatcttgattatactatgggacacaaaggatacaagagttagagatctgagcataaggattcatttaatttcgctgcaaccaatgtaaggtttttcatactttatatgtatttatttttatcataaaatatatttcaacaactgg

SEQ ID NO: 293676 - DNA, 706 bp, Cannabis indica
cctagtctcggttcgggtttaggtctttgtctgggtttttatctgggttcgggtttgggtttaggtcctggtcttggtaatagtcctagttcggtttagttccatttgcgattctgagttcgagtttgggtttgagttcgggtcggagttccagtcctggtctaagtttgggttcgggtccgaatttcagtctaggtccagatcaagctccaggtgtgggttcgcgtcccaagttccattcccgatctgagtctggattaagttctgggtctaagtccttggttctcatcctggtctgggttcgagtttgggtccgagtccgagtctagctttgggcctgactctaggtgtgggtttgagttcgggtccgagtttgtgtctgggtttctgtccaagtctggaccccgatctgggtctaggttcgggtcaaggtcaaagttggggtcccgagtgcgggtcaaagttttggtctgggtcaggatctcggtccagatctaggtaaagcatttcgatcccagtctgggtcttggtgcgagtccaggtttgtatccggatctctatctaggtccaagtctgtgtttgggatcatctcccagatttaggtccaggtctgggtctcagttccggtctgggtacacgaccgtgtccggcgccgagttccaatctcagtttgggtctgaggctggtctgtgttcagttctaggtc

SEQ ID NO: 293677 - DNA, 762 bp, Cannabis indica
ttttcgtttggttaagctcgaaggaaatcatcctttactttctattcgccagatagaagctatagattccatatttatgttagcgctcccactcaattgcactaccgtgttcccaaaatgtacgtatcaccctgacccaaaagtaggcttaactaacaaatcaaagaacacgaataacactcttgagattgaacctaatcatatcaggattaagatcatttgatctaggatcaacaggtgatattgaattgaatagatattacggtaaattctaatatatctaatcaaagttcaatatcggtcccttccgatgtatactccatacatccgatactggtaaactttgccaatgtcctggaaaggacataacacttttccaaggtgtaagaatacctatcgctgattataccatgtcagtctaaatccagtgttctgacaaatcagggaataaactttcgaacatataattaagattatattccactgtgctgacaacactataatcattaacaaattcatatgttctggacttaaatagaattcatacattatatatataatcatgaaataaatcatgtgaaccatgcaacataaaatgttatttctgatctttattaataagtaaatctgattatattgaaatgggttttatttagggcacaaacccaacagtcccactgtacaataaaatcaagataaaagaaaacaaatcagagcagctagaactatgggtccatagttgtatcactgccatcagtagca

SEQ ID NO: 293678 - DNA, 582 bp, Cannabis indica
tgacacaaatactaagttctcaatcaattgctaccctcaacttctataagaaatacgtctaagagtcactattctcactatcaatgataccataagcaaccggaagcaattggtgttcgcatcgtatgccacaacaactaacattataccgccatacttcgtcttcaagaaggtaccattgatactcaaaacaggacgacacaaagtaaatcctcttctacatgcaccgagtgatataaaacagtacttaaaccgctcatcctctaaatacaagtcagtaatggtacctggattattctgctccagcatgtacaagtatccaggtagcttcatgtatgaaaactccggtgtacccctagcatacgtgagtcccatctctctgcacctccacgccttcacataactcatctggatgccatagttgtcaaacatgtccctctgtatgtctttagccttatacttagttccatcttgggtgtacttccccttaataaggtggccaaccacccatggtgctgcttgacgatgatttgaacatcttgcattcaggttacatgtgttttcgttgtgaaatacagtgac

SEQ ID NO: 293679 - DNA, 517 bp, Cannabis indica
ccccccaccgggtcgagggcatcctaaacctatacagacgctcgtcgaaccctacgggcctacgactggcatattcgccaacagaaggaacataatgaattaccaaaggagacttaccgccggcgccggaagtgctggcaccaggagccccagtgtttggctctggaaccgaaggctgtggcctgggagcccttctctccgatgaatccccaatgtgaaggggcttcccggcacgacgatctccaatctcttcttgaagaatcttgtcaaaaaatttagcctcggacttcccggcaatcgcctgacttcttctctccaccgggctccccacacggagcaccctcccggaggccgcctgggccttagagtacgccttctcctgggccttccggtagagataatcctggtatttcttctctgccgtggcgatgatctcgtcccggaaggtcttctccgcgaccggcgccctcacattgggacagatgacccgggagaggttagagtcctccacggattg

SEQ ID NO: 293680 - DNA, 648 bp, Cannabis indica
atttcatacgtaattttaaattattttttaaactattttttaaacatttagaaaaaaattatttgtttgttctattattattaattaatatagttttaaaaattaattaattattttttaaatatacttaattaaaaaaaaaatattaaaaaaatatgatattttagttatgagaaatgctaaaaggcaatcctccttgataattaagcagctagcaggtcttatataacttaaaaaaaagatttagggaatattgttaaccaatcgtaggttaccacgagcaccactggtgtcaaataacaatgctctttaattataattatgtgatacttgacattaaagttatcatttaaaaaaacgtaaagtatgcttttgttaaaaattaattaatatttttaataaaaaatttaaacgtggtagaaagcaattaaaatattatttcaagtatgacgtacaattgatttttattattattattattattattattaataatattatatcttatttttttaaaagaaaaagcatacacattatcatttttatgttattattattatattttttttttgaaaaaaagccaaaaacgtattaagatctatatattgattgatattttatgtatgtatataaacgaaatttatgatt

SEQ ID NO: 293681 - DNA, 509 bp, Cannabis indica
tgatgcaggaggggtaggagccccgccaacaaccggattcccaccagactcaatcatacatcccactacaccctcagctcgcagtgctttatccaccatttctgcataagtggttttgtcgtcaatagtgattattagatcgtgtctgatttttgcatttaatccatccaggtacttctcctttttactgaaattggtttgcacaattcccgaggccaaccttgccaagcgatcaaattcagtcgtgtactcagtaacattcgtattttctttctgagtcaaatgggtgaattcttttctcttggcacttttgacctcattatagtacttggcattaaacagttcctggaaattctcccaggtcattgtggtaacgtcatgaatcatggacaccatgtcccaccaaactaaagcgtcttcttgaaattggaaagggcatagaccactctatcattcccgtgacgcccatgaaattcaaaatcctggtgatcacagttagctattgctcg

SEQ ID NO: 293682 - DNA, 610 bp, Cannabis indica
atgactttgttgccacttaattctttaattttatatatatttagcacatgtatttgtaatttagtgattatgttgctacttcttaattttgatatttattaaccaataaatgagtcttgatttaataaataaacttaataataataataataataataataataattataatatattagggttgtcgatgttttattgacggtaagagtaccaaggttggagaagacactaatctacaatttttttatggtttcttggttatttctatggttgtgtgattttttttgttttttttttaccattgataagaaactaaaaatgcaaaaaaaataaaataataaatcacacaaacatggaaatcatcgagaaaccatcaataagaaattgaaaatagaaaaaagaaaataaaaaattacacacagtcatggaaatcatcaagaaactatagaaaaaccatcgataacaaactgaaaaaaaaaaaaaaaataacacaaaaaaaatacccacagtcatgaaaatcattgagaaactatcgaaagattgtcgataagagtcttccccaaccttagtatgcctaccatcaataaaacatcgacatattatcaataaa

SEQ ID NO: 293683 - DNA, 605 bp, Cannabis indica
taactgtacgtaaaggaaccttagacgcctcgacttcccgccttgaaagcgaatatgggaaatcaaaataatcgaatgcaactgtcagttgtggagagagaaatttggattttcaaaatattaattttcagagcattaattagccgaaaacagaagggacgcccagtcagcttcataagtaaatctgattatattgaaatgggttttatttagggcacaaaacccaacagttcatgtactgaaccatcacctccttgtccttcttggcctcaggcagcacgggcatgggtaaagttggtgcctgcacccgctcagggatcctcctgaccagtttggacccagatgttggtggccagactccttagacttggcagatttgggagtggaaggattggcagtagtcagctccttagaaaggtcaataacctctccagaaggcctcttctctgaagacccctctctgcccttagcttcttggccggaggcgaggcgctagagcttccgctcatcctcttccttaaagcgtctatcatctgccgagacatgtttgcacagaacaaaacagcgtggttagcacaaactagtagaaaatacaaagcatgaaa

SEQ ID NO: 293684 - DNA, 547 bp, Cannabis indica
atttactcattagtatgaattattttacgtaaaaaaatgattttttaatgatatattcataaaaagtgataaaaatactattgtagctttttttttattctcatatgatactctctattttttcattatatttctatcactctttatgtaattattttttagcattttttttttctcaaaaagatattttaaatcaaactttatatatatatataaaaaattttatataaatagatatattttttttttgtaaaaagataactttagtttataatttataaccccctaggttgatattatcttttaattataaaattataattatgatttgttttaattatatatacataatttttgttcttccttacttaattatagacctgctttaatatttctatcattcttttcttaattctctaaatttttatttttttttttaaaaaaaaaaactccaattaagataataataataataaaaacaaaaatatttaactaacagaaattatatcaacattaggactactattttttttttccgatttttaca

SEQ ID NO: 293685 - DNA, 501 bp, Cannabis indica
tccaaaaccccaaattgtaaacccccaaaccccataccccaaacccagaccccaatagaaaagttattgacaaaggtcttggcttcgtccctatgaaatttcacaattttttcagatgtctagggtgagattttgaaagaaaactatcaaatgtaagaggaaggaaaaaacttgttaaaatttatcctaaacaaaagaatatttcaatttttgaaataggagtcatttcaaccaaatttaactttaaaccaatcttcatattcacgtgttagtagtacaaattcattgtgactagtgggcaaaaatatttcgagattggtccgggccacatttcacaaaggggtaccactattagaaatgtaaaattttaactatttcaattagaatggcaattactgcatgaaatttactttttctcttaatataactaacagaaaagtgatgcactatggtcttggctttgagcttgtgaaattttatgattttttgagatgtgtaggg

SEQ ID NO: 293686 - DNA, 433 bp, Cannabis indica
gacagtatgaaaaaaaaaaaaggcttggacagtaagaaagaaattattgtcgtgtggcagtattattgtaaaatttggggaaaaaacaatatttttgtaagtttccctaattaaatgtgactatgggcccgtttggcacaatttttgaaaaatctaaaagctgtttttttgaaaaagctgtgataaaagtgtgtttggtaaatagtcaaaaaatagctttttgaagaatttttggaaaagctacagctaaaagctgaagctgctccaacccaacttttagaaaaagctgttttgattaaaagactataataatatttttatactaaaactatatttacttatttattacatattaaaaaaatttaaataaactaatgggaaaaaaacagaaaaatacaaaaaggaaaaaaaaattacaaaaatactttgggcc

SEQ ID NO: 293687 - DNA, 428 bp, Cannabis indica
atgaccctgtctgatcgggacctgatgcctacgtccgatggggtccgatgggcacatcgaacccgaccttaaaaacccaaaaaaaagatttttgtgcgatacagtccgagtctcgatcggagtggtccgataacggtgctggtggcggtgggtggtcgtccgtcatcgtgcggtgctatcggtggcggtgggtggtcgtccgtcgtcgtcggaggtgaagccgatgtggtgtgtgggtgtaccgtgcgagagggagagagagaactaagtcttttgattttagttttttaaatgggaggggtatttgtgggaaaataataatgtggtcatatttgaccaattttattaattatgaatttaggaaaaaaaatttaagatattataagcatgcaatttcaaatttcccttttaaatttaaggtcagatat

SEQ ID NO: 293688 - DNA, 541 bp, Cannabis indica
cacttggtcctcacatataatgatatgtgcgtgacttatgataactcttggtcctgctttctttactaatgagcatagtgtgcgactagaccctatctcggtcgcaccttctcgcaagtttctatcatgtagctctactagaattgttcgttgacatgtcattttttcccaactgggaactaggtccacgtgtcaaatataaacgagattgtactcgtatttctaggtaaaaaatccacactatatcatctccttaaattctagatggaggtatcaaacataacttaaagcataaaaacttttaagttattataagaagatgaagaaacaatagtcatatatgatcgaaccatttagaatacattaagagtaacattaatatgcttaataaatacagaaagactctcctctgacaataattctacagttagcatatgttcatccattttgccttcaaatcgtctatgaatgagacacttagaataatataatcacgacaataataaaaatttaacaacataaaaatcccctgccatgttac

SEQ ID NO: 293689 - DNA, 584 bp, Cannabis indica
caactttttgagatctgcatttcatggatctgaaaattgaagtcaggacattagttttatgcaaattaaattggatttctggttgaattttagtttcgtagtagtttttctacacttttttttcatgaatttgaaacaaccctattttgattgattctgatcatcttctcagctgatattgctagaattaatggtggttctctttctggttgaatttttgtttcgattgcgttgagttgatgcgtggttgcgcgatggttactcaagaagcatggatcctgggttgaaggtgtgtgtaagtggtttttgtataattttttttatttggactgtatatttgtttatttggccagctaaaaatatttttgtaatattattacttttttaattaaaattagaaaaaaaaaaacccttaaagaatgagtattctttaacttctcctataataatacgagaaatttatataaagtgttatttttaataaaaattttacatttacgttgtaaatattttttttacatttatacggtgatataaaaacaatacgaaaataataagaaaatcacatataaataataaaaaat

SEQ ID NO: 293690 - DNA, 909 bp, Cannabis indica
atggatcctgccgctcgacagagtcatcattttcagatctttcatcgaatccaagtgcctgagtttgagggtggacaagatcccatggtagctgaaaggtggttgaggcagataaagaaaaatttcaacacaataggaacacctgaggaataccaagttactttcgctgtgtccaagttagagggtggtgcagcagattggtgggagaccttgtccaggacaatggaaactgatgggatgacttggcgagaatttgaggaagttttcagggaacaatattttagtccatctcacaggagggctcttattggagtatttgatggtctaagacaaggggatatgactgtgaatgaattttacatgaagtttgtagagctatcctcttatgcatatcctggtgttgttgatcaacccttggtgattgaacagttcatgcgtcgtttgaggcctgcgatacgtggtcctatagcccctttgacctttaacaacctgactgagtgtgtgacagcagccttgcgaactgaggctcatgttgaggggaatgagaagaagaacacaagcagaggaagaggaaatgaccgaaagatgaccaagaagaatcaaggacagtggtcccaaggacaacaatttagtgggggtagcactagtagtggttcatctggaaagactcgtagtggaccatacgggtgtttcagttgtggtcaacaaggtcataagaagaaagattgcccgcaacgccaacaaagatttcaagcatctcatggaggacccatagggagctatgtagagtctactcctttttcatggacagcccaggacaaaccagtctcagtcttcatcctatgggtttcacacccccaatccgggccagcagtctcagtatcaacatcagttcaggccacaaggttc

SEQ ID NO: 293691 - DNA, 573 bp, Cannabis indica
ttagggcatccatctagcacgagtactttctgtttagctcggccagtacacttgaatcaggaaagaaggtaggaactgtatataatgtgtgatatcaatatctgagtgtatgtatatgttatatgtatatgcatgcttaaatgttagttgcactaccaacacttttatagttgtggtacagagtgcatcggtatagtgaatattgtttatgagtacagtaaagtgataccaacacaagtacgggaaagtactgagtgtgtgtggtatatcactcagtggtactcagggtatgaaacaaaccctatcaacactcgtacagtgaggtacatagtgtatgtggtatagtggctataccctagtatggaatgttcttagtcatctgttaagtcttataaataggtgtatgggtgcctatatacaagtcagaaattatatgatatgttatatgcttttcttacagagtctgtcgactcacagttttgcttccatgtgtaggtgaaggaaaggcgaaagctgaacaaaagtgagcctgagttgagatgaagttgtacatgtcaaagcagcgcgacctgg

SEQ ID NO: 293692 - DNA, 989 bp, Cannabis indica
tgcattgcagttgtggctagagacaccagagcaaggtgtttggattcattcataaaactgaacttttctgatgctcttcgaggtgaagatggcgctgtttgtttggtgcttgaagtggcgaaggattacaaccacaagtttatctcggttgaaagagattctaaggtagtaatcaactccttcaacgatattgatcccagatgagagcttgagaactattcattattttgtaaaagagtcatctcttcctttattggttgtttattttgtattactgctagaaattgtaactttatggctcataatgtggccaagtgggcgtttgacgataaccggtttgggcgacttgctatcttgtctattctatgaacctcttttgtaatgactgcgatgtctaagctttaattaactaaatgtcttttttttttaaaaaaaaaaacttaaaaaagaaatactttagaaaagaaataacaaattattataacagttgaaatcaaaaaattataattataattaaaataaataataaaattcaaccctaaaaacaaaaggtcaaaacggctaggggtgttcattggatcacatctaatgtttttaggcctatccagatccgatccaatcatatattggatgttagattttaccatccgatccgatccaattaatttcatcatccaatcgatccaacatccattagatgttggattggatcggttctatccattggatgtatttcatatatatttatttgtttaattttggtttatctaatattttagacctagtattttttggtattggatcggatccatccaatattttagatccagtatgtattggattggactggatccatccaatccaagaaaaaaaaagtaaaactttaaatgttaattttcatatatacatatagatttgacgtataacaatataaaatctaaattactcatccaaactaaatgaaaaatactaattagctcgattggatg

SEQ ID NO: 293693 - DNA, 600 bp, Cannabis indica
agtaaatctaaaacataccacatttataattttagttttactttgtcaaactagatgtattcaattattaaaacaaactgaatcacacaacccaaaaaaaaaaaaaaaaaccaaaaataaacatatgaacttaaatcacatcgaatatatctaggggggccgatggcctctatatgtcatatggtatgttcgcccgtgcgtgtgatgaatgataaaagtttatattttgataaagattaatattagaagttttaggagttttttggcttcataacttaaaaattattttttattttttaaaattcaaaacagtttttaaaaactaattggagtcgtttgacaaaatttttttaaaatagttttttaaaaattgagttttaaaaaaactagctagaaaacagattacatcaaaatgttctttttaattttcaaaaacaatttttttgtctaacatattatatatttatattttacttcacatacttagatcctagacccgaaaaccataacctaaaacctaaacccgtaactgggttcatatcatggtatggtgttaaaatattgattttttagttaagaaaaaaattaaaaaaaataagt

SEQ ID NO: 293694 - DNA, 638 bp, Cannabis indica
cgcattcgaaactgcctagaagctcaaggcatgctgcaacacctagtttggaaacccaggactttagaaagggagggtcgcggcgtccgatgagtgggaccactgtgcctgggttccaaacccagaaaccccaacatgcaacaacacgaaaccaaacccaactcacacctaattcacctaaacatgcttacataccaaaatcaaatcaacacataatataactatttaaacagggggttatcgagacattaaacaagctcttccaacacttatatatacatttaagatcaaatttaacaactatcaaagtatgctcaaagcttgagctaaaatcaacacaataccaattcaaaagcttgaacaacaaagtcctacatacaacccaatatttcatcatgcaactccaagtaattcagtaaattaaaatcccaatcttcaatttaaaattcacacaaacatacacaaaggcaatacagacaattctaaagctttattcacctacaaatcaccaaaacacacaaccatgcacttaagaacataatttatggcaacacacatatttttaactttaaattacaaaaacaaaataaaaagaaaagaggtggaaactacctcaagctcttcaaaccattaacacc

SEQ ID NO: 293695 - DNA, 565 bp, Cannabis indica
atttcttttactttttaactaaattttttttaattattttaattgctcacaacaaatgcgcaacaaaatggaagatcaatagttgaatgatagtttgacagtatatctcaaaagggatgtattcaatgttattgacaacgagcttattataaactcgtcgaggacaactctaaagatatgagctcgaaaattgatatatttgcaaaaagtttaggatattgagtatgttatatattttgaacatcgttttgaattgtctttttttttttttttttttttcattagaagatttttagtgcttgttatttaatatctttttatttggaaattgaaatattgaattgtgtttttctttatatttacttgtttttttgaaatatttttatatgtgaaaaaatttgcgcccaccctccaattaaattctaggtccgccactgcttccaatggtgagaagtgcctcccaatgtttctaaccattgcatcccgagtataacatcggtactgccttacgataacggtaaagaatcctcaattatctccaattcttgcagcactaaaggcatag

SEQ ID NO: 293696 - DNA, 508 bp, Cannabis indica
agtatgatatcgaaatccactaaattcaactctatcaaatcagcgctcaactctctatcttctactctgattggcatagacctaatccaccttctggagataactaactctccgccaggcagtagggttccaaaccctgattcataactatcatgcggtctatccaatttactaaaaactctagccgccacataagaatgagtggctccagagtcaaacaacacagagaaataagagttgttgaccgagagctgacctgttaccacagaggggctggcttctgcatcagcctgagttaacgcaaacacccttgctggagtgggttttgctgcagtcttcggtgcctcaattctgagctggggacaatctctcttgtaatgccctggcatgccacattgaaagcatccctgccctttacactcccccagatgatgctttttacaactggggcactctgggtaagtgtatcgggtttcagtaccactctggcgattgccccgaccctggt

SEQ ID NO: 293697 - DNA, 641 bp, Cannabis indica
attaaaaaacttatatacatttatgtatatatagttgttatatatataataaaaattaaaatattttaatttcatgttaaagaaaattaaatttaaaattttttgacttaacattaaatcactaaatatatatttttatataattatattattattattattaattttttattttattatattttaaaaaaatcgtgataaacgtgtcacattcgcgttaagcgggtcgtgtcgtgtttgacctatttttattttgtgtcaagtcgtgtcgacccgttttcaacccgcatctaatttttccgaccctaacccgtaaaattcgtgtcgtgttcgtgttcgtgtgtcgtgtcaaaacccgttttgtcacccctagttttgagtttatcaatgatatatattcaagggtaaataccattttggaccctgtgttttgaaaaagttaccgattggaccctctgttttgttaaatgacaaaatggaccctgtatttttcaaaatagtaaaaataggaccctgaacttaatttttgataactttttttttttaatataatcaacttgaaaacaattcctaatacgaacagatacagaaaatgtaaataattttgtcgtaacacttttagatcggattataattaaatt

SEQ ID NO: 293698 - DNA, 794 bp, Cannabis indica
tatgggtacacttttaatgggtattactcatgatgggtaaaattagaaaattttgagtttttatacttaatttttctgtctaatcaaaaaaatctcacatttttatattatatgggctgaaattgttctaccggtaaaaaaaaaatttaaaaaaagttttttagcaagaaaaataagaaaagaaaaaattgagtttgacttaaatatttttgtatgaacatatttttgatatagtataaaaagagatattttttgatattttttttaattaagtagttaaatcaagcatagaaattcaaatttgtgatttaattattcgttgatcaaaattcgatgatttgatatttttgaagttaatatttatagttaaatttgtttagtaacaattcatgggtaagaagtgttccatatatagataaatattaatacgtttatctttaaccatggtgtgtgattagttatctttatgggtcctattacttactttttttctttcttttaatggctgaagaaaccatgtctgttgctttacaaacccaaaccagaattcaaccacttgatttcatatatattgacaataattcaagttgaaaaaaaaataaattttaaattaaaataaaataaacgtttagtgttgttattgtttgaatttggtcattttcttaatctacactagattattattattattattattatttttcctaaacttgtatattgtatatttttagtaaaattaattaagctaacagtactaaacaatctgtgtggaaaaaacgaattatttgtaaata

SEQ ID NO: 293699 - DNA, 559 bp, Cannabis indica
gacaggtcgacatctacgtgtcagtcactaataggtccatgtcttttaatttttatttattatttaagaaattcattgaaatctgaaatttattttaaaaaattaatattaatattaaaataactaaaaaaagaaaaaaaaaaaaaaagaaaaccctaacatctcttcccaaaataactcctcccacgccctttcttgttcacattctctctcttccattctccttcttctcaggcaagctgcagtgcagcctctctccctcgtcgccggccgatggagttctctcggcgtcaatagtcccaagctcaacatcatctctctctcatcggtttcaatggtggaccacaatctctctctcgtcggtctcaatggtggaccacaatctctctctcgtcggtttcaatggtggatctctctcgtcggtttcaatggtggaccacaaagctattccttgatccaccgtcaccatgaagcttgagttccctctgctcaatttctccctctcttgtctccttgccggattcaatggcggaatcgccatccccaagctcctcttgcg

SEQ ID NO: 293700 - DNA, 639 bp, Cannabis indica
aaggaagctgaggaggccaggacggagactgcagctgttcgccatgagttgggtgaggccaacaagaagctgtttgccgctgagaagaagatcactgtgttgaccaaggacctcgaggctgctgatctctttgaggaaaacatcgagaccttatctgctgagattgatcgtcttcaggatgagaggacttctctgcggcaggtccttcttcggctgaaggaagataaggacgctcaggcggccgaggcggaccgcttgaagaagaaagtcaatgctttggagattgccggcctcgagctcttctttgatttttggaaggctaatccccaggccaactttgactacttgggcgacgccaaggacatgtacctcgagtactgcgcggcccaagttgcctatggtgggaaagaggtggctgcttcaacttccggctaggcttctgaccaggctgctgatgcttctcctgctcgaacaacagatcttcctgctccagtcagctcagaagaaccaaatccagagcctgggactccagctgtttgaacattgatctttttatctctcctgtttatatatatattatctatggccgtaaggcctttaagacatcatgaccggccaagaagtctttaaacttggaat

SEQ ID NO: 293701 - DNA, 509 bp, Cannabis indica
ccacaattttggtactctcgacaattttttaccggcgcatgtcacgaaatgcgccggaaaaaacaccttttcttgtagtgatatttgaaaaccctaattttatttccccaaaactatttgaaaaccctaaatataaagagaaagagaagagatcgggaaagagagagagaggagatcgattcgagctagtttggcggtccccgacgtcctcctccacaaccacgttgaagctacatctttgttcgctggctttaatggcggatctgagatggaggagatggtgggtggtggttttaatggcttcgaagtcggcggaggaggcgaggccggaggaggacgacgccggaggaggttgggctgcctgctggtcttggacgcttgctgcagaggttgaagatggtggtgggcttgtgtacctgcgcgagagagaaagagaagagggtatatgtgtgtgagaaaagacaaaaaagaaggaaaaagaaaaggaaataaagaaaaaaatatatttt

SEQ ID NO: 293702 - DNA, 670 bp, Cannabis indica
agttatagaaagttagatgacatccggaagggtgttctcagaagtcaaatttgtctatccgaaagaagtctcatggaatgatggatgtcatccaaaagagcgttcccaaaattctataatgtccactcagaaggggtcttaaaaaaaaatagtcttcctctggaaaggagtttcggatgcctaactgttctctcctggaagggagtcctggatagtcgcttccagctggcacctttcctatccgggaagtccctttagggttttctttggtctttcttccatgaagtgtatgtttcttctgaaagctctttatcttatgttgatatggagatattattacaaggagtttgttaagttgtaactaacttaacaacttagtagttgtagccatatccatatccctattatgtaaataccacttacacttatcattttaagacagataagatcagacgagtttctataggtgatattgagagaaaaaaattgatatgtagagagagaagtactgagaaaagggagagattgggtttggattttgtataaagaagattcttgggtaagagtgtgagagataaacactttgagagaatccaacatagaatcgatctgtactgtattgtaccctgctcctgctcaatcaataaaaagatttggtggtgttctagaa

SEQ ID NO: 293703 - DNA, 617 bp, Cannabis indica
cacttttaattgacaacattataaactataatatttaaatacacataataataatcgcacctaataattaataatattattttttttaatttttaatttttaattgtattactttcaaataacacagaaaaaaaactagcataaaatttagtatacgtgtctcgcacgtaatttttgctagtatattaataaatagagaaagaaacaataaaactataacaataatttaatgatgatttaaaaaaaaaaaaaaactagagtgatgataaaaaaaaaaaaactgaatgagaaataaatacaacaattaaactgaaataatttactttaaaattaaaatgtatattcaaaactgcctaattaatagtaagagtggaagtatttaaaaacaaaataaaatttgtataataaagaaaaacatcaaaataatgacatagaaactgaacgaaagcttttttttttttggaaggaaactgaacgaaagcttttaaaaattttaaaaggttgaattttaaataaaattaattattaagaaagcaattaagaaaaaaaccaattaaacataataaatgaaataacttaatcaataattaactgctgtttgtttttttttttttttt

SEQ ID NO: 293704 - DNA, 562 bp, Cannabis indica
ttatttttctttgcaaatttgacacgccagttaaatattaccgttaaatatcaactggatgaccactgtatacacctttgtatatgtaacggtaaaacctcgaagtcgatacagtagtaatccagttagtatttaacggtaatatttaactaaaactttaaatttgcaaagaaaagtaaactgaagggttttgccaccaaaacaaaagatagaggggttaagtgtataaaaattaaaacataagggggttttgccacaaaaaaaaagataagggggttaagtgtataaaaattaaaacataagggggttttgccaccaaaaataaagataagggggttaagtgtataaaaatcaaaacataagggggtttcgccgcaaattgctcattaaataataaaagtaagattcagaaagaatcgcgttagttaaaattctttatttaattaaatacaagaaaaatacaaatagtttatctagaaataatattctacaaactatgtttttcttaaattaatttcaaggaagaaattaattttgttgctattcaattttattaggtcaa

SEQ ID NO: 293705 - DNA, 724 bp, Cannabis indica
aacattgctgcttgggtccccaagttgaggatctacatcttcatcactgccttgggaagttccctacttgggaatgttttttcccttgtatgtgctctggctggaggatacttccttcttagccttggccactgcaaggttataacattctcgagcagactgctggtttcctctcagacaccctaccccattctttgttggaaacttcaagcatgagtggaatattgatgtgacagcctttaagtcatacaaggctggccgacctagcattacgttataagctgaaggaacatccaatatcaggaactgtgccatgatagtcatgctcgtcagagcttttccaacactaaggggtagatgaatttttcctagaggtgcgactccttgaccggagaaaccatagacaggcaggagacatggggttagatccttgagctggagtcccatcttttcataagtagttttgaacaagatattggaagaggctccattatcaatcatggttctagctaccattttattggccatttggacttccacgaccagcgggtcattgtgtggaaatctaactttgacagcgtcttcatcgttgaaagttatggtaggcccccccgctcgtggaactttaggtcgtcctttcttcctactggtccgaacgataacttccttttcgtttcgtgttgtgctgtttgggcatcctctctcgagctttgcctaaatctct

SEQ ID NO: 293706 - DNA, 571 bp, Cannabis indica
aggacttgccggagtgggtgaatggtcagtaccttgatcgggtgtgcttggaaatacagccttaactttcttgaggccattaggaggcagaaacaagtttttgatgatgggtacggcatctccgctcctatcatgcgcttgctgacatagtacacgggatgctgaattttctcttcctctcggactagggcagcgctaaccgcgtgctcggagacggccagatataggaataggtactctccgagaatgggttttgacaggatcggaagtttggccatatgttctttcaactttttgaatgcctcctcgcactcatccgaccattcgaacttttggcacttcttcaatatgttgaagaaggggatgcacttgtctgtagaccgagagataaaacagctcagggcagtaacctttccgtttaggctctgcacgtctttatgcttcttgggggatggcatgctcaggagagcatggagtttttctgggttagcctcaattcccctttggctgacgatgaagcccaggaacttccctgatttgaccccaaaggtgcatttctttgggttgagct

SEQ ID NO: 293707 - DNA, 558 bp, Cannabis indica
gctgacggttgcactttatttgatttcccatattcgttttcaaggcaggaagctgaggcgtctgaggtttctttgagacaattacctcttttcgtgacttgcctataaatacccacaacattagcacataaactcatttcatcacccttctttgctaagtaagcttcagagcgaaaagaaaaatttcttggcttcaaagtcgccgaagtgccttcatacaactgctggttggatagacgttgctcgaacccagacactcgaatcttgagtaagtttctgatttcctttatgcttatcttcgcatgtttacatttcgaatgcaactttcactgtgttgtagaaaaatgcttaggaaaccctagggttagaaacttttgcgattcttctttatcatgtcttcatgcgggtttacagccataaagcttgtttctgaactgcattgcgtccgtctttcatcttgcttattctaagcttcatgaacttttttgccctaactcaagaaaattttctgacttcttgagttctgacttttctttaaacatagccattctttaatct

SEQ ID NO: 293708 - DNA, 651 bp, Cannabis indica
tttatttacaccccaaaaagttctaaaggcaccctattttgatcacttttattttatataaaatttatatttttaattgtactaatttttttttaacatttttctttcaattcatattcttaaaaaatatacctatcaaacaaaaataaagtgtattttaaatattatgacaaaaaaattaaaataaaaaattatgtgaaattttttaagaaaaaaataaaaaaaaaatacacatgagttagaaaaaattatgaaaatgaaatcaaaataagtattgaaattaacataaaataatgtaaagaaaaaattttaaaaaaatattaagagtaatttttaaaaattatttaaatttatattttttaataatggggtgtatttataagtttaaggggtgcaaatagaattccccttaaaaatttaatgatgaaattacaattataacattttattataaataaagtagctttgtaataggaaaacaaatattatagacatcatgattttatcatctgttgtttgattgtctattggacaatttataagggaaatttgacattttatgcttaaaaatgtctaatggtgttaaattatacctaattataacacatagaaaaaatataccaatctttctcttttcttccaaaaataccc

SEQ ID NO: 293709 - DNA, 711 bp, Cannabis indica
cctaccctgcggcaagacgctttcaacttcacaaagaaatgcgacaagtgtcagcgaatagccacgtatgtccaccaacctccgagtcacttgcattctatcacgagcccttggccctttgcggtctggggcatcgacctgataggagaattaccaaaaggaaaaggcggagtcaaatacgctgtagtcgcggtcgactactttacaaaatgggccgaagcaaaagcactagcaaccatcacagcagctaaactgcgcgagtttgtctataactccataatctgtcgatttggcatcccttacaagctcatttcagataacggaaagcaatttgattgtaaggagatgcgacaattgtgcgatgagttagggattaaaaaggcgttctcagcagtcgcctacccgcagagtaacgggcaaactgaagcagtcaacaagataatcaaacacaccatcaaaggaaaacttgaagagcgtaagggggtatggccagaagagcttccacaagttttatggtcatacaatacgaccccccgatccacgactggtgagactcctttctcgctctcctatggatgcgaggccatgataccagtcgaggttggggcaggttccctacgaagagatgttttcaacattgcacagaacgaagagaaacagtcacttcacctcgaccttctagaagaaaagcgcgatcaggctcacctgaaa

SEQ ID NO: 293710 - DNA, 503 bp, Cannabis indica
aagaaaaaagaaagggcagaaaatcgagaaaaagcagtctcctctatgccctagacgaccagtatacgaagaacgtatggtcctttgcagaaaaatagtaacaaatacgtgacaagagcagtcctaacaccagaaatggtgaatctagacctgttacgtgaaaaatctaaaagagtgcattcccagaaacttcaaataccaaacccagaaaaaacgaacagataagtaaaagcatgccatgtacattaacagtaaagcaaggggtgcaagaaacttacagtgaagtgttgagactgggggttctgctgtagatcaaacaaagataagaaggattgacagtagtgaacgaagatggactgggaaatttgcaaagtgttcaacagtgttttcttggtctgagaattttttctctctgggaaacttgagcaaagttggcaagaaatgggaagtaaccgaaatgaaggaaaggtggtggcttttataggcaaaaatgcatgaggaac

SEQ ID NO: 293711 - DNA, 576 bp, Cannabis indica
aaatattgagagcagagccagagagacagacagagataccctgtttagaagagaaagaaggaaagaaaggatttgaaagagaataagagagagagagaggagttgtatttgttaattaatgtgtgggaacttgggattgaaaaggtagaagaaacaaaagtaaggaggtaggtgaagatgctacaaatcaaaaagtgacccataatggccatgtatgatatatatatatataaaatatacatatgatatagcagagaaaagggttagttgtagtaatattacttttggattctggtttctaatcttctgagttctctgtcctcacctcacccctccattcctctcgctccacctcacaattcccgatatatatggtttctgtgtcttctttattttctctctattaattattcctttttcttctaagttcacataccaaaatgaaaatccccatattatataacttgagccgcatgtaacgggtgtctataaattcatctaatccaataatatctaataataatggagcattaaatattgaatatttaattataattagatcagattggatgttgg

SEQ ID NO: 293712 - DNA, 571 bp, Cannabis indica
tgattatcttttaaatgccgtgaaccatgcctatcaaagttttttttgtctctcattaaagaacaaattattattattctttttttattgtgtgtgtggtttatttatttatttattttatatatatatatatatatatatatataaatagtgtgttgtttattttcaaaagaaaagagtggaagtgttgccgattatattgtttgatttatttttatgtatacggtgacgtcggtgagacgtattagaggtacttaccccgttaaagtacatattaattaatcatatattttattttatttttattaattatttttaaataaaaacagcataatatatatttattttaaaaataaagtgtatcatctgttacactatttaaatataagaaatttttacatcaaaaatcctttttactcactttattacattattaccctcacacgcctattactacatttatacttacaaacttaattttattactacatttaccacttactcatcattccatgcatacacgtgttctatcccccatgcatcatcaatcaaatcatactctcttccctct

SEQ ID NO: 293713 - DNA, 558 bp, Cannabis indica
caatatgtattatcttagaacaaaacattataaatcatagaaaagagagaatcagttgagaaaaatcaaagataaagtttcaatcatttttctgcactaaacatgtttcaagtagagaaattaatttggattacagcatatatatatatataacataatcaaactcttctatacattgattataagaaaaagaaatacctttagaaatcaacacttttagctattgaaaacaaaaaaaacaaagaaatgtaatcaagctaagagaggattttatttactagtgtatatgtgtgtgttgttatatatagaatagttagtgtaggtatatgatcgaattatatctcacataaaaaaccacatgcttatatattgatagactagagaagaggcagagcaaaaaacgttggtgaaacttgaattgcattgaaggagtgtgtggtggggaccattggaaaattatagcaaaacaatggccctttcatcaattttctatctttttttcttgttttgatccattttctggtgtcgtggtttggctttctttttataataatcaac

SEQ ID NO: 293714 - DNA, 583 bp, Cannabis indica
tcactgccaagctccaactcactgttcctccagcttagctttgcccttacctacagaaggtagaaaactgatgagtcgacagactcagtaagatatgcataacatatataaagataatgctaaactgactttatgtttaagctgtcctgagctcaacgaaccgagctcaccagatggttaagaacgttctcaacggttagtgctattgaccatgatatcacccactaccagcactataattgcactgcgggactggcactatgttcgtaccgctatgatagcatcaatagcacccaagagtataattgaccatgatatcactcttaaccagtactgtgcccgtactgctgaatcgacacaatggttgtgccgctatgacagcgccaattaatactctctggggtgaatatcactcttaaccattacatgacacttatcacatttcttgacaaactcgtgtgtgtccttattgatcgttggctagtaatatccttatctaatgatctttttagacagactttgccagcccgcatgatccccacagaagccttcatgaatttctttgattatttcatttgcttct

SEQ ID NO: 293715 - DNA, 528 bp, Cannabis indica
aatgtgatggaaccgagtccgggtaatgcccacgtccttcaccataaagtactcatcagcaaaacgccctatcttgctgatggccttgtcgtctgtgccggtcaaccacttgaagcctggttaagagaaatagaagtacccagacctgccttgtttgggggtggacttcaaatcaaagaactaggcaacttcgtggcaagaaggagtaccagacccctgggaagcgtagagaatgaagagggcagataaatacttaatgcccttaggagtgaactgggttgggcagagaccgaagaagtctgccacatccttgaagtatttatgcaagggcatcaacgctccttgctgaccatgggctctcgaccaagtgcacatctccttgtcagggtttgtggcacgattgtcgtgggcgggaatgtagcagtccagctcacctaggtatctgccctggtcaagagttcgaaggcgcgcctccgtaatcttggacggatgacttacccacctggcacccaaggcaccctgcctctt

SEQ ID NO: 293716 - DNA, 609 bp, Cannabis indica
tggtactcgcatcttttgctcggatctctccgggagctatccttgtacaacggttgtggtctccggtagtgtgtattttgcctagtagcaaagtacacacgctcttgggagtccgacagctccgtgtattgagtgtactggggagtgtacccccttttctggcgcttctcccccgtccgggtgctgcccttggaggaccttttactcctcgagccctgggaagggcctgccaggctagcagccggagcagagtgcgaaggagtttgtccattcattccggacgggttgccgaaatgggatgatgctggcgccaaggcctggccctgactatatccgggggtagcagagaattgtatgccacttgtttgtggagttgcggtcggggcagtacccgagggcgatactccgggcatgtaccctgctatcccagtgggatagtatcctccataagccactatttgggcttcttcgaggttgatatatttttggactctcttctggaagtcctgaaggctagcagctccttcttgttgtagttcattccagaaacggagcccccgtacggatgcttgcttggagaagcgcagctgtgtccgtcatcaactttct

SEQ ID NO: 293717 - DNA, 712 bp, Cannabis indica
agggcttaattcatgtcccgagttggaggcagggcaggatcgggaaatgtactatcccacccctgtatatctcaattatataaaattatatatatttatctactatttgttatgtaaagtagaacctcttcttaagaatagtcttttcaagaataatttttaaattataattagttatacattttggatagagactttttaagttttgtatatagacagatagtaaatgaaccgaaatgaatgcatatttttttcattaattatttaaaataataaaaatataagaaataaataaatatttataaatttattaaaaattaaaaataaagagataattaaagaaaaaaataaatagaagaaaatgacataattgttataaaataatataaaataaatgagaagaaagaagaaaaagatgaagagagaaatagaaagtgaatgagaatttctcagttgtttattccaattgggtgaactcctatttatacaaaagtattgactaaaggaatgagaaactaaattaatatgtagtaaagaaaaatacaatcaagcattaatggtaataattaatttggtgatttatacattcttgttggtgttgattatgtgtctaaatgggtagaagctattgcatgtcacactaatgaccacaaagttgtgctttaaagtttttgaaagaaaattattttctcacgatttggttcaccacgtg

SEQ ID NO: 293718 - DNA, 527 bp, Cannabis indica
aaaaaactgagtgctttctctccctaaacctagccgccactttaagccttcttcttcaccataataattcgaaaccctttgagtgatagagtagtgcccacattacatcaagtggtacctcaatcaaagtgtggaagatcgtgaagaatccagtttcaacaagaaggacattcaggctcagatcttgataatactctgcgacaaaaaggatacaagggttagagatctgagtggaaggagacgttatcttccgctgcaaccactgtaaggtttcttatactttatatgtgtttatttatagtcgttttagaagtacatatttaggatgttaaacaacatacttgtagcgtaaatctaatatcttggtaaaacaatttcctaactaatatagttgattaatatcctaaatataaattctctaaaacaatgaaataacacacataagggtttaagaaaaccttacatttgattgtagcagaatactatgactccttccgcttaagatctcgagcccttgattcttttct

SEQ ID NO: 293719 - DNA, 747 bp, Cannabis indica
agtaaaaaaagtctaacatagatgaaagttgaaagagcatgatttagtacatatcaaagtttgaggggcatgatctggtaaatatcgaagtctagggagtatggtttagtacataaacaatcactgaaatagtaaaattatatgtaattagacaaaaatcctaaatctaacatttaaatagtttaagtagtatttttaacgacttttaagagttcagagggcatgatttggtatatgtcaaagttcaggggacaaaaatctaaattagactaaatattattagattaatttttatagaactcaatatacttaattgcatcaatagtgatttaacacttacaaaaatactaaacaccattaatatttttttagccttaattataatttaatcctcttcttattttttgtcttaagaaatataaaataaaataataataatcatgaacttaatctctgaaattgattaaccatattcacaatgactaatacaaaatattgattagtacttatgtataagataatttttcaaatagtttatacaaataatttcttggacactagctgcctcgtgagcaaaaagtagtcttggattagatagattaatagatttcctgtcgaattttgacattgtgtacttaattataatgtttttaagttgttaaaaaatctatgaattatcaaaactgttaaatttaaagattttcattaaattttattaacgaacagtcggcacttaagataaagaaa

SEQ ID NO: 293720 - DNA, 614 bp, Cannabis indica
cctgaacctcagttatgttccaaggcagctgctactacttccatcaataatggagaaagttaatgcattggccaaattggtgcaatcttgcaacaatccaccatgtggaaaaacagaagaaacacattgaactcttcaaattcaatctgctaaataaaaaaggttaattgatctctgaaattcttctactgtatatgtatataaaggtagttattttacctaacaattacagttgacataataaagcattattaactattctttcatgagcttgatgactgttatgaaagtaagtctcaggaaggaaggaaggacccattttaggactttaaattgggcccatcttgaggcccatcttagactaacaataaaggcccatcttgaggcccatatatacaaaaagtaacgaataggctggctttgatgcaaacaatagcaatctgatcagggggctcaatcaatctaaaagaaacccaaaagaaattttaaaaaaattgggtaatcctttcttgtgtgaaaacttcttttcttttatctaacatcttttccgagcaataaaaatcatcaggctctctctctctctccctctctccctctctcttcactttaacatt

SEQ ID NO: 293721 - DNA, 606 bp, Cannabis indica
agggttgaattatcttttaaggggatcatgttaaagatgaaaatttgggctagactttaagtatcatgagaggtatgttaggcttaggataaattacttatcccatttaatatttattgtatttaaaatattacaaaattttattatgaggtttcagtattacattagtttatgatttgtgcactcgcccacactggattgctctatatcacatttttgtggtaagtctacactgtttcgaaatctgtgcggtcccttcaaattttttgttttgagatatcacttatttttgtagcgcactacagcatatttctattagtatttagcttcttattttcactatgtaaagtacgtaaaaactaagaaagccaagaaaagtttatgcttcctacctttttcttactcatttgtttctttcctttttcctccttaaaggtttcaccttagaggtgagagaagtagagactttaaaggttttttcctttttttttttttttttttttattattagaagggtactaaggttttggagtaaagctttttaatcataagggagaaaggtttctacttacttttttttttttttctttgtttttctttttctat

SEQ ID NO: 293722 - DNA, 659 bp, Cannabis indica
tatcacatgacatgcatcaaaatcccagaattcaaattgctcaaaaacacccaatatcatgcttaagattaacaaaacctaagctcaaactcaagaacttcaaaaccaagttcttcaagtcaaaaccagcaattagacattaaatttcacacctgaaatttcaacctagaattaccaataatctcagcccaactcattaacaagcatacaacaattctaaactcaaatccaatccaagatagctccaaattacccaatcatgaagcaagaacaacctaacccatgcataaccaaaattaagaaacttaaacatgtttctatcacaatattcagccaagaaacatgaattaaaaatcaagaaaactacctcaaatacttgcacaaccaagcctcaagcctcccaacacctttctttcaaacaaccaacttcaaatcaactagttctttccacaaattaaactttgaaaatgaaaaggggtgaaagagagaaagagggttcggtgagagaaagagagaaaatcagaaaatacaattcattttctctaaaaatccaataaattccatttactcaataatggtcaaatgaccattttgcccataggcctataacacatacatattcctttttaagggcataaatgccatttcacactcaaata

SEQ ID NO: 293723 - DNA, 701 bp, Cannabis indica
atcagttcacaagatctttaaccatttaccttaatgtttttcaacattgctagaaattcgtgaaattttttcaaatatttctaatttcttttgcataagataaaatctagagtgatcatcttaagaatataacaaaaactcatatccacccctgaatgtacatccatctaataatatagatgattttactttcagtggatataggcatattgactctttgcatagaaagatcttgtcaaaaccactatgaacaagatacaaaagacatagatttataaaatctgtggttgtggtctttcaatgacttaggtctagttacattaaagagttcttaaaatagtccaagtggattttggtcatagaatactaaactcacattccatactttaacatacagtttgaatccattgacagaaaatagatattaaaaacttgtgaaagttgaactgtatagtattctggagacagaaatataaaatttctatttggaatcaccactactaatctaactctaagtctaatttgcctaaagtaagcatatataagtaggagattctaagatcgaggattatatgatttcgggatagaatgtcgggattatagtcatctgtgccattcaatttcataacagaaaatagaattacataataagcagatgatttataaaccattcatccaatgatatactatgtaaggaaatt

SEQ ID NO: 293724 - DNA, 597 bp, Cannabis indica
aaacaaaatcatcacaatacttacagataccgacacaatattttttgtaataatttttttaaaagtgacactcaatgcaaatgttactctcaatatttagatcaccacaaatgttatagatataatagaatatattttagcctatctgtgtgagtgcataagaaaagatacttaccaattcatgtgattagcctttcacttttgacaatatattggttgaatctgctctaatcttaaataatttcgggggcaccctgtaaagaataaattagaaagtcattaatcatagtagaaaaaggtatttaattatccactatgacaaagtaggtcaacatcaaaaaaataaacaatgaataatcaacctagtggctaatgatctaaactgacaaagagtctaattttttttttttttttgattaagtaaaagtacctcataaccatttcaagtacaattacatgcttcccaaaccttaagataagttttttagtattaagtacctcataactattttaagtatattattgctacgaaaagcaaaacaacaaacaaaaaactactgatcgaagtagggaactctggcaatagtttccagaacg

SEQ ID NO: 293725 - DNA, 542 bp, Cannabis indica
ataccatgttgtaacgccctgtccaacagggacgccacgtgtgtgcttttataaaattcttatttttatactatataatgataccaaaagtgtgggtaattaaatttgtgataattaaaatcaagcatataaaaacttctttatagtaaaagatatgtaatgagaactacagggacccacaattttcaaaatattcacaaactagtttaacagttttttttacaacataaactttttattcccaaaatacattcaaaatagaacatcctgttcactgggctgtgccactgcggctgatatgtacattgctgctatgacttcgcactcatggttgctcaaccttagccttccctttacctgcactataaagcacccgtgagtcacagagacttagcaagaaaggtgaataaaacaataaccaataataaccatcaattcaatctcatatcaacatgcttacacatttacacaatatcataaacacacaatcctaatactttataaagtacccctttaccactcgttaaccacgagctgaatat

SEQ ID NO: 293726 - DNA, 497 bp, Cannabis indica
gtaatacatactaatgtagagaggtcaaggtgaggtagacggcccaacaaggtggaagagcggggcccaacaagtggtatcagagccaaaggttcaagcgatgggatagtgggatgcatttgcgatgtctagaagataccctcaacgtgatgacctcgcaattgaagatctagtggcatgtcccgttgatgattacggtggtacaagatggagcaattgatgttaggacctgtgtcgaaagtcttcctgacaaaggtgatggtcaggcaacgagttcccttggtgatagtggtggcataaggtagtttcgctggaggggaggccacgagtatgtggtcctatgtttgaggggaggattgttgggaatgcaaccaaagtcccacattggctaggaatgggaagaattataggtatataaggatggacactactccattagtatgaggccttttgggaaggtgcccaaaaataaaatcgtgagggcttaggcccaaagc

SEQ ID NO: 293727 - DNA, 692 bp, Cannabis indica
ccgaaactgtccagaatgattgttggacttggagcagggagaagaatggggtgtattctgtaaaaagtgcatatagagggatgcaagaacactacatagtttctggtatgcctactgaattttggtctgcattctggaaaatcaatgtgcagccgaaggttcttcaatttgggtggcgagctctcactggtactttagctaccaaagtccaactcaacactaaacatgtgcctatctcccaattatgcaccttctgcaatgttgcagatgaaaccattcaacatatattagttgattgttcttatgccaggtcctgttggcatcgttcctctgtcaatttctcttcagctgctagcatggtgtatcacgaatggtttcagcaagtaatggtcagtaataacacggggcagattgaagaagctctaatggtgacttgggcaatatggaatgctcgaaatcagttactatggaatcaaaaaagtactactgctttggatgtggttctgtcagcaaggtctaacctttatcaatggcaaagtgctcaacaaaatcgttttgatcctcttttatcttccttcgagataggtaaagaggtagagcattggactaaacctgttggaaacaagataaaggtaaatgttgatggagctatctttgaagcttacaactcttttggttttggttttttagcc

SEQ ID NO: 293728 - DNA, 654 bp, Cannabis indica
ttatggtgatgcgggaaaacggtgaagtagattctgaagatgaagaagagcttgctgatatgccaccattggaagatgcatctattgaagatgacgagtatgggccagaaaagggtgacatgcttgcactagtcaccagacgagcattaaactcgaaagcaaatgaagaggaagaagaggtacagcgtgagaacatttttcatactcgttgtcatgtgaaagacaaggtatgtagtgtgatcattgatgggggtagctgtactaacgttgctagttcatccatggttgagaagctgggacttccaatgcttaaacatccacatccttacaagttgcaatggttgatgatagtggtgaagtgagagttaccaaacaagttttggtatctttccaaattggcaaatatgaggatgaggtatagtgcgatgtggtcccaatgcaagctgggcaacttcttctaggaaggccttggcaatttgatcggcgagtccaacatgatgggttcaccaacaagtactcattcatgttccgtcaacgaacagtcactctagctcctttgacaccaaaacaagtctatgaagaccaagtgagattaaaaaaattgagtgatcaaaagaatttgagtgatgaaaagaaattgagttataaaatgaa

SEQ ID NO: 293729 - DNA, 668 bp, Cannabis indica
gtagactgtagactgccaaaaaagaataacaatcatgaagccaatatggtaaaagacatgtctaaagatgatgatatacatctatcggcaatggtctcagaagtaaacctagtgaagtctaatccaagagaatggttgattgacactggttctactcgccatatatgctcagacaagagtatgttcaaatctcttgaacaagtgaataatggagagaaactctttatgggaaactctgccacgtctgagataatgggtcaaggtaaagtgatcctgaagatgacttctggaaaggaactgactctcaacaacgtgctgtatgtaccagaaatccgtaagaatcttgtatctggttcacttttgagtaaacatggatttcgtatggtaattgagtcagataaggtagtgttgtctaaaagtggaatgtatgtaggaaggggttatgtaactgatgggttgtttaaactcaatgtaatggttgttaaaccagttatcaataaagttaataacgcttctacttatttgcttgagtcttccaatatttggcatggtagactaggacatgttaattataacactctacggagattaattaacttaaatcatatacctaatttccacattgatttaaatcataaatgtgaaacctgtgttgaggcaaaactaac

SEQ ID NO: 293730 - DNA, 564 bp, Cannabis indica
tcctcacgccaactcccattgcatctgggagatttggtcgaagtaaaacagcgaccaggcgagccactccgggcatacatcagcagattcatgacggaagcgaccaaggtatcacgggtaaccgaggatggaaagttatccgcgatactgggggcattgaagtccttggcgaactgtggaaggatataaggaaaaacggaccggtcgactcaatgagtgatttccttgaccgggccgaaggtttcatcaagctcgaagaagccattcagcgagcagaaggtgagcaaaagccgagcaaaacgaaggttccttctactggaacgtccgcccaacttccccattattccagcaattcaagtggcaagcgttcaggcaacaaccacaagcaaggaaacgggaagaagggaaagttcaccgaaaaacccggacagactccccgtgatcacgccaaacacactgcattcactatcttaactgaagatatagaaagtgtgtacatagcaactcagtcgttaattccgtacaagaagcccgggcccatgaaaaaagataccagcaaaaggg

SEQ ID NO: 293731 - DNA, 535 bp, Cannabis indica
cccgaggccaacctcgccaaccgatcaaactgtgtagtgtactcaatcacactcatattctccttctgggtcaggtgggtgaactctttcctcttggcacttctaatgacctcattatagtactttgcgttgaagagatcctggaacctttcccaggtcatagtggtaacatcatgaatctcggacaccatgtcccaccagactaaggcgtcctcttaaaactgaaaggtggcacacaccaccctgtcattcccagtgacacccataaaattcaatatcttagtaatcaccattagccactgctcgactttcatgacgtccggacctcccagaaaaactggaggtgcctacttccggaacctttcatataggggttccattcagtttgccgctactactatttcggcctgagcagcaggggcgggtgccactggaacttctggcacaggcactgcaggagccccctgctgtctcaatctctgaatctcattatcttgctcctctgatctggcttgcatttcagcaaacctaactt

SEQ ID NO: 293732 - DNA, 1050 bp, Cannabis indica
agtatgctcaagagcctttgaatactggaggccgaggatgagcaagtgactccgctgaagaggaagaagaaactcccggcctcgccaaggtctgttgaacatgcattttgcataagggagcccatttcacctgttcgaccatctcccccttttttagaaagggaaagccgtcatgtctgagataagatcgatgtcaggtgatgatggacttctaagtcttgtgcaggcggtcaccttgctattttactttcttttgttttttgagtcttctttgatttttcattgccttggtattttctgtatggtttgttttctaacctacacttagtttttgtttaggtgcagacatgtctcggtagatgctcgatgctctaaggaagaggatgggcgaagctctagcgcctctcatccggccaaaaagtctaagggcagtgaggggtccttggagaagagaccttctggagaggtcattgaccttttcgaggagctgactgctgcaaacccttctactcccaaatctgccaagtccaaagagtttggaccaccaacggctgggtctgaactggtcaggagtgttcctgagggggtacaggcaccaactacacttttgcccgtgctgccagaggccaaaaagggcaaggagatgctagcccactatatgaaccggctggttcctaaggtcagtgagtaactggcttgtgctgatagtgactcatctctggatgtgttggtgggccgagtcctgaaggagctcaccagggtaagtcttttttttatacttccctttaactttccccacttagctccatatgctgacttttttcctttgtgtaggccagtttgaagttggcttacacttactcccaggctaaatctgttacttccaagagtgcggctctgcccgacaccttgagggcggaggcagacttggccaaaaaggaagctgaggaggccagggcgcaaaatggagctgtttggctggagttgggcgaagccaacaagaagctgtttgctgccgagaagaagatctccgtgctaacaaaggacctt

SEQ ID NO: 293733 - DNA, 613 bp, Cannabis indica
attttcccagtagtgagaaaagagagaatagcctctgtgaagtcagatcccacaatgtcccagttatcctgataaaaagaactaccatacccatctggacctggggccttgataccaggaattgaaaacaaagcctcttttacttcttgtttcgtgtaatctgccagaagaatagttttatgcaactcagtgatcttggggcccagattgactacagatctcagaaccttccttctattatgcatactagttcccaacaacttctcataataactcagaaaagcattttgaacatcatccggagaatcaaaccatgttccatgctcatcttcaatcgaaaagatcttattttgaattcttcttgatctcagagaagcatggaagaaagccgagttctcatctccataggatgcccaatttagcttagctttctgtgacatgaacatagaaaaagctttatgaacttcattataccttttgttggcttcttgctcagctgccatcaattgaaatgaaagtgggttcttggtcattgcagcttgggctgctattagatcattccttgcaatcgtatcagctttttgaatatcagagaaaccctcttgatttatca

SEQ ID NO: 293734 - DNA, 688 bp, Cannabis indica
atggtccgaccatcggaccagggcccttttttcttttttttttttgttttgaatatttttcagagagaggaagagagatagtggcccgatggtcggaccatggggtccgaccaatcggacccatcgaaccctatggtccgaccatcggacctgggcttttatttttttttattttttttttcattcggtttcagggagagagaaaaggtttgagttatgaggggggtatttttggggttttcaaaaaattggcatattttttatagtgtaaaatgtattggtttaaaaaacaaatttttaaatttaataagtataaaaatcaaattttcctttgataaaatgcaatgtagcaaacaagcatattcggtttatagttagattgatttgatcatacaattattaatttattgaaaaaaagagtatatgataaataaataaataaatatctaatgcctaaataaattgaacacctcaaaagaagggatatacgataaaaaggtaataatgtaacatttattttatcaattcaaaaatataaatatttcttgtagtaaaatactagtaagttactatgttttcatttcctaacaataaatgtttatgaattagatatataatgaaagcctagcaaaattcaaacccattgaaggtaagtacaaaccatattgtgtatgtatataaaatgaac

SEQ ID NO: 293735 - DNA, 785 bp, Cannabis indica
tatgtattttgataaaagaaaaaattaaggaattagggattttaaaatcaataaaatagaattcatatataaaagcatacttacaattgataaggaagactataattgttggacagtgtggctgcaccatccttactgctgtagaagccacgatttcattcaggtcatccattattggttggtggttgcaggaagttgaagatgaaaagattgagaaggcaatggcgagagagaaagcaatagagaagaccattttttttgtttgtttgttcaaatccaaagctaaagcctctgtcttgtaatcgtccctgatcgaaatttgggcgaataggaagttgatatttttttatttatattttgaaagagttttaaaaaggaaaattagacttttcaaaggaaagttgcagagaagatgaaaatatcaagagagagaataagagactctacacagggaaaatcaaagctaaaaagtgtcagtcaacaaaaaaacctaattacagaaagagcaagatgaaacaaatctagagagagagcaagagactctgagccagggaaaaggaaagctaaaaaagtatctgttaatttttttaagaaaaataaatagagttttaaaaggtaataaatacactttaatataataatacacttaataaaaaagtagaaataggaaatacaaacatgtgcactactatgctgttaattttgactattggactttttgactttgaaaagcttactatttaatataataaaacatacatcaacaatgtaaagggtatatatgt

SEQ ID NO: 293736 - DNA, 530 bp, Cannabis indica
attcaagacaatcttaaatatgtagccattttattaaggggagacaattgcttaaggcctgtccctgggccctttgtaatatatatatatatatatatattttttgacctgcccttagggccaggatttttatatatatgatcttttttgatgcatattttttcttttggacctgccctttgggtcaggatattttgtttttacttttggcctgttttacatctgtccgtgtggtatgccttagtacccccctgagtggcatgaaaactttgtttttaaggcactcagttttatttaaaatttagaggttgcatacacttagacggtacaaattctttaaacaaagcctaagttaacatatttaaactattggtaatacttccaaagatgatcagcgttccagaccctcggcacaatggttccatccatcctttttagcttgtaggtttcggagccgatctcatcctcgatttcatatggcccttcccaaatttggcccaagtacccccactccgggttcttgggttgct

SEQ ID NO: 293737 - DNA, 453 bp, Cannabis indica
atcatgattatatgttccaatttagatttactattataatagataaatgataccaataaagttctttgataatgtatcacactaccttaattgagtgggagaattttaaaattctttacccatcttcattaggttgacacttgtgataggaacttaagaacactactgagaaagcaaatctaaccattcatgtggatagaaataacttatcagaattatgagaataagatagaagaattcttgcatagtctattcgaatgacttgagcaaagatttctaatcctcataaaatttatggtatctcaatttgattgctatgttgatgacttagtctagaagtttcagactaagataatatgtcacaactagatatccctcaaaataatagtaagaggttaaacgtatattttaaccagacacctactgttgagtgggagccatctgagatgtaat

SEQ ID NO: 293738 - DNA, 657 bp, Cannabis indica
aggacatcgatgtgccgtgacgatggaaaaatcatcagctttgcatacaatcatggcgaacaggcggccattcttcaaagaacgacccaacccaaatccacttgagagcgaaaatcatcagccttgcgctgttcgttaagcttacagtatctatttttttataattttttagaaaaatttcgaatagtttaccgtatcaaaaatacatttgattatttttttaaacacgcgtagtaaactggaatattaagaactttatttttcagtattgtaaactattcgaaatttttcaaaaacttacaaaaaagatactgtaattataacggataccgttataaaaaataatttaaaaaaataatttcaacatatgattttgggtgtgaaaattaattaaaaagttgtaaataaaactcttctccaacaaaaaatataaaatggtaactgaaaggatgtatgttagaataacattcttctctctttaaggtactggtaaggtgggaaacaatcaaacaaactaaagaattcatattgttttgtatttgtttgttttttttttcatttttgaaagattgaactgttcgtttgagtggaaatttgatggtttatgctttttttaacacacgaaactttccttccaactccctacttttgtcttgt

SEQ ID NO: 293739 - DNA, 585 bp, Cannabis indica
gacacctgtcatacaggaaaccctaggaggattccctggacaagagtcgggtgcaataaattcacagaagacggtattgcgcactaaagaaaaagaaaaggcagaaaatagaaagaaaacagtctatcctatgccctaagcgaccattatacgaagaacgtatggtcttctacaaaaaataacaacaaatgcgtgacaacagtaatcctatcactagagcagtaaactcaaaccgattatatgaaggatctaaacatttgcattcccagaaacttcgaatacaaacccagaaaagaacaaacagataagtaacagcatgccatgcatattaataatgaagcaaagggtgcaaggaacttacaatgaagtgttgagactgggggtcctgctgtgaatcaaatgaagacaagaaggactgacagtaacaaacgaagaagaactggagaaaattgcaaagtgtttaaaggtgtttttctgggtctgagaattttttctctctgggaaatttgagcaaagttggcaagaaatgggaagtaaccgaaatgaaggaaaggtggtggcttttataggcaaagctgcatgagg

SEQ ID NO: 293740 - DNA, 408 bp, Cannabis indica
aaaaaattgttctaaataacacaacacttcaacaatttctaatcggagattttccaactttgacacatctaccactttgcaacaaagagatttaaagaataaacataacctggtgatggcatagcgaactttcttaggtaaaacagaacggatactcaccggcagaatatgttgcatcagtatatgatgatcgtgagacttcagtccggacaaaattaatttgtccatatctaccaaattggagatatttgaagaatacccttcgggtactttaacgtgagacaatgatgtacagaaagatcgtttttcttccttagtcagggcataacacgccggtggtaaaaaagttcgtttaccaacaatttctggatgtaaatttcctctaatctgttggaattatattttacc

SEQ ID NO: 293741 - DNA, 721 bp, Cannabis indica
gagaataatgagggggtattttggggtttgaaaaaaagaatagtttttttaggttttaaatttttggtttaaaaatcaaattttttgattttctaagcatagaaaatcaaatttccctctcagtgttacactatgtaattatgtaagggaaatttgattttttatgcttacatattcttgaaatttttcccttaaactcataatatttgatatttgtgggatatgacacattttataatattcctaaaatacccccatttacattaccccctctcttttcttctctctttcactacactgtagaccatcgggccccatcgggcccactatcgggcccaccatcgggcccatcgtgcccatcggacccatcgggccatattaaattctatttttttacacatgcaatcgggctccatcgggcccaccatcgggccaaccatcgggcccatcggacccatcgagccatatcaaattctattttttttacacatgcatcgggcccaccatcgggcccactatcgggcctttgtcttcctcaattttttgtgttaccatcggaccggcatcgggcctgcatcgggctgcatcgggcctgacgaaatcaaaccccaaatccagattttgcccaaatcacatccgagaaaaaaaaaaaaaaaacgagggttggtgagggtgagatggtgagagaacaaccgagagagatagaggaagagagagagtt

SEQ ID NO: 293742 - DNA, 710 bp, Cannabis indica
tatatatatatatatcataatttttacaaaaaaatattgcataaaataaaattcaatataatactatacaatacaatacggtgtaatacgacgtaccaaacgaatcctaatagttttaagtcatatattaagtgacaaaatcaacttgcttctccattgttagggttgtttcttccttatttttgggtatgaataataattaattaagacattaaaaatagttgaccaacaaaaacttgtttaaagccaaattgattgagattcagattccaaacaaaaaaaaaattaaaataaaaatttaagatcaatcaaattcgaaaattgagattttttgaaatttgtaaacccgcaaaagaatcatattcttcttcatctaactttcaattcaacactttgtccttataattttcagtttataaagagaaaaaaaaaagagcaactactaataattttagtattttttttatgggttcagcctcatttcgaaaaaaaaaatatatcttcttttaagtttatggaatttgattcttattttaatattcaatatctgaatgtctaatgttaattatatgattaattaataaattagtattgacaattcacaacaggtgaggttgagaagacaatgacttattctttgactacatttaatgattgttaatattgaattatttttttgaataacacgagattttaatcaatcctaattt

SEQ ID NO: 293743 - DNA, 468 bp, Cannabis indica
acttccatctctctgtccttccactcggtaaacatgcgcctttgttcttcgaacgcgagatttaccgcagcgcgtagatcttcctaatcatgatgtagggtattgttatgaccctgcatgagtccaagaacgtcacggagattttgcaactcagtagcatctccaatggttgtttgagtgttggtaccgagagaaacgattgtgttatgaatgccctggttgggtgcggaactgttattcccagtctcttgcacatcaggcgcgatttcatctatagcagtcgttacaccgtgacccaagtttaccggctgtccaggattaacagctggcggaacccttgtatttcctgggttttgcaatgcaggatccaccgtctgtgaattggctggatcaaccttacctctacgagtttgcaccaccatcgtatttgtagttagattttgactgaagagcgattcttgattcttt

SEQ ID NO: 293744 - DNA, 564 bp, Cannabis indica
tttttttttacttcgccctttgcattgaaaaaacagatcaaaaatgatatgattcaacctcaaacccaattgaatgtagcggataacagcggagccagaaaattgatgtgtattcgaatcataggagctagtaatcgacgatatgctcatattggtgacgttattgttgctgtaatcaaagaagcaataccaaatacaccgctggaaagatccgaagtaatcagagctgtaattgtacgtacttgtaaagaactcaaacgcgacaacggtatgataatacgatatgatgacaatgctgcggttgttattgatcaagaaggaaatccaaaaggaactcgaatttttggcgcaattgcccgggaattaagacaattaaatttcactaaaatagtttcgttagcacctgaagtattataagatgagaccctaaagacagtttttatttttagtatttgaatgaaattaatttagtagatttagtagattgtttgtgtctcatgtatatgcctttaattttctaattaagaaaaaaaaaaaaagagcatgttgattatatccaaattt

SEQ ID NO: 293745 - DNA, 696 bp, Cannabis indica
ccgttcgagactcgatgtgaagctgactaggcgtcccttcggttttcgactaattaatgctctgacaattaatattttgaaaatccaaatttctctctccacggctgacggttgcactcgattacttttgatttcccatattcacttttgaggcgggaagccaaggcgtctaaggttcctttatgtacagttacccttttgcctataaatactccttgtattggcacattactcattttatcaccattcgttgttaagtaaacttcagagcgaaaagagagagttctctggcttcagagttgccgaagtgcctgcagacgattgttggcttgcttgacccggacattcgaatctttgagtaagtttctgattccctttatactttcctttgcatgtttacgctttgaatgtaactatgttgtagaaagaatacttaggaaaccctagggtttgaaacttctacgactcttcttttccatgtccttatgttggctttcagtcgtagggcttatttttgaattgtattgcgtctattttccatcttgcttattccaagcttcatgaacttttttgccctaactcaagaaaactttctgacttcttgagttttgacttttcttcgaacatggtcgttctttaatctgttgagtactcctagtcagcatatttggcttgtttttcgtttgatactccgtc

SEQ ID NO: 293746 - DNA, 630 bp, Cannabis indica
atttaattaaaactttttataatgttaagtttgatgtatgtgtgtgtctctttttaagcaactcgtaggttgtcaggtgaatttgaccaagtttagaattttttaggtttgggttagcagggtttacaaaacatcaaatcgaattcatccgatttagctcaagttttcctcgtacgggtttgggttttgggatgggcaaaacatactatgttgaagaaaaagaaaaaaaaaaagactaactttagtgtatgccttttggtttcctttcgagaatcaatctctcatggggtaagactgtacatcaggggggattgactggattcgggctttataaaacattagggtcggctcagggtggggcacgcccaagatctcctaccaaggcccaaaaaattcattaacaaaagggctattttcaaaatatgggaaaaattattaaggttatgataaatatggcataaaaagtaaataccactaaatatggcattatctaaccaatcaaactaaaaatatggttttttctaaaaaaaaccatacaaaacattaaaaagaaatctgaattaaattcataaaaataaaactaataatacataaaaatataaatcctcatattattttttaaaaataaac

SEQ ID NO: 293747 - DNA, 623 bp, Cannabis indica
caacatgggatcaaagtcactatcccttacgatcgagcaagtcatgatcttattcgatatgtgacacctatatatacagatagtaatcatgtatataaaaacatagactacttcacttatcactaattgattttgagatagaacccatgtattctttaacattatttcattttgtttttttttttttttttgtttgaaaaggatatagtagggttataattagtttattattttggggttgattgttatggcggcctacaaacaagactagtcataattttttacttagaacccaatctgatcatacttgctcagctgcctaatcctataaaattatataatcttttaattatttattatatatctttaatttaatatatatataaaaacaccaaagacagcactaaagccaaaataatacaaagatatataggtataaaggataatattcttaaatatatacttattattttataataacaaatagagagattacttaaatcgaataaaagaaattaaactactgtttttaacatcttgtatactcctaaaacacttgttacgtactatttacgtctaaaacagcattttaattttattttatttttaaaatcgtgtacaat

SEQ ID NO: 293748 - DNA, 494 bp, Cannabis indica
tatgatattcataatttgtgcactcttgtttatgtaacatgtattatcttatggtttagaatagatttatgttggacttatgttgcaatttaggttggatttatgttggacttatgttataattaggttgaatttatgttgggttgtaatattttgaactaatatattagtcttttaggtgaaaaatcaggttttactcttggattggattggatggatccaatcaatccaattaatattggattaaaaatattggatggatccaatccagtataaaaaatattggatcaaaagtattggatggatccgatccaatacatggattcatccattggatggaaccgatccaatccaatgtttcattggatcggttcggttcggttgacctctggtattggattggatcggttggaggaatccaacatccaatgtgtaattggattggatctggatgagtccaaaaacattggatgtgatccaatgaacagccctag

SEQ ID NO: 293749 - DNA, 554 bp, Cannabis indica
tttgacccgtttttctgcatgcgggtccgacgaacccgacccaaacccgatcggaatagacaattccgacgaccaaattgcgtgttttcaaatctaaaatgttctaaatcaaataataaagagatccacatagaatttatgcacgaaaacacgaaaaaatataaactttaataacacgaagttaattgggtcctttaaaaagctttaactgaaaatttttccatctttaagtttttcaagggattttcaatgcttagatcgatttataatactatacgaatatagtaatatatttagaattcgaaataaacaccaaaaaaatgaaaaacggataaaaccaaacaatggaccgaatgaacttcatgtttatatatatatgcatgtatatatcacataaaatattataaataaatgaaagtgatattataaatattattatgcgataaaacatatataatgtacaatatatatatataaacatatatacatatatgtaaatataccaaaaaatgaaaaatatatatataatcatacgtgtataaggtatataatat

SEQ ID NO: 293750 - DNA, 744 bp, Cannabis indica
tgagtggaagtgcagctcgacgttttacagggccctaaaccataatgttcaaacttcggtgagagacacgctaaatactttacggggatttaaaatacaaactaagcttaaccctatcgataaaaaggatgacaacaccctaaattacgtgaaaacgggaaaaactagggctcgggaaaaagtcccaaccggcaaaccggttgccaaccggaagtccggttcctggcaccaaccggtcgaccggttgcaacagggccccaggaaccggaattccggttctgagctgggaacccaaaaattcctcccctttactcaaatcaaaaccaaatcttctaaaaacttccagaatacctgcatacactattccaaaccaaacccaaccaacagaactcaacaaatgaaacaaaattccaatttaccattagagctccaacttgaactcacaaactcaaattcaactcaaacattaaaatactcacctagcttagcttacaattaagataacaatctctatttaacaccagaaactaacctaaacaattcccaaatcaaacagccaccaatttccccaaattcacaccaaaacctaacttaaactacaacaaacttcaagtaagagatagagaaaaggattaccttgaacaaagcttcaattactactagaatcccttgattcaacacaaattctcaacccccagctgctgcccaagagaatcgaaagagagagagagagagaaaaaagct

SEQ ID NO: 293751 - DNA, 513 bp, Cannabis indica
aaaatgatataccgtatagcaaatactgcatatacaattcactaaaatatatatactactactaataataaaaatatataatactaatatatatatatactatactaactaaattatacgcaataataaaatattatacaatgacaacaaaattatatactactattgtacataataaaatagaaactaattaagtaaatattatttaaaataaatatatatcatacaattaaaatatataaaaataataattaaatatatgtagcatgccaataaaattatatacatacattaaaatatttgtattatgctaacaaaattttatataccactattatacatagtaaaataaaaaataaatatcatctaagaataatataatatactatacaacaaaataaaaatatactgtacaacaaaatatatataacaacaacccacaacaactcataaaaaattaaaaaaacggacataactttcaataaaaaaaatagacgaaactaatataaatgt

SEQ ID NO: 293752 - DNA, 592 bp, Cannabis indica
tttccgttactgtttcgagcaaaatatctcccccaaaacttcaaacatggagaaaaaactaataactatcaaagaaaaataaaaataaaatgaaaaaaccataatgaaaaacacattacctgtaaaaaaaatgatggtgcaatggcgcttcacggtggcaaacgggcggactatggcggaggaggacgactcggagaaggggactatggcagaggagggtcgagcttagggaggaggaggaggaggaggagaagggtcggagtggggtggtgtgaaatggagtggggaaatggaaaatgttttctgagttatgggggggattatatagacatttattaccggcgggacccgccggtattaataggggttccgccggtattaataaaacggtcagaatcccctgactaataccggcggaacccgccggcaataatccgccggtattagtcttttcaaaaatttgggcggtaaaaatcccgcccaaactattagaggcggattttccgccggtaatactaaagttccgccgggaatactaaatttaaataaatatttaattaatttttaattattcaaaagtaataccggcgga

SEQ ID NO: 293753 - DNA, 658 bp, Cannabis indica
agatagtccagtcgataacttttacaaaacatacgatccaaaatggtattaaccaaataattatacaataaaatagtaaaaaggtccgtacaaaattattacaatttttatctaaagtaaatataaacatttttataacaattgagtccccacatataaaaaatgttgggttcgtcactcctggtaatggacaggttttaccataaggtattaagaccatctccaatacaaaattaaaatttgtgttaaatttagcacaaaaaatgagtttgtgctatatttgacctactatttataattgtgttccattacacaaaatgtaaaataggtaaaaaaaaagttcattattggtaatgatggtcattgatattttattgagaatataaagaaaatgtataatttttatattttgaataatggtaatatggtaaataaaaaaatgtaaaatagttgtaaaaattaataaattataataattagtgatattatagtaaataaaaaagttatatttattgtgtaccaattttagtataatagtatatcttgtgctaaattttaattacaacttttaacatataccacatttaacacatttttttagtaatgaaatagtgtttttcttaaatttgctaaaatataacaatataatatttttttt

SEQ ID NO: 293754 - DNA, 508 bp, Cannabis indica
tgtcatattgccctaactctattgcccatttaaggaggcgccctcacatatcgggtttttgtagtcacctgacgtaagggttggtcagtgagtaccacaatgggatgagcctgaaagtagggtcgaagcttcctggatgctaagataaggcagtaagcaagcttttctatgaggggatatctacactctgccccaatcagccttttgctcacatagtagactgggtgttgtgttctatcttcctcccttaccaagactgcactaactgcatgttctattactgctaggtataagcttaacccttcaccatctaggggttttgaaagaactggaggctgggataattgttgctttaaagctcgaaaggcattttcgcattcctcagtccattcaaattttttgttaccccttaggatgttgaagaaagggacacattttttggttgatttggagacgaatatgctcaaggcggcgattcggcctgttaagctttggacgtctttaactt

SEQ ID NO: 293755 - DNA, 558 bp, Cannabis indica
gcgctttgcgtgggtttgtatattatttattgatcattcaatcataaaactatatcaaaattttaatatttagttgtataaaaaaaatataataagaaatataaatatgatacgatttaaaatatatattttcagtaactttttttaccactataaagaacacaaatattaataaaaatcatatctattctatacaaaatgtggctatataacagaattcttggtttatgagaaatttctaggggcagttttgtcccatgtggctcgctctgaaaatttagtggcccatggcttggcaaagcatgctctgcggttagacgatgaactatcttggttcgaggaggttccagcgctggtggcggacgtgggtgtcgtaaattcatgagtgattttaatcactttgtcaaaaaaaaaaaaatatagatatatatagattatgcttaaattgacactataacatttattgttaaattcatctttaatggtaaatatactattttagactttatattttacaaaaagttattaaatttagactctctatttgttaaatgacaa

SEQ ID NO: 293756 - DNA, 696 bp, Cannabis indica
actagagatttagattagcatcacaaatattaacagtgtaaataaattttaaaattaatcaagttatgggtggtggggctggtgcgtctcgtcggagtgggtgaccgggtggtgcgtctcgtcggatccagaatcggtggtgggtgggggtggcttggtgcgggtgggcctgggttcgggtggctgggttcgtgtggtgtggtgtggtgtggttggtgggtgggggtcgtgtggctgggttggtgtgggttggtggaagaattgggtttcacaaccctaaaagaaatctgaacaaaaaaataaaataaaataaacatgtgtaaaatgacgtgaagtgcctaatggcagccacgttatcactctgttactaaaatgaacggaacaagacagaataccttaaattaagcattgtcaatagttcgaggggaatttttaacgtcaaaaatagttcagggggcacgatttagcaagtgtcatagttcggggggaaaaattacaaattagccttgcataaatgacaattttatttgataatcaattataattattaaataaatagttttaacatttataggattgaattggaaaatatggtattattgaaagaagaataaatggttaaaaaaaagtggcaaaaaattgtaaactcgagattggtcctttatggctggcgcttagagtgaatttttgcctaat

SEQ ID NO: 293757 - DNA, 752 bp, Cannabis indica
aaaaaattataaccattttatgaggtattttgttgtggaactagttttgtttttaatttatgtttcagtaatataagaactgattttctttttgtttttaattgtaattgatttgagttattgtgtattacttgtttatattcattatgttataaccaattttattttagttatgactagtttgagtcatttcgtgttatttgtttttattcattataacactgttataaaaaccggttctattttaattaactggtttgagttattttgtgttatttgtttttattcattatcttatagaaaatgttatatttcaattatatttggtttaagttattttgtgttatttgtttttattcattaggttataaaattggttttatttttatttatatatgagacatctaattctggtgattttttcaattacttttttggtgacttttctagcgacaatgactttttcggtgacaataacttttccagtaatttttctggtactggcgatttttctagcgaaacttattattacaaaattttattaaatttatttattgtttctttttttttttcccatattttaaactttaattattttttaatcctatattttgtttggattatttatttatgtcttataaaattaaatcctactacatttttcgaaaaaaaaaaggaaatttataaaaatactggaatttgggttaatttttacaaaaatactgtcacacgaattttttttcaaaaatact

SEQ ID NO: 293758 - DNA, 552 bp, Cannabis indica
ttcatcttcaggattcaagggctccagagcatactgcttggcccttgcacctcccttcaacttagctttgcgcttaagttgaatgagttcattctcttgatgagctcgctaagcccgtccagcaccagatttcctcttcctctccctcactggcttaggaatgaaatcctttgaataaaacccgtacctcacaaaattatcctcggaagtcaaccaggggatgtttcggtcttcccccggccgtcgagcaagcttttgagctctatctctaagagcaagagtgaggggagggcagtgatacgttggaatttgctggaaccgaatctgggtgatgcctgcgccatccaccaagaagtactcatcaacaaaatgccctattttgctgatagtcgagtcatcagtgcccgtcaaccacatgaagtctagttgagagaaatagaagtaccccaacctgccttgtttgggggtggacttcaaatcaaagaaccagctgacctcgtggggagaaggcataccccacttcttggaagcgtagaggacaaagagggcaga

SEQ ID NO: 293759 - DNA, 433 bp, Cannabis indica
agatcttctggaaagacctctggaaattcacagactatgtgcacattctccacatttagttgtgtctctattgctcgatccactacgctgaccaagaatgccagacaccccgccttcattagctgactagcttttagggaagagattaatggagtcctaagggccagcttgtcgcccttgaaaataaaccgatcccagcctttgtttcaaaaacgaccagtttctttcggcaattgattatcgcgccgtgactagatagccaatccatcctaagtataacatcatattccttaatttccagctctattaggtcgcccatgagttctttgctttcgattatgataggtacatctcgcattcttcttgttgataacatggtttctcccgagggtaattccgtcacaataccacatctaagtaggtcacatggctt

SEQ ID NO: 293760 - DNA, 805 bp, Cannabis indica
agacatccatctatttcatctatatactaatgaccatagaatttgacattacttttttagaattctcattagtaataataaaataattacatgtgtatctttcttctacatcttcgagagaatttattgggtacttgtgctaaaagttctaatgtatatatcttccaattccatggccataaaatgggaaacttcacttatatattttgttactaattttcatttaaaaaagattggattatgaggaatataaaacttcacaagtctatactttgaactttgaagttggaattgtttatttaataaaattacaactttagaaatctttttcagcacagatctcaaagaaattttccttattcaaagagctaacaacaaagatgttaccctttaaacaaggtaattgcttttatgtattagttaactttttatttttttgaaatgtatattagttaattctttagtctataatatatttgtgttatattcatattatattttcatgtagacccaaataataataaaaaataggtatttgctctaaattgagaaaaaaaaatcactctttgaattattaacaatgttaaatattattcttgaattttgaaaacttttgttaaataattaacaattttatccatattgtgataaattcaatataaatttttttttaagtctaagtaccaaataattaaaattcttatttttatttgtacaattaaataaagtaatattaaaactaaatatataatctaagtaaaaattaaattaaaaaaataaaacaaataaaactattaataagttt

SEQ ID NO: 293761 - DNA, 698 bp, Cannabis indica
ttttaatgtttcacaacagttgcattataattgcataaatatttcgctaatagttatttcgtttgattgtaaccttcatctgatgtaacattcggccaaccacccagcaatcactcagaaactttcgtctaattgaaacattcgtctgatgcaactaccgcgcaaccacgcagcaaccaccctgcaaccatcgtctgattgtgtaagtaatgatagtataagtggtattttagtaattaaaatcacataaaaggtataaatgttgtctttaccttgtgaaagtatttttataaataaaatatcaatttatattttctatataataatttctagtttcaaagtaaaatgttattgtttaattatataggttattttttttttttttttttgtaaggaagtaaaattttattcctcaaaactaaatacaaccacaaattaattatagttcaatagttagtaatgtaacaaatttctttgtaatataatatattctttctgtttattaattttctcataaaacaatctagctagtagtttaaataaaaggttttgtatacttcaaaaataataatttattgcaatattattttctgatctttgcgattggccattactttggaagaaaaagtactaatgctaacactactacaaaaaccccctttacgaggcggtttttaagccctttcagcgtcggtttt

SEQ ID NO: 293762 - DNA, 785 bp, Cannabis indica
ttctaccactgatagagaggaaagaatttggatgaggcagagctagggtttcggagaggaaagtgaagaagtgaaactgatcactttccgtaggccttaagtataggcaccctgacacaactgaccaggcaaaaaaaatgatgatgatttttttaaaatttgatttttgccaaagaaaccgtacgcgcccaaattgaatatttactaccacatcatacggcacactaaacgaaacaaaccaacgtcatcaggcaatgagtgtatcaaagaaaccagaattgtgacaaatataccaacaatatttgcatttagcccacacttagacaaaacagaaaaaataaaaaaaacttcgagatactcaaattttaagacaaaaaaaatgatatcagctgatcaatgaaaagtgtttctgagaacacacgtactgcacatcttgagcaacagatcattccccttccccagcgacaatgatacttacgagagcactacaccttgaatctccattcgtgtgtgaacagtgatctcatgtggtccaagaagagtgaaaatcagctggaccactctctcaactaagcaacaactgatagtagaaaaataacgatttttgtattgttttttttatgaagcctttttttttattatatcactatggcttttgctttagtacccagacatggctttcactctcttccagagatgtagccgtcctctttgagtaccaagaactaatagagaaggagcatactacttattagaacaaggtgtacgagagctcttcccactgc

SEQ ID NO: 293763 - DNA, 474 bp, Cannabis indica
caactcaagaaaggttcaagaaagtgatcaagactgggagaagaagaataaacacaacaagaagttgtggacattggaaaatctgtggaaattccacaaactgataataaacaaatctttctaaactcaactcaatttaattttgatttttgttatttttcttaacatgagcaatatcaaagttgacattgatcgttttgatggatctggtgattacaggatctggaggagaaagatcagatctctgttggctcaacagaaactacttagggttcttgaagaccctattgaatggccagaaaacacttcaaagattcaacaagaagaactgttggaaacagccactggaatcataattttcaacctttctgatgccattatcagattggttgataaagaagaaacaccagctaaaatttggaagaaacttgaagagcagtttcaacaaaaatccctaactaacaagatctacct

SEQ ID NO: 293764 - DNA, 937 bp, Cannabis indica
gtttcctgattttgtgcatcgttcccacgatctgttccaacgttcccttccagtaacgtatttcttcccgttactatcagtgcattgcctatataatgcgactgaacagtggaagaaaatatcttttttcactctgataaattatacgatatatttacatactactataatacatatttatattttcgagcagtagtcggttttgggtgtttaatttcgacggtactctatcgtgcaatagagttccgatacagtgttcgactgggctgttttatcctggggacgaccggcaaatttcgactgcttgcacactcctgggcagtgccgcgaacgtcttaaagagagcgacatagtccgcgactcaacccagaattcttcattcggtaatatcgttcctcttttattttgctagcagtttactcaacaattttaagacgttctatctgctatgactactaccgatgaatgttctggttctactgctgacattaacaagccttttcgttttgagggtttgcattttaaacgttggagacaaaagatgttgttttttctgaccatgaaaaaagttgcgtatgtgcttactgttttgaaaccagttgtttctgagactccacctcctgccgagaagaaggatgaagtcgagaagtacgaatcgcaggttaaggaaagggactcctgggtagagaatgattttctgtgtaagaattttattttgaatggtttgtctgatgatttgtatgattattataattctgacaaatctgccaaggagatatgggaagcattacagaaaaatatgacaccgaagaggcgggaacaaagaaatacgctgtgagccgctacctgaagtttcaaatgaccgatgataaatcagtcgaagcccagtctcacgagcttcagaaaatagctcacgaaattctgcctgaaggtatga

SEQ ID NO: 293765 - DNA, 709 bp, Cannabis indica
ctttaaagaagatttcttccagtgctcctccagacactattgatttagtggatgacgaggaggtgctgccgggagaaggtcaagaaaagcaatggggcttttctgaggaagttgaagaaggtgcaggagggctccgggctcttcctgaggaagctgaaaaaagtgaagaagagcaagaaattgctctgattcgcaagcgtaaaggcaaaatgattgcccaggaggagcccaagcggcctcggagagctgatactccggcccacggtcttgatggtggggtctctcccatggaagaacatactgcccctcccaacattgtgctgactccggttcctggagatgaggcgagacaggagctccggatagctaaacacaactacgccatggatgaatactcccgggggtatgctgaggtggaagcccttaggagggttttgcgggttgaggtgcaagacaccatcaacaacccggagtaccagaatccgtgggacctaaatttggaccccctatcggactggttccgtcgcttccttgggcccaccttagctccctttgctgcggagatgactggcgagtttgcgtctcagcttacccggtgcgcgcctaagcggttcgctacttgtgcatccttgaactccatcttccaagtccaggatctcagccactccctcactgtggtaagtattttgtaattttgtttttcccctta

SEQ ID NO: 293766 - DNA, 353 bp, Cannabis indica
cctccttgattagcaacgagctgcacaacattttaaaaaatcacgtaatacgcctatgtataaatttttttttattaattttataatattattatatatatttaaaaatatataataataaatttgtatataatattattactaattaactaatttagttataatatttttatgatccgtttagctaatttcctacttataagcttggatttatttttaccgaacaattattatataatttttttaaaatgaaaattactttttaaatgttcggatatcaataaaaaaaaattaaatttttgttgagtgaaaataatttgaaaataagcttctcatgtttcattttttttttt

SEQ ID NO: 293767 - DNA, 867 bp, Cannabis indica
  modified_base (791)..(791): a, c, t, g, unknown or other
ctctcttcttccttaagatttcaaaatacttagtgttagagtagtgcccaaaaaaaagcaagtgatacctcaatcatagtaaggaagatcgtgaagaaagactattagcaagaacgagtttcagcactaaagagtcagagaaagagatccaagtgcagatcttgataataccctgcgacagaaaggatacaagggttagagatctaaaaggaaggagtcatattattccgctgcacccaatgtaaggtttagtaaactttatatgtgtttatttcatcgttttagaaagttcatatttagggtgttaatcaacatatttaagatcctggtaaaataatttccaacagatggcatacatcacaaaattggtttgtgggaattaaaaactaaatttgatttttttattgaatgtatatgaaatatacattgaaggatgaccaaggcgtgagtgccattgatctacattattgtgtaaagaaagacaacaactaggctgtattatggggttgagctcttgttgaattgcatagagtttcccaagccgtttagctttcccaatcacaatgttcgaagaaggagcctgtatagaacaagaatcattaaaaaaataatgtattgaggctattttcaatgaaggcaataagagaaaaagagattaatgtgaaatgttggaacaaataacacattttgaagagtgatgtgtctggtttaatcggactgttcccatgccttttacagggatgttcgcaccagtggaaagtacacagtttgaggaaaaaaaaatgttaggngtaaaagtgtgtaaaaacagcttcgcgtagtacacatgtgatgtgtttccccgactatcaataatccatgtaaatg

SEQ ID NO: 293768 - DNA, 614 bp, Cannabis indica
tcaaaaatcttgcccttcaagtctctaagagttgaatttttggtcacaatggtgttgctccaattcagaatccttggaatcctagatgaaactcttttacagaaagtgtttaccatggcaggacaacattcataaaaccaaacagtaaacacctacagacatcccaaagccctataccaaccatcatactggcctcctttctctgtcttcctatttttcattataatcccatgctaaattctacctttgaatgaatcaatagtcaattcaaaggattccctaccccaacaatactcatcccaacgatcgctattaacaacatctagatcaaacctagatacttctttatcaggagtattactaagaagaaagcattgaataaaatacaacacagccagtttcaatccaagagactcatccaaaccccacctattatccaaaaagcatcctcaatagttttgtggtcaatggtttttacaccacggaaacaaatttctaccaactgatttgattcctgtgaaaacaacaacttgttgcaatcaccaaaacaatcaattctagtgatcaaataaaactcctcagcactaaaccgtatgcaacaaccagcaacttta

SEQ ID NO: 293769 - DNA, 732 bp, Cannabis indica
atatatttctcaccatgttgagtgtgctacattactgggtgactcatgaacaggggcggacccacattgtagcgactgccccccttgaaaaaaaaaatcgagaaaaaaatgtatatgtattttaattagttacaacatatatttgtattaaaagatgatacttatagacataatagtaatcttggtgtaatggttaaggtagttggtaaataggttagaaggtaaaggtttaaatcccactaactacactttatattttctttttaaatttatttacgcccccctcactttaaattctgagtccgccactgctcatgaaatcagtttccatactttagaaaagtgatagactttcttgaactcctttctttccataaactatgacacttataagatattaaggtatataactacctaatgttgccaaaataataatctcatcggtatgtagtacatggaacgaaaaccaaagaccataagaaaaaattgcagtggcaaaaaaatatgatacaatattgatgcaaacagacattaatagacattaactatgtatgcatacataactaatccacttggaagctaggaatttttgaaagaaatagttgtctgctttagaaatagttgtcgatataaatcgacctatactaattagaaagtgacttgaataaaataaaataattcaataaataagatagaattcacaaggcacaaataaaatctaaaatatataca

SEQ ID NO: 293770 - DNA, 751 bp, Cannabis indica
caccattagccacacgacagccttaaataagctgattagctttctaaagttttttgatgatttgaaagagaatccctcagcacaaataatgaagtgatacgttgaaagcggatcaccttgtcggatacctctggttggaatgataggtcccatggaatggttgttgtgaacaatagtatatgtgaccgtggtaacacattccataacaagattcacccatctctcagcaaaccccatacgaagcatgactgcacgcaaatagtcccattcaacacgattgtaagctttactcatgtcaagcttaagagccatgaacccttttttccctcttcgtttccacttcagatagtgcattaattcaaaagccaccatgatattatcggaaatgagccgaccaggtatgaaggcactctgagtttctgagataacatcatcaatcaaaggacgcattcggttggcaagaactttagcacaaatattgtagactacattacatagggcaatagggcgcaagtctcccatggtagagaaattcttctttttgggaataagaaccaaattggtagtgttatatccactaggaaatgtaccagtattgaaaaaatcagatactaatgcaatcagatcggtacttacaatatcccagtgatgctgatagaagcccggtcccataccgtccggtccaggagccttatcggggtgcatttaaaaaagggcatgcttgatttccttcagcagtaataggacgtaa

SEQ ID NO: 293771 - DNA, 528 bp, Cannabis indica
gagtgggtcaggattccccctataagcggaccgcgcctactcaggtctttctccgaagggcccaggtctttgcaacttatgaccgggcgaaacttgacgccgggggcctagtcatgacggagaattgccggaaggccaagctcatcctgccgcaccaatcagtggaggactctaacctctccaaggttatctgtccaaatgtgagggtgcccgccgcggagaagaccttctgggatgaactcattgccaccgccgagaagaagtaccaggaatatctctaccagaaggcccaggagaaggcttattccaaggcccaggtagcttccgagaaaccacttcgcgtggggagcccgctcgagaggagaagccaggcgatcgctgggaagcccctacgcattggggactcagctgagagaagggctcccaggccaacgccttcggctcaggtgccgaacattggggctcctggcgccagcacttccggctctggtaagtctcctttagcagtacatgttgggttttatgccc

SEQ ID NO: 293772 - DNA, 717 bp, Cannabis indica
ataaggtgaattggagtaaacaagtttggggacgcttaaacacaccgaaacacagttttatctcttggattgctgttcaagatagattaaaaacaagagataggctgaagcgaatgggaattgtaaatgaagatacttgtactctttgcggtcaagatgctgaaacatgtgcacatttattttttgactgtacagttgcgaaatcctgcttgcaagctctaaaaaaatggctgcaatggcatgctgctgctgtagctttgccccgactgcttaggtggattgggagggccaaaataagtgaatttaggaagcaagtgttggctgcttctgttgctggtttagtgtactctctttggagggctcggaatctaaaaatatgggaagaaaagcaggtggatgttgatatcctgctgcaacaaaccagagaaaatgtcaaacagaggatttcactttgctggccgaagaaggtgacacacactgatctgcaatggtataatcaattgtgaaaaaaaaagaaagaaaaggaagaagaaaggagggcggattgtacagcagagtataaggtatagaatttttttttctttttgttctcttgaggtgatacagtgctggtgtatagaagattatggaccttgattggtgcctttaggttgtaaaaaattgattgtgagcaatacaaatattctgattcatacaaaaaaaaaaaattaaccaaaa

SEQ ID NO: 293773 - DNA, 915 bp, Cannabis indica
gttttgctaataagccttttttttacttttaccctttttttcttttttaaattcataccttgacaccataataagaagatgaaatataataagataagacaaatacatcttgttaaggtgagataaagtagtttgataatctttacaaaaagaaaaagtagtttgataatatccaatgcaaataaatgactaattttgtgatatacttggccaagaaaaaaaaaaattaactattgtgttaatacatggtcctatttttttattattattatcttttcatttaataaatctaatttatttttttattattattaaaaggatattttttttattatttttacactttataatagttttttttttttttgaattttttatggaaatttacataacaactaacagagtaacttaaatctcaactcacatggaaactaccggaacaactattagagcaacccaaaccgtaaaaataaaaaaaaataaaaaaagagtatatgaggtaattcccctatttcaaaaaaatatccaaaatgacacttttatgtagcaagaacgtaaaaataatggtaaaacaaccgtccatatttttcaaaaagacaaattttataatcgataaatatattggaaaaaaagctatggatccatatttttgtaaacttttatcaatttttggtatttataaaaatatcccttaccttaatgggctttattataatatgtaaagaaaggattgatataaggaaacttacaaaaatactggaatttaggttaacctttacaaaaatactgtcacacggaaattttttcaaaaatactgtgtttttataaaacaccagtaaacaccaaagcagaacaactcaaaacacagtagaacaccagtaaaacatcagtggaacaccagtaaaaacttaacac

SEQ ID NO: 293774 - DNA, 76 bp, Cannabis indica
ctctaatcactaaggaatttcgaaatattaaggaagaagagagagaaagagtggcggccaaaaatagagagagagg

SEQ ID NO: 293775 - DNA, 243 bp, Cannabis indica
cttcttgggtcacagatgaacatctcctcgagctaccatccacagacagatgggcagacagaaagattcaatgggatgttggaggagtatttgcggcactttgtcaatgccaaccagaagaattggccgcaactactagacgtagctcaattttgtttcaactctcagaagagttcttcatcaaacaagagcccttttgaagttgtgaatggacagcaaccactgttaccccacacagtggat

SEQ ID NO: 293776 - DNA, 691 bp, Cannabis indica
aagaccattacatatcttttcccactgatactttcattctgcattggccccattaagtcaacatgcattagttccaacacacgagaggtgagaagtctattaattgggggatgaggtgtcttatgctgttttccaagctgacatggaccacagactctctccttggacactttcatgtcaggaattccccttacagcttgaagcttcaccaatctttggagatctctgtagttcaaatgtccttgcctgtagtgccataagtcaggtttgtccaagatggtcctgttgcacactatggtgttgcatacagcatagcactggtctactgttctgtttcctgttaagacaacacacccatcagatgaaactaaacattgagttttagtgaaacttacagagaggttgtcgtcacacaattggccgatgctgatgagattggctttgagtcctctcacatataggacattagttagctgagctactccattcacattcacatcacctctcccagcaatctgccctttgttaccatccccaaaagtgacagatccccctttttcatctttgtagttaactagcaatttcttatttccagtcatgtgacgagaacatccacggtcgaagtaccactgcccttcaacaaaggcagacagggatagctttgcaaccaaaccaacatcaggatttggtt

SEQ ID NO: 293777 - DNA, 601 bp, Cannabis indica
tggcttccaatcgcactgacacaagagaacactggtccaaatcggctgctggacagttaaaaattaatgtggatggggcggtttttgaagacacaaatgagatcggtactggttttgtagcgcgcggctatgatggtcgaataattgaggcgttttcaactattttttctatcaattgccaacccgagattgcagaaattctaagtgttaaagatgcacttagttggataaagaggcataacaagtcaaatgtcattttagagaccgattgcattttagttgttcaagctatttttagttcggtatctatgccttctagttttggtctatttgttcaagattattaatttattttatcttctttaagtaatgttactattggtcatgttaaacggtctgctaacaaagcagcgcactgtatggcacgtggtgcttgttattggcactacaagaaatgtcacttttgccagcacatttttgtgctggcaaaagttggtattgtgttggtaaaataaaatttacttgtgatgtgttggcaaaaggggattggcaaatcaatgttggtattagaacttttgccagcataaaatgaaaaacgctg

SEQ ID NO: 293778 - DNA, 509 bp, Cannabis indica
tcatagcatcataatcataatattatatatatttaaatatagatagatagattaaagtaaaaactatatcatgaaaaacaattctaaatactttacttaattagaacccaatatatatatatttagaaatatataatattttttctcaaataaaataaatatatgtcaaaaaaaatatcaagacattaagtgtcaaatatcaacgaaatatgtgaaaaaatattttcttttatttcaaaaaatgtatgacctcttttattggatgacaacatgaaaactaaatatatatatatatatatttatatatatattacttaattgcaatatctaaaattttacaccaaattccaaactaatgaacaaaactcttccattatacaccaaaacatacataccaatataaatttatcttgattcaacattgaccattatcaccaattcaacatacataccaatagttgttagttcgtcttcccaattagttagaagataatccactggcaacatat

SEQ ID NO: 293779 - DNA, 642 bp, Cannabis indica
aaaaggtatgcatggcatgcacttagtactatatgttttaaggataattagtgataatttttttaatattttatttttgaaaaatgttaaagagtattagtggtgattactgattagtacctttctacatattaatattattattattggttcaactaattagtatcgggttctatataatttaatataataatttatatgaagtactattgctagtcaatcgtaaaacgacacatctagaaaatactaattaaatactagtgcctaatagtaatactctttatttttatacacttcttttatgcaataccctattaattttatatttttttttttataaatttgaaacattaattaaattttattattaaatatgtatgctaaatgggattgtcagttgtgacaataaaacttcaaaatcaataaaaatatatgtatatatacacaaatataaaattgtaacaatttacatttaatattttaacgataagatttaacagatgaattaataaaattattaatagaattaattttacatcaaacaaattctaaaaagcaatctaattaatattttaaatgataaggtttaacaaacgctacaaatttagtaagaaactactgaattaataaaattatttatag

SEQ ID NO: 293780 - DNA, 525 bp, Cannabis indica
ttaataaattatattttaaaaaatatatatcataaatatttaagtcacttatattttttaaatgtaaattattatatgcatttttattaattaaataaacaatgaagttacaaataacttttaaatcattacaaatacaacatttttttagaccaattagttatgatttcgataagataccagttggttaccttaataaaataatcaattttaaaataaaaagatgatgatcatgtcaaataaacttattagtttattttggcatattaaaataatttttcattatttgtttacatttttcgtatagcctaacatcgtatatgctaataaatttattagtttattttgacatattgaaacaaatttttatttttcttttcgtatactggaacaataattcatttcattttatataacctattattatatttgtcaataaacctactaatttatgtttgttggaacactatattttttcaatacaaagtaaactataatcaaacataatgatatacactaataaac

SEQ ID NO: 293781 - DNA, 686 bp, Cannabis indica
ttttttgtaaagacaagtttgtaaccagtcttaggtttttcttatcttaaatgccttgtgctgttttcattcgaacttaatacaattgtaatttgcttgcattttattcacaatgtaaacaactatattttgatcgaatatacaacacttttgggttttctccattgttcgtaatcttcttgttaaagtagttagtaatctaccaaactttatgattttcgagcggttgtcaattctgcctcacaattgcagttataatctgccttaagcaaacttaaatatactttaaggattttatcactttgtatatttttaatttgctcgcatgaatagttatattatctatcgattttctaggtttaagtacttttatcaaggcatcgtgatgcctcgtttagtactttcctagcttgcgagaaccgttagtatttagttttatacgcgagttataacttttgattttcctctcccgtcagataggttataataaaaaattaaagttgtttgatcctttcttcgtcaaaaaggtttgatcaatgtgttacaatgattcgacccctttctcgtcaaaaaggtttggtcagatagttataatagttcgactccactttcgtcaaagaggtttagtcgagaacctttgaatttcaaaaaaaaaaaaattaaatggcgggtttgcattatacaat

SEQ ID NO: 293782 - DNA, 1050 bp, Cannabis indica
aagacgataaaaaattttgggccccttaataaataaattttaaaaaattatatgttacatttcatgacataaaaataaaaaataaaaaaataaaaatctgaaataagttctaaagtatcataaaaattagtagatttgtattttttaatttactctatcatccatagtaatatttttatcttgcccaatttcaacatacaataaatcaaattcataaaaagaaaaactatctagtctatatttacctatagctacaaaaaaattttaatacctacattagattataatccataattataataagatatttaaaaaaaataaattaaaatcacttcaaataatattcaagaaaaatattatttattattattattattatagaaattaaatattatatcttgattaataatttttgtacataatattaaaatgtaattttgattgaagtaagataaataggaaaagaaaatcatgataagaaaaataggaaaatagataagaaagaaagaaaataaaaaataaataaccttataaaatgttttttaaaataatattatgtattatattttttttagttttttttagtttagttattaagttatatgggcttgtagtttttttagtatagagtcgaactcagatccctcaaccaacaaaccataaaccttatcatccttcacgcttccactatgctgagcctattttagttatattaaatgttaattttatataaatatagtaattaaaagatgagatcttaaaattttaaatgggcccctagaaagagtgggccctaggcacgggcctagcccgcctatgcctagggccgggcctgcattaaaggcagaattaagtactactattgattttttccttacttcaattgagaatgaatcgagccaaggcttccaatccaagattaccgatataaaaaaatcaaccatttcatctcatctttttctgcagtctctctcccactgaactccaagtcaaagtaaaaacgaattggtagaccctgaaaagcaacacatattaatgttaagcagataa

SEQ ID NO: 293783 - DNA, 730 bp, Cannabis indica
ttgctcccgatatcgaagatgatgaaggtcctattattgatgaagggcctattaatgatgaagctcctattgttaatgagaatcctgttattgaagaaattccagttgtggaagatgttattcaaaacaatgatcaacaaagagaagttattccagaagtacctcctctaagaagatctcagagacaaaagaagtcaacaaagtgtcatgataattttgtttatcttggagaaggagaatatgatattgatcattttgtggatcctgtcacttttagtgaagcacttaatagtccacaatcttcaaaatggttagcagctacggatgatgagatcgactccatgaagaaaaatggtgtatgggagctagttttattacctgatggttttaaaccaataggttgtaagtggattttaaaggctaaaagggataaaaagggacagattgaaaggtttaaagcgcgtttagtggctaaaggctttactcaaagagaaggtattgattacactgaaactttctcacctgtttccactaaagattcattcagaattattatggccttagttgcgcattttgatttagagttgcatcaaatggatgttaaaactgcttttctgaatggagaattgaatgaggaagtctatatgtctcaacctgaaggctacaaggagaatggaaaagaacacttggtttgcaagttgaaacgatccatttatggtctcaaacaggc

SEQ ID NO: 293784 - DNA, 557 bp, Cannabis indica
ctccaattctcaagagggactccatgaaagacatgctaactactaaaaaaaaaaaggattcctatctctacaattttttttttgtgaaaaattagctagatggacatatgtatatataggaaaaaattaatatgtataggaagaagttgaatagttaaagtaaatttaaaagtctcaaataaactctaaattaaatctacaactatatatgaatacaaataatataaatagggtatatttatatatatatatatatatttattggtatgataagaatgtgagtagtcttagatatagaatgataatgaagagcctcaaataatgtttaatgacatgacttttgattttttttatgatagttaaacataactaattaatagtgatgacaaaaattaatgaaaatattaggtaaattagaaaaatagagaaaacaaagaataggcaaaaacactcttataagttgaccacataatctctcttattctttcctttatatatactagataagagttacgtggcgagccacgtaaatattagttttatataagttctagtgg

SEQ ID NO: 293785 - DNA, 727 bp, Cannabis indica
ctttactcgaaaaggttttcaataaccctgaggtataatagtctttgtacctggttttactatttgattttttttatttggcttgttttatagtatagaaactggtttttaacaggtcattgtagatgatttttgtcttactgatgctgagagacgtaatcgtcttttgaagaattttaagtttcaacccgtgtatcttcctaagagtgtggatgatgagaaggtaagaaaccagttttcaaacattttttttcacaaattgttttgctaacatttcatattatcttttttaatattttttgtgtcttttgtaggattttgaggagaagtttgagaatatttgcagaaatttatcatttattaaagattctcaagcatccattcgtaatgagatggcaatcttcaaagatgagttttctggggatttggctaagttgagtgggatgattgaaaagatgaactccaaaaaccatgaaaagatggacacagccgatttgtttggtgcttctgatagagaggtagatcgtttattattgtttatattaacgaaattattagtttcttttaatttttatatgtaattattctttagtataattgattatcacattgaaactggttttttttttttaaagttgttactattttttgattaatttttctttttgtattgtattttttcctttatgttttttttaagaaacttgttctttttaaaaaaaaaaaa

SEQ ID NO: 293786 - DNA, 490 bp, Cannabis indica
aaattagacaaaaacacttaaatctaacaatcttaatagtttaagagaatttttaacagacgaaaaaattcagagcgaatgatttagtatatgtcaaagttcagaagaaaaaaatcatagtctaaaataaaataatatcgaaataaacttaattttttctacttgtttggaaaatccccaaatggtctttttgttttggcaaagtacccctaacggtcaattgcatttgcaggcatgcataaagatatttggcaaccacatattcttagggaaattttattttttgcccctaataaaacccccaatatcaaaatttagaccattcactaatttgtacaaattaattccattgattacatgaacttcccacttcaccctttttttaaaaaaaaaaaaaaaaaaactgttaaaaactaaaaaacttacctctctcttccctctctcttccctctcgtgcacctctctctctctctaaagaaaaactagaaaa

SEQ ID NO: 293787 - DNA, 646 bp, Cannabis indica
catgattcaaagacaaaagcattaccttcattcgaattttttagaattctgggacatcgttcttcctgatgtcccttctcatcacaatttgaacattgaagagtattagcattaattgtacttgaagaagcagcattgttagaagcttcatccttaatccttttcctcttacaaaagtttgcaaattcgagaggcagcattgcaatcaagttccgttcatgagctcacaattcttcttctagcttatccatgtcgggagagttaaaattgttgatcatataagatacaaaaaatctattatacttaggaggaagactattaagtatgaactgaacccactgttcttttgataattcaattccaagcaagttttctttttggaatttcatattcatcagtaacacgtgtgagttaatgctctttccagggagcattttcacactaaagagttcatttgcaaaggcattgactaggagtgggttggggtgtgggttgttcattttgacactacaaatatcaataaacagaagtaaatcatttgattcaataaattcatacacaaattctaaaaaaacatgtataacaaatatttttataaaaataccaaaattgcaacatattttttttttaaaaggttttcaacaaa

SEQ ID NO: 293788 - DNA, 619 bp, Cannabis indica
gtgagtagttactgagttcggtagatgaattttttgatgcaccacacgaagcttcacggggatctcaacagcagcagatttgatcatggagaactcacagatctgggcgagatctcacagatctaggtgagatctcgaagatgtgggctagggaagaagaacccgcgtagaacctcaaagctcctctggcgtgctcttccgccatagttatctttttttgtcgtagcagttctccactatacacgaacttgaagtcgacatttgcgaagggcaacacctggtttttagctgacgacaaggatggagctccaattgtttgtggccagcagcgaggatggagctttacccaattggatggaggttgaattttagcttttaattttgaaatttatatgtatatatattgtatatttaggtataaatttctagaaagtaggaagaagaagatcgaaggagttacggtggtgagtgaagaaatttttatttttggtggtttgaatattaacttgtggtggtgatgagtagtagtagtttcaatagtagtgatggtgggattcaagagatgaagaaggtgaaaaaaaataaaccagtactagagagaaagaattgggagagaaag

SEQ ID NO: 293789 - DNA, 734 bp, Cannabis indica
agatcttgtgtcattcaatctaagtccattacatttaaccattccataattaaatataactcaatatcaagctattggtggccaaacaatatcaagaaactaacaataaccacacttgaatgaacatgagaatttttactaaatatttgcataaaaaaattactaaactaaaacatagggttcttcaacaattcaaaccaaaaaaagtttagctcatagctaacttaaaaactaccattacaagataaaatttaggcatggagtttgaatgttagagttagagaaaataaaagagaaaagaaagaaatagcaaacaactatagatgaggagttttccaaaagggtggatattgaatcttgttgttcttcttctcctctttcctccttcttcttcttctttcactcctttttttgtagaaaaatggcagaatatttcttccaacgtgctgccctcctttttttctctaaatggaggttgctttctttttacaatcctcctatgtttagtaccatttgccccaaataaaccctacacatggcatgcagctagcctctccatgtaatagctccagccaccactcctagaatgccatgtcatctccacaaatgccacctcttttaatgaaatgccagctcacccttttcctaagaaataaaacacaacagccactaacatgtttgctgcaacaaaaacttcacagaatttcagcaaaattaagaacatgactaacttg

SEQ ID NO: 293790 - DNA, 506 bp, Cannabis indica
aaagagtccattttattcttaacagcttatcacctgagtttaaccaattcgttgttaacaattggaactcgtccgacatagacaagctggacgctgaattgcgtgcttatgaacagacaatgtcacttacatggagatccttctccagtaatgcagataagggcaaaggaaagctgaagatattgagaataattcctccaacaatcctactacttcaggctcagttgaaaaggatagagaaagtgattccacttactcagattatctttcacaacagattgaaccaggaataagaacaatccaaaaacagttacgcagtcatattaatggtaatgctttactttttgaatcaagtgttttagagatgacaaatccatctagattcttaattctggatctactaaccatgtctgttgttcattgcaattgcttaaaaactggaattatccggagagttgaaacttaaagttggtaatggcgaaatggtatcggttagagctagagga

SEQ ID NO: 293791 - DNA, 705 bp, Cannabis indica
cgacaagggtcataggaagtcgcgaccccagtcgcgactaagccactttccagaaaccatacgaattttgaattcgagttagtcgcgaccagctcgcgaatttctttaaataccacatcttttccccccatttaaccctacacccaaattcaaaaataccagccgtccccaacctctaccattcaaaaatttcaaaaattttccttcccaaaccttcaattctttcatcttcaaacctatttctctatcccaattcatcctaaaacctaatttctctcatcaatctacactttccatcaaaaaccacccaaatactcatcaatttcaccccaaatctgaaaatacaatagttcttcatcttcaacctcaaactctcaaggatattcgacaatggaggtggagtagtggcgtcttcgggtttgtaagtattactctctattacattttgaaaaattgcatgaggattttgagtatttttgtgaaaatagtgattattcttggaatcattggttgatataggaattattaggtttatagtgtgattttggactatgaatgtatttgtctggattattgtggttagtttttgaattttttgggatatagaaaattagaggaggtgctgcccaattttttttagcattatttgaaaaaaaaatatcagaaaaaaaaggaaaatccaaaaaaaagagagaaagaaaaaaa

SEQ ID NO: 293792 - DNA, 1581 bp, Cannabis indica
ctttagttactggtgtgaagcaccatttgagttctttgtgcacttgatgctcaagctattgtaagttgtaatcattgccattaatcaataaatttatcacaacaatagtgttgtttttacccggagattaggtccaagttttatctaaaacttgtgactgaacctcgttactttcttgttgtgttttatttttctggtttgatgcgtttctggtttatcattgtaagccattttattcttgcattgttttcttgttggtgcttgagtgcacaacaataactatatcagtatctcctcattgatgagtcaagtgaattgtattattaattattgtgagatgtcataaatgttgtgtttacattaaacatttagtttttgcaaattatttttaagtttaattttttcatattttatattatatttattttttaaaaaattaatctacattcagttcttttttaaaataatttatttattaaattaatttatatataatgtgaatgtacattataaatattaaaattaatatattagtcaatgtttcaatttgtatgtgattttgttttaatttgtgttttctgttataatatatatttttttttatttttaatgaatttgtgctactgaggtgtttgtatatttttttttagctatatgtatttaccttatttgtttttacattgtagggaatatactgttattatttaaaataaaaaattatttctctttacaaacaaataatgatcaatctatttaaaaaatacattaaatacgtattggtttgacaacctataatattgattttattattgcttttatagaatattttgctaaaaacacatatgttgttctttgaatttttcagaaacaaagaataaatgtaaagtcatatgttgttatgacttatcattattattcttcacattcaggataactactatgtgagtatgtatagattcagattaacgtactgtttattattaataacaatgtatatatcataagtttatagacacaataacaattttcttaccaaatacactaacacacagtttacttttataaaacaaatcgttcaaataatcataacactttagttaccaaaatctaaaacaaaaaaccaaaccttaaataaaagtaacatttacgtggcttgacacgtaacatcaacctaagattctacaaaagtaagggtattcctccaatccaatctaatccacacgatatgctcatagcacatccaatctgcaataagtgcggattttattttttggattcaatccaatgtgcaaaatagcacaaatctaatttgtaaaagtgtggattggattagttatttttgattggttactttttaatattatattatttaatatttattaaaacatattttcttttcatataactaacaacaagataaaatagattattgttgttttatgtatccaacaacaaattaaaataaataaagtaacaataacaatttcatcagaaaaaataaaaatgtatgtaaaaaaatgtttaattttgttttcaattgtatctaaaaaaaataacatatgtaagaatagactatacact

SEQ ID NO: 293793 - DNA, 689 bp, Cannabis indica
attggaactatgactaggacccaaacttgagaccagaatcaaacccaaaccataacccaaactcagaccagaacctggcccgagaccttgactaggactgggacctgagacttgggacctgaacctcgaccgagacccagaccgggacctagacctgagcaggtctgaaaccctcgccgggacctgagacctgtgacccagaccaggatcaagaccgcaacaatgaacccaaacctaaacccggaccaagactgggatcgagacctggacccgaactcagatcgagacctagaataaaaccaagactcaggacacgaacctgaacctggacctagaccaggacctaggaaccggacttgggatgggggacctagactagggacctatgcgccggaacccagacccagatctaaatctgggaaatcaaaccttaaccaggacctgaccaggacccacgaatgtgaagttggacccagacccagacccgaaacctgcccccgacccaaactaggacatgaacctggacacgaacccatatcaagataaaacccgaaccaggaaccgaacccaaaatcgatcccaaacttgggacccatacccaaacctagacctgcacccggacccgaactcgaacccagactgggatcggatcccaggatatagacccagaactaaacccagactaagat

SEQ ID NO: 293794 - DNA, 716 bp, Cannabis indica
gttaagttagttacaacttaacaaacttaacaaacgctttgtaacaaaatctccacaccaacacaagaagaggtgcttccggaagagacacacacttcctggacaacggacaaaagtgaatgctgatggggcttctaaatatgaaagacccatctggagatgactatctggaacacccttcaaggaggaacaactagccaactaaaactcctttccaaaggaaggttggctctcctaaagactacactcggagtggacacgatagttatccaagaacattcatttgaatggcaactatcattctacgggacttcttttgaatggacaagttagctatatgggaacacacttttgagagacaactaacattctattactgggacagtcttataccacaaaccccacctagttaattcaaattaaaaaatattgacagtgatgaagaaagaacgcatctatcatagttagtgttccaaaaatctcagtttactaacttttgagattgatcaagtccaagccaatgcttgaacgtgtttactgttaagaccttagtcccaacatcatcagattatcttccattctaaccttctctacattaacttgtccttcttcaatcttctctctaatctagtagagccttatgtctatatgtttactcttttcatgataaccgaattccggcaaagatggatagatgagtagctatctgagtacac

SEQ ID NO: 293795 - DNA, 517 bp, Cannabis indica
agggagcccatttcacctgttcggccatcttatccctttgctggaaaagggaaggctgtcatgtctgagataaactcgatgtcaggtgatgatggacttctgactttctgggcgggcagtcactctgcgctttacttcttttttcagcttcttgactttcatgctttgtattttctactggtttttgctaaccacgctgtttttgttctgtgcagacatgtctcggcagatgcttgacgctctaaggaagaggatgggcggaagctctagcgcctcccctccggccaagaagcttaagggcggagaggggtcttcggagaagagaccttctggagaggttattgacctttccgaggagctgactgctgcaaatccttctactcccaaatctgccaagtctaaggagtctgggccaccaacaactgggtctgaactggtcaggaggatccctgagcaggtgtaggcaccaactccacctgtgcccgtgctgactgaagccaagaagggcaaggagatg

SEQ ID NO: 293796 - DNA, 580 bp, Cannabis indica
agttagtgatgatgcaatccgcttgagacttttcccattctcgctgagagagcgagctaagagttggttgatctccttgccaccaaactctattgcaacatggactgatttggcgacaaagttcatgtccaagttttttctccagcaaaagctgccaagctgcgaggtgaaattaacaatttttgtcaactagacaaggaatctctctatgagacttgggagaggttcaaggatctcatcaggaaatatccacatcatgggatcgaaaagtggaacttggttcataatttctacaatgggctgattggtaatacaagaacaattatagacgccgcagctggtggggcatttatgagaaaaagtgtaaacgaggcccatgatctgctagaagaaatggccacgaataaccaacaatgaccaactgaaagaagccaaacgaagaaagctgctggtatgcacgaggtagacgccatcaccaagttgatagcccaagtggaggcctacgaagttgatgactgctcaggtgaaacaggctcaagttacttgtgagctatgtggggggcccctcacacatatgaca

SEQ ID NO: 293797 - DNA, 529 bp, Cannabis indica
aatccctaattattcaaagtcattaattttttaatttttttttaaaaaaaaaattgtgtgtaccaataagaaaatgacacgtggataatgacttgatatttaacgttaaggtacctacagagttccagaaatataacttaagtattattaccgtcaaaaaaaaaaaaaaaaaaaaaaaaacttaataattggtatactcactttaagaatatattaaccacttcatatatttttttgtagcatcaggaatttataagataagagcttaattgatatttaattgggcagagtagcttgtgccaatttcctaagattctcaattatcataaccagtttgttgtttaaccgattgacaaagcacttgggaagccatcctgctggatctagctgttcaataaacacaagcaaaagatattagctttgactcgtttcaattttttatttatttatttattttgacaaagtacttgttcaaatttgtttgtgtcaagtgtagtctgttttaaatttgtttggtaatttttcagcc

SEQ ID NO: 293798 - DNA, 519 bp, Cannabis indica
attaattgaaaatcgaaagactaagataaatagtttatattaatttttttttattgattttggtagaagtggaatatgcatagatcatattactactaagttttgattatctattgagattttggcagttaaactctcctaaatgtcgtttcacttgtatttaattaaacaaattttggcggtgaaattaggactgtacatcggtcggtttaggcggtttatcctatatattttctaacccaatctaaaattcgggttgctaaaatttaagtgcaacccatccaatttaaaaaaaaaaaaaaatctataaactgaccaacggtttgggcggtttggtcgggttaacccgcccaaaccggccaaacttttttttttttttagttttaaagtcaaaatcaataaaaattaaaaagataaattaaaaatatcacattccaccaaagtacaacaccatatatatatcactttaaaactaataattaagtatataactttatatcattatatatttaatcattt

SEQ ID NO: 293799 - DNA, 764 bp, Cannabis indica
agctttaaaaatcttgctgacaagtgagtccggacgactaaacaatctgcatccttgtttacaaagcaaactcaagttaaagtcatgcaagttgcgaaatcccataccacctttagacttatgtaccgtcaatctatcccactttttccaatggattcctttgttgttcttcgacgatcgccaccaaaacttacacatcaattgctccatctcattgcaagtttccacaggtagcaaaaacacattcattgcataactaggaagagattgagccacagtttttattagcaactccttccctgctctagaaagcaatcttccttcccaaccttgaatccttttacgcattttatccttcaagaacccaagtaaggccgttttattacgacccacaatatttggcaaacccaaatatgtgctatcatcacctgcctcattcactcccaacatagaacacagatgttgcctcacctcattgacaatattagcgctgaaaaatatagaggacttctgtagattgacttgttgtcctgaggccttttgaaagatatttaacatttctatcatgttaatagcactatcctcagaggctttacaaaacacataacagtcatcagcaaagaacatgtgagataacacaggagcccctcgagcaaccttgcacccccgaatcttccccaaccgttcatagtctcttatcaaagccgagaatccttctgcacacagaaggaaaagatagggtgaaaggggatcaccctgtcgaa

SEQ ID NO: 293800 - DNA, 611 bp, Cannabis indica
aagtctcctatggagaactttttattttttcattttagaattgaagtgttttgtcactttcctttggtacacaaccagacgaatttgtgactcctctcagagctcttccacgagatctagtgattcttgcaacaatgattggttggtggctagatcatagttggcccttctatgggagggaatggtactctctactgggaccattgcttcacatccgtataccattaaaaatggagagtgtcatttggtggtccaggcagtagttctatatgccagagtactcatggcaattccttgggccaattatttttgcaaaccatgagttttttcttgagtgtgacctttaaatatcttattcatagcttctgcttgaccattttcttgtagtcttgaaaccgtggagaagctttttatgaatctatgttttttgtagagctcagtgaatatgtcactatcaaattggttaccattgtccaaactatcttgtgcacgtacacactcaattgggaccatgggaggaccagtaattgggcttatacttcaagactcaacctcacctaataaagacacgtttgctttaatcacttgagcgcactcaacaggatagagat

SEQ ID NO: 293801 - DNA, 1067 bp, Cannabis indica
cttcgaggaactggataggaaccaagttcgccttatcacttacattactgcttgccaatcgagctaacgcgtctgcagttgtgttttcttcccttggaatttgtctgagaccgtagcttttgaattgtgcgagcagatcatgtatttttctcaaatatgctatcatcttttccccccgagcctcgtattctccagatacatgatttaccaccaactgtgaatcactgtagatttcaatgtgtttggctttcatctcccgggctagttttaggccagcaattaaagcttcatatttggctttgttattggatgccttgaatccaaatttgactgcagtgtgcaggcgttgtcccccagtattgacaacggcgattcttgcaccagatagttgatctatagccgacccatccacatgtagcttccaagtcagcttgtcttcactgttacttggctgaggtgtttgtaccggctcggggttgctttctagtatgctttcttctttgcctgtgcattctaccacaaagtccgctaggacctggcctttgattgctgttcggggttggaaggtgatttcgtactgacccagctctaccgcccacttgagtaaccgtccagaggcgtctggcttttgcaatatttggcgtaatggttggtcaatgtacacccgaacaggatgagcttgaaaagagggccttaactttctcgttgctagaattaggcaataagcgagtttctctatcaatgggtatcggcctttggcctcaatgggtcttttaatgatgtaatagaccgggtgttgtatgttgttttcctctctaatcagcacggcactcacagtgctctgtgacagccaagtattttctaagttcttctccgtccagaggttttgagagtacgagaggttttgcaagttgcgtttttagctcttgaaaagctttttcacattcctccgtccactcaaattatttgtttccttgtaggatgttgaagaatgggacacccttgtctgttgatttttgaaacaaatctgctgagtgcggcgatccgaccaatcaaactttgcactt

SEQ ID NO: 293802 - DNA, 718 bp, Cannabis indica
tattggtctctagttgttgtgtggtttgagtgcttcttaaacctttcatcacacgtgtactaagtattatttaaatcaaattgtttcaaaaaaaaaagtatctacaactatgcttgtacatgtatcatgtttaaattttgaaagcttcccatatatttctccaacaatgtgccacacgtttcttatatgaacattagggtaactatattttgacacctcattccatgaatagttcaaaactactcatcaagacccattatttaagacttataaaattataacttaactatttctcaatgcttcatatacaaactatttatttcttcaattcctcatgccacacatgcatatatttatgcaaaatattttatcactaaatttgtagcatccaccatagttatctctaatagtcaaagtagtaaccaaaaattaaaattatatccgacttaatctatagtccaactataatatcaacataattcctatagcttgaaagataccatagtcaataacatattttatgaaatcactatttccacatcgagatattaagactaatataaaaaaaaaaataatacctgaatattttggttattacaatctaccctccttacaggaatttcgtcctcgaaatttacttactagagaataaccctggatactgattctgcatgtccttctccaactcccatgttgcttctctatcagaactatcact

SEQ ID NO: 293803 - DNA, 863 bp, Cannabis indica
acaatatatcaaatattataaagatattttcatcatttacaaaaagatagttagaagtctaaatcaaggtttaagacaaaaaagaattacgataatcatccataaaagaattcacttagttaaaaaatttaatacataaattggaaaacatctataaaacaaaagttaagaaatgactaaataaacataagaataaaaacaatataaaaaaaaaaagacaaaatatacatttatatatagatattaattatagggtatactttgttccttattaaaaaaacaaattatatattattgtaagaaaataagttaaacattacatttagctgtaatagcttatttattatttggtattattaaatatttgttggcatttcaccaaaagtaatactaaaatacaatttagcaatgaactcacattataaccaaattagaatatgcacttttgaagaaaaaataaaattgaatatgataaaaaaaaacaacaaatttaattgaaatgtaatgagaaaatacaacaacacaaagggtataaaggtattttttttttttttttttggtcttgtgtataaatataagtacaacaataattgattcattcattacttacaatggaaaatacattacattacactcaaaaaaaaattgtattgtaataaaggaatatatttatatgaatatttattttctctctctcttttgctaatattgctatatttatactcaaaagattaaagaagagtatagttttggttactggtgacctgattctttgtacaagcaattaactcactcaagtaaccaaattaagaataatacaattaaagtcacacccaaataaaaatttcaaaaaaaaattaaaa

SEQ ID NO: 293804 - DNA, 1214 bp, Cannabis indica
cccccgtggacgcggtagaggccgcggtcgtgtcccgagaggtggacaggagaatctacctcaggccccggttgattgggaataaaggtttgctgagatgcaaactagaattgagcaacaagaagaagagatccgacgactcaggcaacgggatgctcctgttgagcttccctcgcaaccgcctactgcggttcctgcagcccctgcggtgccagctgagcaacatgttgctggtaaccgtatggagcctttatatgagagattcagaaagcaagcacctccagtatttctgggaggtcctgatgttcttaaggctgaacagtggttgactgttatcgaaagaatattgaattttatgggagtggtcggaaatgacagagtggcatatgccacgtttcaatttcaagaggatgcccttatttggtgggagatggtatccctcaccagggatgtgacaagaatgacctgggaagagttccgggaattattcaatgccaaataatataatgaggcggtccgcagtgcaaagcggaaggaatttgttgagttggtacaaggcgagggaatgtcagtgactgaatatacaaccaagtttgatcgcttggccaaactagcctctacaattgtaccgacagattttagtaaaaaggaaaagtatttggctggactgaatgctaagattagtgttaaatgctaaaatactacatattttatagtgtaaaaatacaaaataaaattaattctttataatattttcatgaaattaatacaatatatttttatattgaaaataatttattaaagattaattttatctttgtttataaataataattagtatttatggcataatagagaaaaagaaataaaaagttaagaaaatgcattgttttatttaaagaaatacaaattaattagattttaaataatattttcattaaaattattatgatatatttcatgttgaaaatattttgtttggatttaatgttgtttgtgtttgattgaaaaaaaacattattaaaagaaagaaaagaaaaaaaaaaaaatagaacaaaaataaaggaccaaagctataaaattggtaattttgtaagcccaaaagagagcacaaaaggcaaaagccctatgccctctctctccctgccgcatcagcgccacgtggcgatcgcccattggctcggcaaagcaacaggagcagcagctccatttgg

SEQ ID NO: 293805 - DNA, 529 bp, Cannabis indica
catagacaatctcaatgttatcagtcataaattctaacgtccccgcttcaagcttccattgggtctagagatggaaattggtcggttaatgtacggggaatgcaatccccgcccccatccccgctacctatttatacccccatccccgccccatccccgtctaataaccaacggattcggggtaggggaatacccatcggttatggggaacccatcgggtatccattaaggtaaaatgaaaaaacaaattaatttaaaataattgaaaaaaataagttaaactaatattctcacaaatatttattatgcattcataattcatagaagataaaaaataaacctacttaaaaaaagcataacctaatagaaaataaaaactaaatatgtgtcaaagtttgaaaaaaaaaacaaaaaaaattatatatatctatatcggggtcggatatggtgcggatagtattatccccgcccccgccccatccccgcttcgggtattgaaattgtcccccaccaccgccccattaaccac

SEQ ID NO: 293806 - DNA, 781 bp, Cannabis indica
agtctgtgtatttatgatagtatttattacagagaatgttcttggtgaatttttcctcttctagttcttatggaacccagaattctcgacccctgccttaatgagtttggggggtatttatagtgtttttgtggggtgatccctagaattgaggtacatgtctttctgcaattatcagtaaagccacacattcccaatgaatatatcataggaaatgcatggtctaatccctaggctttgtaggggttttatggatgtagtcctttatcctttttgactgatgtgagtcctcataaagtagccgtcactaggctcattaatcatagcatagtagctgcagagagggggttgtgtcgtcagactttaagatatatggcagtttcaatacgcctcctcccatgcggcattaaatgcgagatgactgttcagataggatctgacacctcccggagaagctttgtcgtagccttgctctccaggagcatgtgagacttacatgccttctccgggaggcatgcctaaagcttatccccttggttaaagagacaacaattatggttattagaggcagaccactccgctggtaataatcctattttccgccgctaaagagtaataccggcgggtccgccggtaataatccgctggtaatacctggtcgctaataactattattagtggcggactgacacacccgccgctaactaatagtgtcagatcattaaactcacactattattagcggatctatccgccggtaatacttttaaatataaatatt

SEQ ID NO: 293807 - DNA, 1521 bp, Cannabis indica
acgaactttgctatcgtagggccaataacgtcactaggaataatgtgttcgtgattggagagacccaaatcttatcaaataacgtggaaaaaaaatatttgtcacgaaaatcttataataaacacttgaaatcatacctaaacaacgtagtttttcttttattgccgctgcctcttgtcgttgccgcccctttttgtaataggaattgtgtgtgtgagtgagagagagagatcacaaatgtggtgctgctaagagaaatagtgcgagagagacaaaatgggaaagttggtcttgtattctacaaccaacaacctcgtcctaccaaggaaaagagcgattattttttttttttgacaatgaactttcattgaaaatactcaaaagtttatacatagaaaaaagatgaaaaatcatctatccaaactagtttatcatccaccctgagtgcacgaactgttaattcatgtgtacaataaacatgaatcagagatgcctcaagaaaactggatagcaaactagcaaaataaatctagaaaagatcctactttaaaacaaagaagaaggatctcctagaaaataatcaactagacttgaaagatttattaggtagcccaatgcaagagatcaatccagtgcaaccactaaaactacataagtttaacttctgttaacctgtgaaccttcctacaaaaccaaagaaaaaaaaaactaataattataacatattataacaataaaaataataataataatataataataataataatgtaatacaataaaaataaaaaataaaaaaaagatagaaacttatctccaactcgaaaacttgaagagagatcttgttcaaactagttaaatttttgtctaactccaaataataaaatcttacataaaaaactaacataacataataatatcaccgtacaaaataacacaacaatatataaaaaatactagtaatgttaagacaaataaaataacttaataataataataataataaaaaaaaaaaaagataaaacttaacgacataaatgaaaaattgtaaaagtgtaataaaaaaacgaaaactaaaaaaatctaataactaaaaaaagataacaatattttaaaataataaatcaaaaagaaataaaaaatgttacctaaaataatatatttaccttaataactaacaatacttatctcataaaattctaccaacatataaaattattccaaaaaaatgtaaatataaatatcaatcatatatagtgtgatcctatttctccaagtgtgatcttatataaccttacattaaaatcttaggcaagaagaagtagcaaaaaaaatagatgagacaacaaatagatgagttcgataaagccaatctaaataattattatatataaccatacaataacttaaatactattaattcaaaaattgtgtatttttaaaaaaattgaaaaaactaaagcaatactaataataacaataactgctcaaaaatcaaataaccgttaacaattttaaact

SEQ ID NO: 293808 - DNA, 669 bp, Cannabis indica
aaattggtatttttgaaaaaataagatgggaaaatgacaaaatgacaaaattgtaaagtgggtcccaatccaattcctgtggccggccacttcacaagatattgccactttattttttccattattttaatgctaattaaatctaacctaaccctaggttgtttcctataaatcagtagtgatggctttagggaaaagatgatacatctcattccttcagataaaattcaaagccttcttcctaaccctagccgaaacctcttcctctctcttcctctcttctaaaccgagcatgtagtgaaagagtgagtgcccacacacatcaagtagtactcaatcataatgtgtaaggctgtgaagaattcagattcaagagaaggagattcggactcagatcttggtgatactctgctacagaaatgatacaagggttagagatctgagtggaaggagacattatattccgctgcaaccactgtaaggtttcctatactttatatgtgtttatttcatatcattttagaagttcatatttaggatgttaaataacatatttgttagtaaatctaagatcctggtaaaataattccaacacttcaatgtatttattcttaaaacactaagctctttgtaaatgatatttggaaaaactaatataattataaaatg

SEQ ID NO: 293809 - DNA, 563 bp, Cannabis indica
cttacatatctctctaacaaactactgtaaatttttttacactgcttcattcaaatttacaaaaataaacccaataattaaaccaaaaaattaaacaatctttacgattaacccattcatcacccatacaggcaaacacaacaaaagcctctctctctcaatttcacatactgaaacagaatgcaatcatcagttgttaattctcattgcttttggtaaaatttacaccttcaatacttctttgttacttttgttgtgctattttgagtgaaggtggctttataatgaacagataaaattttaatacttctttgttactttataatcaagactttgagaactgagggttccttctttgtctaatttacacacgctttgcttattcttaattttataatatttgtttttccaggtcaaagatgttcttgctgctattattttaagaactagaacaaatgcaacatatattataaccttattattattgtttccaatatgtttttactggacataaaaatttaatttaaatttattatttaaatctctctaaattaaatattatt

SEQ ID NO: 293810 - DNA, 263 bp, Cannabis indica
gttataacctcatcaagaaacaacaacaatgttgaaaatattaaatattttgaacactttgaaaagtagacattacgttgaaaatatttaaagaaaggaatcttgtcagaattgagaaagattggttgaaaaaggaagagagacaaataaagtagttcaatgaccaaggaaaacgttagagaaggggttgaataaggagtcatttataattactgttatcatatataaaaaacaaatcatctttacttttatttgagtaggta

SEQ ID NO: 293811 - DNA, 711 bp, Cannabis indica
tgaagtttcagcaaggaatccaaaggaaaaaatcaaactaaggtaagtttcaatgaaacccttcttagtttcaagcttttaagttaggttcaaatggtgattttgaaattgatgggctgttaggtttagttaggtttagggttcgaattttagggtccttttaagttgattttaactccttgcagctggttttaattggtgttgatggttttatgcaattttgagctttgagttcaaagctttgagctttaatggcataaattgatttggtgtgtttttctgtgaaatactggctgggttttattgtatatgcattgtttaggagctctggaaagtttggtaacatttggtggaaaattgagcaatggaggaggtgttttgggaatactggtgcaaaccggctagccggtttgcaatgccacaaaaaccggctagccggttttggcaggattcccgaacacttcgttttctcaatttttgtccatttcagtgcctcggttgggtgtttccccatttccagagttagaataacccctttagagtatagcagaacctagggttttggttttgggtttcccgggattagggttttaatcatgtgacttacccggtttcaaaatgtgattagggcatccatctagcacgagatttccgttcaggtcggccagcacacttgaattcggaaaacaggtaagaactgtgtataacgtg

SEQ ID NO: 293812 - DNA, 656 bp, Cannabis indica
agctatcaaagtaccataggaatggctccttatgagctgctctatggcagaaaatgtcgttccccaattcattgggacgaaactggagaacggaaatacttaggccctgagttggtccagaaaacaaatgaagcaatagacaagattaaagctcgaatgcttgcttctcaaagcaggcagaaaagttatgcagatcccaagcgacgggatgttacattccaacctggtgatcatgtctttctacgagtatccccaatgaaagggatcagacgctttggaaagaaaggcaagttgagccctaggtttattggaccttttgaaattctggagaaagttggacaagttgcttaccggttagccttacctccttcattgtcagcagtgcataatgtatttcatgtttccatgctgagaaagtacgtgtctgatccaatgcacgttttgagttatgaagcattggaattgcaacctgacctatcatatgatgaacaaccagtgcaaattttagataggaaggaaaaggtccttcgaaccaaaacatatcgttggttaaagtactctggaggaatagtaaagtggaagaagccacttgggagttggagactgattgaaaactcagcatccagagttgttcaggtagatttcgggggcgaaat

SEQ ID NO: 293813 - DNA, 543 bp, Cannabis indica
gttgtatgttgtcctcttctctgattagcacggcacttacagcatgttccgtgacagctaagtatattccaagttcttatctgtccagaggttttgcaagttgtgcttttagctcttggaaagctttttcacattcctccgtccactcgaactgcttatttcctcgcaggatattgaagaatgggacacacttatctgttgattttagaacaaacctgctgagtgcggcgatccgaccagtcaaactttgcttttccttggttttagttggcgacttcatatccaggagggcttgaatcttctctgtattggcttcaattcctcgggcattgacgatgaaacccagattctttcccgagctgaggtctataaaatcagtctttggggcatgctttgttgaggtctgtaaaatcaatacaaactcaccatttcttgttcggattgggcaccaatacgggatttgcaaccgaagctgggtagaaagcttcaattataaaattattgttgcgcagcttttctacttcttccttcagggctaatgct

SEQ ID NO: 293814 - DNA, 591 bp, Cannabis indica
ctcaaagtaattgttatgccaacatgagaaagttgaccacgagtgagaagatgcttatgaaatgcttgccagagaataaatctgtgcttggatggattctatctacaccatatagctctagaggagttgtcttgatcacaaactagcaagctactatagagtttagaagctctaaactaacttttcccccagctgccttcacttgctgcaagctaatgttaatttttatggtactaaattaggtacgcaacaggaagagttttgtattatctgattatcatcgtaccatttctcaatgaatctccagatgtgtgtacattaaatcaaaataataaaataatatgtttagagagtatacctcttgaagcctatcatggtatcctcaaaacttctcgtatgctgtatcccttaatctttctgcccttcccgttgggaagcttgcggtaaacgccctttggtggtctctcttccaaataatgaggaaattgtaattggactcacaccagtgtcttctaaatcgatccaccacacacaaggaatagtttgaactattatgataaagtgtataacctttgttcttgttgagttctc

SEQ ID NO: 293815 - DNA, 668 bp, Cannabis indica
gaggctgagttatatccaggttgcaaaaaatcagccctcaatgcactggtaaagcttatgcactgcaaggttttgaataggtggagcaaccactctttcgatatgttgctgtccatcttgattgatctatttccagaggggacaaaattaccgaagtcgcattatgagtcgaagatgcgattgcgcaatctaggtttgggttacgactcaatagatgtgtgcaagtataattgtgcaagtatgagtcatgtgttgttacaacgtttactaccggcaggtatccgtaagttcttgaaaaaagaaatccgggacacaatcattgagctgtgtgtgtatttcaaacaattatgctcaagaacacttcatgtttcggatttagaaaaaatgcaaacaaatattctaactattttgtgcaagttagaaacaatttttccaccggccttcttcgacataatggttcacgtagttatgcatctccctaaagaagctatactaggtggaccagtgcagtacaggtggatgtatcccattgagcgctcaatgtctgtgtacaagcaatatgtcaggaatcgtgcccgtccggaaggctctattgctgaatcttttgtggttaatgaggcattaaccttttgctcaatgtactttcgggaagtggaaactcgattcaa

SEQ ID NO: 293816 - DNA, 636 bp, Cannabis indica
ttttcaaaaattcactactcatgcaattcaaccccaattcataccaaaacttccagacctgctatttagaccctaaggaacataaccaaagcaagaaaaccaagcttcatgcacaaaatcgaaaaccaccattaaagctccaagctttgagttcaaaactcaaacttggttaaaccccactaacatgcatccaaacctggtttaaactactcaatcaagcatataataactgcagaaaacatccataaaccataacaaccattgcagcaaccaaaatcaccattttactttgaaaatcatagttttgagccaaaattccacactagcttaaaatcaactaagcatgcatcaaaatcagttccatttcactcaattaaacattttaaatcataggaaaacaacaataaacaataacaacagccacaaccacaattcaacaagcatgcattaactcatttttttcttaaacttcaagaaaccaaggaaaaacttgaacaaggattacctccactagaattactctaagattgatggaaattacttgaattgcaaagaaaatcacagccctagcagctcccaagcaaggccgaaagagagagagagaactcttgagagaaaatgaaaaattgcttcttt

SEQ ID NO: 293817 - DNA, 790 bp, Cannabis indica
gtctatgttgaggaagtatactccagatccgtcacatgttattgagtatgaggctatccctcttcaggaagatgtgacttatgaagagcaacctgtcaaaatcttggcaagagagctaaaagtgttaaggaacagagagattccagtagtcaaggtcttatggaggaaccacagagaagacgaggctacttgggagatagagtccgagatgtatatgaagtatcctcatttgtttaattttcaacttgaggttgtactttaaaatttcgggacgaaatttctttaaggaggggagaatgtaaagactcggtttgaccgagtcaaatgtatatatatataaaatattaattaaataataatatatatatatgtatgtaaaaaaaaaaatatattattttgaatatactgaacccttcgtccccctctctcattctatctatctttctctctttctctctctttaaaatacaaaaataaaacccataaacctccataaccaccacactccggcgacccacctccggccaccgcccgacccaacgcgccggacaaatcgaaagcccaagtgccggcgacctcaccccccaagcggcgccgctcctctcgccgccgttgactcgggatcgcaagtcaaagtttgggatttcaaactttgaacggattttccggtcacctccggcgtccgtttgacgaatcgtcttcaccactaaactcaactcgtcaaggacaacaacctacactaaaccatttttcccagttcacaacttttttcggtgacatttttgtagct

SEQ ID NO: 293818 - DNA, 918 bp, Cannabis indica
atgtcctcctctcggattttcaactgatgatagcccgatcagagatcaacttggagaacaccgtcttcccctgaagttgatcgaaaagatcatcgatcctaggtaatggatatttattcttaattgttagcttgtttaactcccgatagtcgatgcacattctcatagacccatccttcttcttgacgaataataccggagctccccagggtgacacactaggctggataaaccctatgtcaagtaacccttgaagatgaatttttaattccttaagctcagctggagccattctataaggagccttggaaaccggttccactccaagtgccaaatcaataacaaaatcaatttcccgctgaggtggtaaacccagaagttcttcgagaaaaacatctagaaattcccgaaccaccttgatatcctctggccgaatagtgtctggccgagtggtgtccaccaccacggccagaaaccctagaaaaccgtaacacaataattctctagctgacagggccgaaatcaccgggatccgagatccctgaaccgaaccgacaaaaacaaacggttcctcaccttctggttggaagattaccatcttcctcttacagtcaatactggctgagtatttagataggaaatccatcccaagtatgatatcaaaatctgctaagctcatctctattaggtcagcacttaactccctatcgtcaattctgatcggcatagacctaatccaccttttggagataactaactctccgccaggtaatagggttccaaaccctgattcatatctatcatgcggtctatccaatttactaaagattctggctgccacataagaatgtgtggccctagaatcaaacaatacagataaaaagagttgttaaccgagagatgacctgtcaccactga

SEQ ID NO: 293819 - DNA, 797 bp, Cannabis indica
aataaggatgctgtggctactccctaattatataaaattatattttcactttgacattaggtattgggctctacctaaaagtaatttcgttattaacatagtagacaatcactgagattaatgctcctagtgtggtcgtccgaagatcattaaaaaccgttctagatatgagcatttgtcccaaattcatgttttcttatgtcaaaccacaaaattacttacattttattcatattttattcattttaggaagttttatgaatattttatgaagttttatgaaacttaatgtgctatataaaatattcaacctatcttaatgtttgaatatttctaaatatatctagcactataaaaggaatttatgtatagcatttaaatcatacaaatctaaattaattgcattaaacataaatttgccaaataaatacaaattaatacaattattgtatgataataaattaaatgcttaattccataatatataattaattatgcatttatgaccatataatatcttaaatatttatactaataattaatttgtataaataaggtaaatatacaaattagtacaattaattatatggaatgaattaaatgcaaaattaaagactatacttaatggcagatttttcaaattttattaatttaaacaataaattacataaatttggtaataaataattaaatgcacaattatacaaattgcataacagttggtatcagagcagtttttatctctgccttgattttagttttgagttttcatatatatatatactcgtatatacagt

SEQ ID NO: 293820 - DNA, 596 bp, Cannabis indica
tgagaacactaataataaaaatcaaagttcacataacaaaaaaataaaaatacaaacaagcagtgaaaaacattgaacactaaacataaaacttacgctgtgacctgctcgggtaaaccatcaacagcaacaatagggaacggttccatagtgctaaacttagcttcgttgcgaaggcctttgaagtctaacatagagaagtaatatggtaaaataacagaaaaaggcttgcaagcctctttggcagctgtcatataccttccagaacgcaatgaattgtacagatatatccgccgctcagctatgtttagacgaccacaaatccaatgatcctgtaattttacattgataggcataacaacatgatcaaccaaatgccaaggagtggcacataatatcttaccaccttgaatgtactgggccacattgtgagaaagagacaacaccgatatatcgttgtttttctcaacaaacttctcatacaaacttgttatgctagaacaaaagaggcaatcagttgtggtgactttgattttcggctcggctgagtacattattttcttacgaagataatagaaaataatgtcaatgtgctg

SEQ ID NO: 293821 - DNA, 186 bp, Cannabis indica
gaaactcaaataatattaaaataattttattaagacattaaattaattaactatttaatgctatataattaaaattaatttttgaacaaaaaaacctagttacaaataccaaaagtcatatataaattttacatgtttcttagaagctctaagacttgacctccaagccactaccaaaactaaaat

SEQ ID NO: 293822 - DNA, 629 bp, Cannabis indica
aaaggaaagtccagctcgaaaagtgcaactttcctaagagagaaaagagacaactaaaaccgaaaacacaaggtaagaattcgggtatgtatgcaaaagaatcttactataaaagaaaaaatattttgtcaactaacttgctaaaaaagaactttacaatataaataaaaaaaatatatatataatttacaatatgcaattatgcatatttattaaaaaaaaattaggatcgtgcataaaaaatataacaaaaagttgtataaagaaaataaattattaatctaatatataattaaatttagaagattgtcgatagttattattattattattattattaaaaatgcctaaaaacaattacattttttcggctattaccgaaattaatgtaaagatttctttttttttttactaaaatgtgaagttttcacaaattaataaaaataaaataaaatataaaaaatactatctatattgtatgatgtttttactcgagttaaaaaataatatctaaattgatcatatccataatattaatgtaattacataaaaaataaataatatatatctacattatataatgagaaaaaattagtagaaaaatttcttctaaaaatacaactaccacc

SEQ ID NO: 293823 - DNA, 472 bp, Cannabis indica
attgtaaattatttttaatttcttataattttacaagatgtcttaaataactataacgtatattgtcatataaaaaaataagacaaatttttttctagatgtcgaaagaatagagggtgtatcagtgcatcatagaagctcccattaatttatatattactactacttgttcaaaacactatatatatatatatatatggaacacttcttaatgggtaatacccattgatgggaactaaaaaaaattaataaggtaataatccaataacctttttatggaaagtttctaaaaattattttttaaaaaaaaaatatatatttattttttataaaattagaaataataattacaactaataatttgaaaaaaaaaattataaattatttttaaaaaattaattaaaatgtactactttattattttatgaaattatgagtttattaataatttattattgtaaaactaaaaatc

SEQ ID NO: 293824 - DNA, 405 bp, Cannabis indica
acaattaatttcacaatctatgatatttttcttttttaatattagaaataataactagtattagaaataactatctagaaaatatctcaatttaactaaatatttttcaaaaatttgaaaaagaaactaatttaagttgttatagaaagaatctaaaatatccaacttaaatatttttcaagtaaaatttaattaaatatcaaaattaagttgtaattaatcacctaattttagaatattccattttaagtttaacaacttaaaaaatatctctagaattttcaataagcaactcctagaattccttaacttaattttaaattcaaaagatattcaaatttaagttgatatgaaaaaaaaaaaacttaagttagaaataactaacttacagcttaaataggaata

SEQ ID NO: 293825 - DNA, 710 bp, Cannabis indica
atttaaagaatatttttttacatttttacagttttctaaaaaataacacgaatacaacataaaatcaacaagaaaacaacataaaagtaacatgaaaataacaacaaaaaaacaacaaaaaattaacaaaaaatgaacaaaatttcaacataaaaataccgtattttatgtaaataaaatcaaaaaaatacgtaaaaatgtttaaaattccgtaaaaccgtatttttgttatttttttaattattttattgcatttgtgaaatcaacccttttattttatgtcactcatttttatattttgtgtcaagtgtattgatttgttttttaactcatatttaatgaatcatttctaatccgacccgtactaagttatgtcgtgtttgtgttgaccattgttagccgttttattattattaaagctagaattgtagaaaaaaaataataaatttaagttttattagaaaatttatatacatttatgaatatataatttgttatatatataataaatattaaaattaaatttaaaattttttaacttaatttgttattattattaattttttattttatttttttaaaaaaaaatcgtgtcaaatttgtgttaagtgagtctatcatatttgacccatttttatttcgtgtcgagtcgttttcgacccgcgtctaatttccccgaccctaacccgtaaaattcgtgtcgtgttcat

SEQ ID NO: 293826 - DNA, 564 bp, Cannabis indica
agaaatgaattatttcatcttacatatgaaacttttatcatcacttgcaagtaaaatattctttatatatgaaacaaatattactttcactgaccttttggtatataattaattccataagggtcaagatgcaaaatggccctaaatctaacaattaagttaataaatgtccctttttataaaaaattaacaaaatgtccattctgttaaaagtttgatgatgaaattacaattataaccttgaataattaagtgtttggtatagttattttgcacaatagtatatcgtttttatgtgcaatagtatattaaaaaaaactgaaaggtagtatattagtttaagattgtggtatattattttaatgtgctatggtatataatgaacgaaagacgaaaattaaaaaatgtggaatattagtttaagtttgaggtatagttatatttcactaggaaatattgtctttatgttcattagtatatcatgaaggaaagaaaaagaaaaaaaaaacgtggaatattaaattagtgaaatattaaattaagtttttaggtatatatatatat

SEQ ID NO: 293827 - DNA, 667 bp, Cannabis indica
tttcgcgacatcgtcaaaaatcaagaaaaaaaaaatgtagaaaacaagcgctgttgtgaattaaagacatttagagatgtttcatgatttcgcgatgtttcgcgacatttagcgatgtttcgcgacatcgtcaaaaaccagaaaaaaaaaatgcagaaaacaagcgaatgggtttcgccggaagtggtgcggtggtcgtgggttgtcgggtgcttctcgtggatggtccggtggggttttgttgggaatgggtttggagagttagagaaagagagagaaaaacgagagagttagagggagagtgggggtttgaaatgaggagggtattgttgggattaaagatgtttggagggtattatttttacatttttttaagaagcatataaaaataatttatgctttttttaagtatataatgtcaaatttcccaatagaaataactacaatggtcccacactctaattttaaccagtagttatcaatttgtatacattaagggcttgtttggaacgccgtattaaattgtattgtattgtattgtattatattgaattggattatatattatatttttatataatactatgttaaactttaatttacactaaaatattatatatttaggtgtccataaaagttaataccacatatagttttacataaaaat

SEQ ID NO: 293828 - DNA, 728 bp, Cannabis indica
accaacacatccagagatgagtagtcagcaccaaccagttgctcaccgacctcaagaaccagccagttcatgtagtgagccatcacctcctcgcccttcttggcctcaggcagcacgggcacaggtggagttggtgcctgcacccgctcagggatcctcctgaccagttcggacccagatgttggtggcccagactccttagacttggcagatttgggagtggaaggattcgcagcagtcagctcctcggaaaggtcaataacctctccagaaggtctcttctctgaagacccctctccgcccttagacttcttggccggaggggaggcgctagaacttccgcccatcctcttcctcagagcgtcaatcatctgccgagacatgtctgcacagaacaaaaacagcgtggttagcaaaaaccagcagaaaatacaaaacatgaaagtcaagaagctgaaaaagaagtaaaacgcagagtgactgcccgcccagaaagtcagaagtccatcatcacctgatatctcagacataacagccttcccttttccagcatagggatgagaaggccgaacaggtgaaatgggctcccttatgcgaatggcatgttcaacaggcctgggcgtggccgggagtttcttcttcctcttcaaagagtcacctgctcagcctcagcctcagcctcagcttcatcttcaggattcatagctcctgagcatactgcttttccc

SEQ ID NO: 293829 - DNA, 565 bp, Cannabis indica
aactgggaaccagccccggctcctcactcctcacccagacctggactcaggacccaaacctggacccgaactctgacccaaacattgaaccaaactcgggacacaaaacttgggtcgggacctagaaccgcaccccaatctcggtcccgaaaccaatcttggacttgggaaccaagacctgaactagaacaagatcgggacacgtgacagggatgcagatctgggactcagaccaggactcgaacccaggccaggacccaaacctggaccctgacctagacctgtgacccaaaattggaacctgaacaagaaccgccagacgacgatcctcaaaaaagactaagaccatgacaaggacctagacccagacctagaaccgaactcggacctagtccctggacctagaccgggatcgaaactcgggacctagatccagaccgagaccctgaccctaaccgagacctggacatacattcggacctaacctgaacctagacccaaactgggatctagacttggacccagagctgaacccaaactcagaccaggacacagaccccaaaca

SEQ ID NO: 293830 - DNA, 605 bp, Cannabis indica
tgtaaattgtaaatatttacacagagtatttaaaatttgtattacttttttttatatatatattttaaattatttttacgtacaaaaataacgtataaacaacataatacaatataaatataaagtaacttgaaagtaatataaaataatattattgtaaaaatgtaatatccagtttattattattattattattattattattattattattattgttattattgttgttgttgttgttgttgttgttgttgttgttgttgttgttgttgttgtgcgtgtgtgattagaaaaaaatgatatatatatatattaaatagtgagataaataaatagtgaagcattagattagttagttagtttaaaatttaaaatttaaatttaaatcagcataattttatctgattagttagatatttatttttaaatttaaacctattatacgatatgttatatacgtatatactctagaaccctagcagccagatagtatcgtattcctttattctcaccatctctcaatttcttttttttattctctctattgaaccaaatcaattgttttaatcttaagagcttcggggttagcaatcaaccgatcatcg

SEQ ID NO: 293831 - DNA, 511 bp, Cannabis indica
ggaaccatccataatatgttggggttcagtttcatccggagtttaagtcaagaccaagaaagccttcagcattgttcttagggcttatagcagcctcatgtggggagtttagagagtttggtgaccaacaacaacattttgtaattagagaattcataataataattataatggtgatcccatgatatactaaaatgggaatgggaatgggaaaccagtagtactagaactagatcctgctatttatagtctgtgcaatggggtacattagtataatatactattactattattacatacaacaaaggttgtagtttttggttaggttgtctgtgtatagttattgggtatattaatgtggtgtagtagaagaattggggctgatccaggtgttttttgaacgggtttcagcttgggaaaaagttcaatttcacaaacacatacatcacttgttactattttactcttgtgggaaaattggaaaagtgtatgaattatgttttgtgtgagg

SEQ ID NO: 293832 - DNA, 701 bp, Cannabis indica
attgcatttgtgtacacaagaactccaacaatgttgttaccggtgtttgcctagctactacattttgttgagttaagtgtttcagttgtatttgagttgtttcacgattgcattgtagttcatccatcattatcagcactagttcagcaaaagtgcaatctcttgatattaattctctacttatttcgtaatcaacatagtacttattgtcatctcaatgaccattgttttgtatcaaaatttgcagaggttccatacatgaaactagcgtatcaatttttcaatattgttaaacaactattttaatacacgagaacaacatataaacaactgttccataacagtgatcaatatatgaccttaaatgtatcactattttttcaaatgtgaattatttgcaccaatttatttagatcaactaatttttggtatgaatttgctttgatctgcttcaaaaacactaaataacaacctattatgaagaaaaatatttaaagtattggtaccttatatatatatattatattttttttttttcagattcttccaagttgttcttgggtaaggtctgaatctcctctgggttgttatcaaattctctgcataatagaattcgaattattattttggtttgttattgtgtgatttcaaattaatagaggttgtaattctttttttttttttttttttacgtttttttc

SEQ ID NO: 293833 - DNA, 527 bp, Cannabis indica
aatgagttttatttggggcataaaacccaacactatggattaaggtacgcttctactctttggcttcttctctttgaatcaacaaaggtattctttagatctatgattatacacttataattatatgtaatatgtttatctataaaattgaatattgttattgcatattttatgagtgataaagaaactaacaagtggtatcagagccacctctaattgattctttgaggatttaaggtttgtgttttaaaaatttgggggtttctaaaaatttgaaaaattaagttttgtccttccatttatgatttggggttataattttgtgattatttatttggtatttatcttccaaaattgttatagttaattgatatgaatctattaaccattcaatttcttgggaaagagaactagttatatgcatgcgatgagatctgttatttgttttttctttctagaattaattttatgaagtgatgagatagtgtttgtttgaatcttattgattcattatgtctaataaggtt

SEQ ID NO: 293834 - DNA, 613 bp, Cannabis indica
cccctaaccgcttgaaagaggccccctccggacgtctgtcaaccagaaaaccctaaaaggatttctgggacaaaggtcgggtgcaaagaactcacagaagacaacatcgcgcgtaaaagaaaaagaaagggcagagaatcgagaaaaacaaagtcttctctatgccctagaaggccagtacacaaagagtgtatggtcctttgtaaaaataacaacgaatacgtgacaagagtaaccctaacaccagaaatggtgaatctagacctgttacgtgaaaaacccaaaagaatacattcccagaaacttcaaataccaaacccagaaaaacaacaaacagataagtaaagcatgccatgtacacaaacagtaaagcaagagatgcgagaaacttacaatgaagtgttgaaactgggggttatgttgtcgatcaaacaaaggaaaggtagattgacagtggcgaatgaaggttaactgggaaatttgtaaagtgttcgagggtgttctcttggtctgaggattttttctctggaaaactcgagcaaagttggcaagaaataggaagtaatcgaaatgaaggaaaggtggtggcttttataggcaaaaatgcatgagg

SEQ ID NO: 293835 - DNA, 560 bp, Cannabis indica
ttacctggtttgtcttcaggtttgtacgttacacgtataagtacaatagaaactcatgttattgtgaacgagaagttcacaaaccagaaaaatttatttgttatttggcatgaccggttaggccatcccggttcaattatgatgcgtagaataatagagaactcacatggtcatccattgaagaaccaaaagattcttttatccagtgagttctcatgtgctgcttgttctcaaggaaagttcaccggtaaaggttggaattgaatcccctggatttcttgaacgaattcagggcgacatatgtgggcctatttgcccaccatgtcgaccattcagatattttatggtattgatagatgcatcaactagatggtcacatgtttgcttattatctactcgtaatgtagcatttgcaagattactttctcaaataatctgattaggaggacaattcccagactatgcaatcaagacaatccgccttgataatgctggtgaatttacatcacaggcttttaatgattattgtatgtcaatagggataaatgttgaacatcctg

SEQ ID NO: 293836 - DNA, 511 bp, Cannabis indica
aaattaaatgcacaattttattagttattattgagaattatttattaagaagtttaaaatttattatatgtagtattttaaagggaaatttgattttccatcctcacattaaggggaaattttttccttaaacctaaaataccctatattggtaaaataggacactatttaattaattcccacattacccctcattcaaatctgactcaacacaagcatcggacccagcccagccccatcggacccagccccatcggacacagcccccccatcggacccagcccagccccatcggacccagcacaccaccattggacccagcacagcccccatcggacccgggttttcgtcttccccaaccattcacgcctgaatcggactgcgcatgggttttcgttttggtcggttttcgtggtggtcatggcgtcgagcggtgcggtcgttgcggcagtcgagcggtgcggtggaggaggtggatcggcgtgggttttgtgcggtggaggaggtggct

SEQ ID NO: 293837 - DNA, 743 bp, Cannabis indica
tgctttagcaaatgggcgacttctgaaatcaatggagtagaagggatggtgtcgaatatgggggactggaaatcaaaatggttttacgtcttcaaagtccctgggattagaactgactttaatcgcagacctagtacgtcgcgccttttctaacttaggcattttctgcattactttgagtttttatgctaattcactctttcttgttctcgcagatagaccagctcgaccgacacttgacgcaactcgcagagaaacagctgaaatcctcgggagccttccggtacaagatcgcgactggcgattactgtgtacgactgccaagctgcgagaacaccagctgattccagagaacgcaagtcttcagagagagccagtatacaaagaaccgtctgagagacaacaagagcggatagacaaacgcctctccaagcaaacttctcgaccagtctcaggtaatttatctcatgttataatctggtgccttgaaatttatttatatttatcttttatttatcctcgcagagatgacttttttgaagtccgcgcccgtccttaaaatcaagccaaagagtggaacagcgacgacatcgcccgttattgcccagaagaggaagagcgatgttgtggctactcttgccgcagattcttccaagaagctggctaagaccacgcaggacaaggggaagaaagtcatgatcgagccaaccgtccgagcccgcgacttcctggctatgcaggag

SEQ ID NO: 293838 - DNA, 926 bp, Cannabis indica
gtaaaaaattaaacttaaatattaatttacaattgtgagttaagcttaagtatttatgtcacaaattactctcaatatttctattttttaaatattatttgtttgaccaatatagcaacatcctaatgtacaacaaatggagcaatagagagtgaatattagaattttaattttgtatgggcctatttttaatcaaaaaaatagggataactagtagcaaaagtttctaaaaacttagagttaatagacagattagtcaccaatctaaaaaattgacagtaatagtctccaaagtccccattcgtgaaagtataactagtccgttagttgctatcacatgccacatgttgaaatattcttggtccatctcataatttaaattaaaaattataaaaaaaatttaattaaaaatttcaattttgaaaaataaatatatattttcctgtttttttttttttttacatttttctttgctcttctttcccgattgacctcttctaaatttttaaatcaaaaaaaaaaaaaaaaaagacaaaaaggtggccatataaaaaaaaaaaaaaaaggacaaaacgtgaccatataatttaaattttagaattatcaatttcaaaaaaaaaaaaaagtaaaataaaaagccaaaacgtgaataaatatagtttagatttcacaattatatgtattatattaattaatatttatgaagctaaataaaaaattaaaaaaataagagaattaaggagagagcaaataatacttattagagagattttatagaaagattttagagtgttatgtcaccgcctcatatctctcatttatatagatatatagatatagattttttttaaaaaaaaataattaaaaaaacaataaaaaaaaggcaaaaaggttgaccatataaaaaaaacaaaacgtagaccata

SEQ ID NO: 293839 - DNA, 606 bp, Cannabis indica
gatattctttatctctcctcaattaatattaatactctctctactagctaatactaattataatattacttcgtattgttaattaataatttttattgttagattagtttgagataatgaatcatgatcttattgaaattgttcaaatcaaggtattgaatgtaatcatgactatatatatatatgtatttattacattaatagtagtactcatatatgatcattaattagtttattcatgggaaaaaaaaagctatctcatttatagttattaattgtatataaaggatgattcccaatcacagaacatatacatattatttttttatttatttttaaaagaaattcatttccaatgagaaaattattcaaggaaatgtaagtccagagcggcaaggcctcattccataattagaatgataacgagagagactatgatctctaaagtccaaaaaaaaaatttctaatgtatcaaatatgataatgatgaatataaaaatgaagaaaagtaatcactgtgtaaattaactcagttctaagtaccataagggtttgaaaaattatatatatagtatcgattggggataatatacatatatatatata

SEQ ID NO: 293840 - DNA, 533 bp, Cannabis indica
tattaataaagttaccattttccttcaaaaaaaaattacctcaataatcttatatatttgaacgcaataaaatcttttggatgaattatttgagatcaataaattagaaaccacctctcaacgtcaaaatttaggtgtaataatagcaatagggtttggacttttggtctctttcatttttctttcataaatgtgaatccaattttcatcgtttgtattcccttgaattcattaataataataaaaaaaaatcaaatagataattgtgcaaaaatattgagtttaaattaataaatgaaaagttgtataatgtaacctttaaaagcaggtgcattgaagtatctctattgtttcggtatttgaaagattttttaacctaattatattcgtgaacattataataatttaagatatcttgtaaaattttgaaaaactttgacacactaaaaataagattcaaacagtttgttcaaataaaatttaatattttatacacgtgtgaaaaattaatttgaatactactttttatattg

SEQ ID NO: 293841 - DNA, 706 bp, Cannabis indica
tcgggtttttttcattttttacactttcaaaacagttttttttttttacattttttaaggaattagacatagaaatatatattgcaaccagcgctgcaacttaaattgtaataaaaaatcgtacataaacccctactgcaactagtgctggaaccactttagaaactcaaaccgtaaatttgaaaaaaaaaagttaaaaaatagtatatggggtaattccccttcagtatatactattttgctcatagtgtatgtggttttgtttggtcggtttatgctacagttataaaaatttaaatgcaacctgtccaattagaaaaaataaaaataataattagtaccaataaaattaatagatttggttaggttaacttgtccaaactcaccacgaatttgttttaattaattttttttttatgttttacattcaattattttttaattaattgtaataatgagataaatatatatagatttaattcaaaatttaaattaattaccgtaaaagaaatatattagtttgaactttaaattttttaaatagccatataattatatgatacataaatatataataaatacatatataaaccttcttaatagggttggaagatagatttgttgggttagtaatatttttaatctgcccaatataaagatgcggcatgttatattttcgtcagattttttattgtgtatcttggtt

SEQ ID NO: 293842 - DNA, 709 bp, Cannabis indica
aaaatgtgtgtgccatagagtactgtggtgtattgagtatagtctagagttcaaaatgaactacatatttcaatagtttaatccacccctaagtgatatagagatcatgtggagttatgaatataatccagagttcaatagatataaaagatcgttgaactgcatattattcttaactttttccacccctatcagatcaaaagatctttttattaaacaaattcttaataattgtttgagaattaacaattattcataaacatagaattgaaattctaagtgtttatgtggcattcattctttgcagagtttaatataccatagaatttgtatcaataataaaatacaaacacatacaaacattataaacatataaatataattggtactggcatacacaagataaagtaaatgaagcttaattcataaatgcaattcatttccaaaagagaaaactttattataatagtcttcaaaataaaacgaattgtctgcaataatatgaaaaaacagggaataaaaaatcccaaaaccaataattgaaaatccaaattgttctaaaattaaaaaaaaaataaattcaaaaaaaaaataaataaaagaattacgaagcttcatcttcaatcttggacgtatctccacccactttagtccaaccatccgactcaactcgctaggatagcaatccaagttcaagcagctagagctg

SEQ ID NO: 293843 - DNA, 502 bp, Cannabis indica
ccttggttctgatccttgtctgggttcgagtttgggtccgggtctgggtctagctttgggtctgattccaggtgtgggtttgagtttgggtccgagtctttgtctgggtttgtgtcaaggtctggaccctgatctgggtctaggttcgggtccaggtcaaagttggggtccctagtgcgggtccaagttttggtctgggtcaggatctcggtctagatctaggtcaagcatttcgatcccagtctcggtcttggtccgagtgcaggttcgtttccggatccctatataggtccaagtctgtgtttgggatcgtgtcccagatttaggtcaaggtccgatgctcaatcctggtctgggtacacgaccgtgtccgggctcgagttccaatctcagtttgggttcgaggctaggtttgtgttcggttctaggtttgggtctaggtcctggtcacggtcctagtttttttctaaggtcctggttcggcgattcttgttcaggttct

SEQ ID NO: 293844 - DNA, 508 bp, Cannabis indica
ctttgtattatttccttaatgtacaattgtacatgcattaactgagttagtgaagtagttttcctagaaaaaaaaaaaaagaaaaacaaatgagacatagtgagaaagcgtttggaacccagtagccccttaatttatttttatttttattttatgtaaattaattttaaggagtgctaattacaatctcctattacaatctcttagtcaacctccacgtccgaaattacatgtcaaaatattttttttcaaattctttttcatagcggtattcgttatagttacagtatcatctctgtaaatttttgaaaaattccgaataatttacagtactgaaacagagttcctaatattccagtttaccacgtgcgtttaaaaacttacaacgtattttggtcactgtaaattattcgaaatttttctaaaattatagggatgatgttgtaaacataacgaacaccccgtgaaaaaaattagaaaaaatttactggcatgtgttttcaggcat

SEQ ID NO: 293845 - DNA, 795 bp, Cannabis indica
aagtagtgaaaacctgaaaatcaaagaaaataaagtgtaattcaattcaaaaaagaataacaaagaaggaaaacaactataaaaagtgaaccaaaatgtagactaaaaatagcctaacattgagaatggttttgagaggtttctttggctgcttggattgaagtgtgttggttgaagctaaaagttgaatttcttcacttgaacatgtgattttgagttagagattgaatttttgtgttttgaagcttgggttatgttatatttatgttattatactgttttggaaggtttgagcaggtttggtggaggtttgattggtttttggggtgaaaaaccagaaatcaccatggctgccaggaaaaaaaggcaggccgtttttctgggtgtctgaaaaacggccgaccgtttttcccaggaaagggggattttgggtttttctccccaagtccgatctgattcggggtgtctttcgcagtggaattcagggtgttttagagatggttaagctagtttgatctgggggaaagtagggtgtgttcgattgtgaaaatttgagttgattatcagaaatttgattaaggtatttattgagttttggttgtcgtgacataggaccggaatcgcctagcttgttttccactcaagtcggcccgtacgcttgaattcagaactaaggtaagaaaagtggtaagcaccgtatgtggttaaatattaatggctgaaaggttatggccttgattattatcaagactttgattaaatatttgttgagcctaggttatgacctagggttgg

SEQ ID NO: 293846 - DNA, 327 bp, Cannabis indica
tcgagctttattgttagcattctgccaacgctcgaacttctctttaacagctttggttgcattgtcacccggctgttcaggagacggctcagttaagacatggctatacaggatactacaaaataataaatagaaatcaattatggtttaacacaaaatcttattcagaaattattagcacatagcaagtagaaatgacaagagaaaatactaaaacatacaatcctaaacaatttccaaggttttcaacaaactgacatcagtgtcttgttaggcgagagtcaaagctaatcatccattgaatagagttgttagctcatctaaaat

SEQ ID NO: 293847 - DNA, 657 bp, Cannabis indica
acaggtattcaactatgacttcaaacattgctgaatctctaaatgcagcaaacttagcagctagagagctaccaatcacaacactgatggagtcattgagagctttgatacaacaatggacatacacaaacaggaaaaaggcacagaaaacaacaacatttttaacacctacagcagagaagaaattagtcaacaactttgtggactcattgacagaaaatgtaaaaatctcttaaatttttaagttgcattacggtttcttaatagtttattttccgttttatatacataataacaattttataaatttacttaattcgcaggtaaagccaataaacgagaccatgttcgaagtcgtagaactaaccagatcatgggtcatcaacctcaaggagaaaacatgcagttgcaaccgattccaacttgacgagttaccgtgtgctcatgcgcttgctgttataaaagagatgaacttgaatgtttacaactactgttcaggttattacacgacaagaacatggcttgaaacatacagcggctcaacatatccggtacacaatcacacaacatgggatgtaccacaaaacataaaagatctcattgttctgccaccaaaccagaaaataagatctggaagaccaaggaaacgaaggtttt

SEQ ID NO: 293848 - DNA, 561 bp, Cannabis indica
tgtgagtcgacagactcagtaagaaaagaatataacatatcatataacttccgacctgtaactaggtgcccatacacctatttacaaggcttaacagatgagcaagaacgttctaactagctgtgctattgaccatgatatcacccactatcagcactatgatcgcactgcgggaccggcactatgttcgtaccgctatgatagcatcaatagcacccaagagtactattggccatgatatcactcttaaccagtattgtgcccgtactgccgaaccgacacaattattgtgccgctatgatagcgccaattaatactctctggggtgaatatcactcttaaccagtacgatgcatgtactgccgaactgacacaattgttgtgccgctatgatatcacctaaaacatatacaatcatacatacaacatgcatatatctcatatatcacgctatatacaattcttaccttctttccgaattcaagtgtgctggccgacctgaacggaaatgctcgcgctagatggatgccctaatcacattaatgtaacacagatgagtga

SEQ ID NO: 293849 - DNA, 523 bp, Cannabis indica
ataataatttaaggaaaataagctttgtacgtactacattatatatatttattagaataaagtatttatttattttttagttatagtcattttaaaatttttatagcctatccatgataactcaagactatacattttcatctatttaaataaataaaattttgataataaatttataaataaaaatttcattcttccatttaaattgtttttatcaaaaatatttacaaaattaaaaaccataaaaagagagaaaaatttaatcctatcagcatggcgggccaaatattggactactaaaattaaattattattctgtctagtccaatatttctgtgcccctaaaattaatacaaaattattaactcacgtgtctttctctaattcgttggacagcgaagaggatgtgattttcggacagacgatcctcagttagctagctaggttatttgtggacacaaacacacacatatatatatatatatatactagacaaaaacctacgtgcgaggcacgtatacta

SEQ ID NO: 293850 - DNA, 640 bp, Cannabis indica
ctaaggctgggaaggaggtccttcttaaagcagtcattcaagctattcctgcttatgcaatggcttgttttagattgcctgttaaactttgcaaggaaattgagggtgtaatggccagattttggtggggttcttcaggagattctaggaaaattcattggaaaaattggcaatctctctgtcgttccaagtttgtggggggtttggggtttaggtctcttattcactttaatcaagctatgcttgctaagcaagcttggcgtattttcactcagcctgattctttattgagtttaactcttaaggctaggtatttcccaaattcctctattcttgaggctaaacttggtcataacccttctttctcttggaggagtatcctttggggtagagatttgttggtttctggtctggtatggaaagtgggtaatggggagactattgatactttaaaagatcattggatccctacttctaggtataaacagaccctttgtgacctggaccatcagcagtcgaaactttcctattttattgaccctttggggtcttggaatatggatagacttcgatcttgctttgatgattctactatcaatgacatcctaaatgttcctttttctggacttgagggtaaaga

SEQ ID NO: 293851 - DNA, 832 bp, Cannabis indica
gtaaactgtttttttttatgtaaactgtttttgtgtaaactgttttgattatttttgataatatttgtaatataaagttaaacttttgtttaggttgaaaaagctggagatgaaatgttggtagataataaggtaacttttttaaattttaatattgatgtaaattattaggattatttttattatttttgtagtgtaatgtgaaattatatacaggttgaggaagttttagatgttacgaatatagagaataaggtaacttttttttttattgtagtttttatttgtagtttacttgttatatttagaaatcagtaacattttggtttatgatttgttttttattgtagaatgatggtggtagtcagcctacttttgatataatgtgttttattacatcccaacctggtgatgagaaaggggatgatgacaagaaagaagtggttgatgatgatcatgagatgttcaagaacggatctaacaagttaagggaagatgataatgatggcgatgacaaggttatattttgtgttttatttatatattttggtatgtgagttatatatatatttgcatattgattaattttattttttttatttttttattttgttttttgcagggtattggtggtgatggggttggtgccaaggaagttaaaggtggaggtaatgttggtggatctagtggtggagtgagtgctggggagtcagctgtcaaagaaggcaaggaggtagttagtgtaaatgagaaggttgctgatgatgagatgatttatgaagaaaccaaagagtttactggtgcaactgaaaagttgggtgatagtcaaggt

SEQ ID NO: 293852 - DNA, 537 bp, Cannabis indica
taaaaaaaaccctaaaacctaatgttctttttatatgtgtaaaggcccaacaacattaaaaggcccagatattctgggactttttatcccgatttttacataaaaaccgggataaaaagtctcacttaaaaactaaagttacgtttggcaaacgcataaaattagccctttcaacaccgttttttatccgttttccaaacaaggcccttgttccaaaattttttttaaggctccaaatgtaaaagtgggattaaaagtttttatcccactttttatttttttcatgtgtaaaaactgggataaaaagtcctttttgttgtagtgaaggagataacttgggggtagaagagtccattacaccagtggttaacctagacaaaaaggatgagaagcaatcatcatttccctcgacacctgagtcctcagaccccactggaaaattccatgttccatctcgacctaccaaggtgaagttagaaggaagaagaattgccccggagaatatatctcagatggagagattcatcccagtgtgtc

SEQ ID NO: 293853 - DNA, 564 bp, Cannabis indica
catgacgtagtatccacactgtttgtcatcgggttgttgaggacaaataggagtcacccactgggtagatcgatcaggtcgtcgtaccattcggttatacattgtgaacgatctacacaaaaagtaaatttaattagcatatataaatttataaataaagaacacgctaacatattgggatgtttgatatagaacttacgtggatataataaagttcaaatcatccgggatgtcgtcgttgcctgaatccaagtacgccaccgtctgcgtacttggctggatgactacaagcatccagtgaaacatcttcctgctcggacaaataagtgtaaaactgttaacatatacataataataaattttatgaagagttaaaaataccgaaattatttagtttacatctacatatacctattattatatggggcaataagccatttctctgaattagtcatcctagtcattcgagcgactagtgcttggcaacgattactctcatcccctgcatcggtggcaatcgcacccggattcaaaaattcatagactcgattcaacccacccatg

SEQ ID NO: 293854 - DNA, 695 bp, Cannabis indica
attgttcccattctttcattgaatgttaatttttttttttaacttaatttcctccataaagctacaattccgttattatagttacgtagcataattattaagaatgttgccctacacataacgatccaatatatcatcaacaaaccgatgtcattcaaacagaccacatgtcttctataaattacatgaactacatgtaagctaaagatcgttaaaggtcttcttacacatgcgagctagccaatatataggcttagaagcatacaagttaacatactctcaggaatgagctacatgcatatcactataaaagaaacatttactaatccatccaactaatgaaatatgaataaaattttctatcaaaatcactctttctaagaataactcgagaacgaaaatcgcttaatccaattctcatatatatttttctttactcgcttaatcatataccatttatttgtactaaacgaaaccattacatatatgtagggatcacaaccctaacatcatactcatagcacaatcatagcaataacatataaaaattatttcaatcatatcatgtctttaccataacattggcatatcatagccattccttacataacctgggcctagcctggccttacaatatcctgggcctaatctgcccatataataacctgggcctatgtagccctaccattgttata

SEQ ID NO: 293855 - DNA, 780 bp, Cannabis indica
aatcacaacactaataagtgatacgctaaatcacttcccggggacttaaactagaaactaaaagtttccctatcgataaaaagcatggcaataccccaaataacataaaaacgagaaaatctagggttcctgaaaatttcccaaccggcagaccggttgcacaaccggaattccggttctggaaatttcagaaccccatccggaattccggatgcacaaccggaattccggttcctcgcagatttcaaccaaaaattcataacttgctcaaatccaaaccaattcaaacaaaaccttccagacctgctatatagaccctaaggaacatttctaaagcataaaaaccgagcttcatgcaaccaaaccaaaatcaccattaaagcatcaagctttgagttccaaactcaaacttgatcaaacatcactaacatgcattcaaatcagtccaaacctacttaaacatgcataatttaacctctgaaaactacagcaagcatcaacaaaacaacagcagcagatttcaacaatttttctttgaaaaccatagttttgagccaaaatttcatctcttgataaaaccaacaaatcaccaacacaatcatgcttgaatcaacattttaaatcataaataaacctctgaaatcaacatcaaaacacagcagcaatacacaaccaaatcaagcatgcaaacatttcttttcatcaaaaattcaagaaaataaaagaagagaagctagacaagaattacctctactagaatcactctaaacttaagaaaaa

SEQ ID NO: 293856 - DNA, 608 bp, Cannabis indica
ttcagggttttatttgtataattttagaaaatacatggtctactttatcatttaataaaatagagggtccaattggtaacttttgcaaaacacagggtccaaagtggtatttactctcctttatttcttttataactttaataagttattaaaaaatatttttttttatttttatatttagacattacaagattaaataaaattattttaataggtttataaaataatttataaataaattgaataatatctaaaacatcatatgagttatattaacaaaacaaaagctaacctcaaggtatcttaaacaataaaataacataatagagcctaaaatatatatataaaaaaaaagtttcttttaaatattagttgtcattttttcagagacataaaatatatgtttcttacatattaaaataattattttattatttagatatgagtaaattttgaaataaattttttaatggaaaagtaaccaattgatatcttatttacatcaaaagcaactaatttgttgcttttttcaaatctcccaaaaattgaaaatttttccgttttattttttttttattttcggtaattattttgaatttcagtatgta

SEQ ID NO: 293857 - DNA, 391 bp, Cannabis indica
gatgctagaaagacaactaccacgtgagactgtagagaggcgcaatagaatgtttgaaactcgttggcataggacagggttgaggggatagtccaagctgtatgcttggtacactaggccatgtttgcctgagtgacatcgtaagccgcaggaggcgcttttgttgaaaaggaagcttgttggcaggagtgtggaagtggtgcagtaaccgtcaaatccttgttagtcacgacagaggtcgagagttgataactgagatgggtctaattgggatagacatggaatgcttcagttgctacatgtgtgtgtcaagatgggcgcacatggagaccaagagggcagatgccgcaatcgtcagaggacgattgtacttggaagtgttcgcatgcga

SEQ ID NO: 293858 - DNA, 474 bp, Cannabis indica
tgaaaatttgattggaggacccaagaggaaagggagtaaacctcagaattctggaaattgtaataggacgaataatgttgaggcacgaaaactgattgaaggggctcctgcgattttttgctcttccagctgatgcagctggcgccatggcaaaaacaagatcaagaactcaaaggaaacctaattcgaatgctaagatttctaagaagaaggaagtgaagctcggtaaggatgcaattcatgaatcgatggaggatggtttttctgcaattcctcctttggagatgtcggatgaggacgatgacgatccagcactcaaggaaataatgcaatctccgttatctcccagatcttcgctggaagcaattcggaaacaggaggaggtgcaacatgacttatcaattttttgagggcaaatgaccaatgtaaaagtgcgattttgcaaggtaaggctccgactccccctgttttacg

SEQ ID NO: 293859 - DNA, 796 bp, Cannabis indica
gaaccagagtaggtacacagaaccagggtcggaacctagaactgcaccccaatctcgatgctgaacccaaactcaaaaacgggacctcggacctgaactagaacaacaccgagaccatgtgacagtgatccagatctagactcgggatttggtaaacggggcctggaatagaccagtagtcggtatctaggtctgggactaaaactaggaccaaaacccagacgatgaaccaaacccgaacccagacccacacttgggaccaaaaattagaacctaaacaagaatcatggaaccaggaccctataaagagactaggaccgtgaccaggacccggacccagacctagaactgaacacagacctaacctcaaaaccaaaccgagattggaactcgggccaagacacggtcgtgtaccaagacagaaactgagacttgaacctgcacctaaatctgggactcgatccaaaacacagacttggacgtagattgggatcccgatacgaactaggacttggacctagacacagactgggatcgaaatgcttgacctagatctggaccgagatcctgatccagaccaaaaatttgacccgcactcaggacccgaacgtggacctggagccaaacctagacccagatcgaggtccagacctggacacaaacccgcacacagactcagacccgaactcaaacccacacctagtatcagacccagagctagacccggacccggaccgtaaactcgaacccagaccaggatcagacgaaggacttagacccagaactgaatccagac

SEQ ID NO: 293860 - DNA, 596 bp, Cannabis indica
aaaatatgaaagaggatatacttaaaaggaaaaatcagataagaagaagaagaagaagaagacaatagcttcacacttgatcaacggcttcacaagttcacactgagtcgtcggagagagagaagtcgaaattgagatttaggtttagaatttgggatttttttttagggatttaggtttttttaatatttgaaaccgggccgggccgggcccgacccgaaataatatataccgggccgggccagaagcccgagaagagcccgaataattcgggccacagtcggcccgtcgggccgggggcccggcccggcccgcgaaaatagcccagattgacattcctaactaagagtgatgtagggccagtttgacacagctgtgctgtgagaaaaagcagctgtagctgtgctgtgaaaaaaaaaactgctgagtgtttggtaaatataattttaaaataactgtgagttgaaaaaattgtatataagtatttgataagctagatgattgaataactattaaatatacaattaccaaaataagtatgatatttgttatctaatttatttaaataaattcatacatattaatatatttataat

SEQ ID NO: 293861 - DNA, 546 bp, Cannabis indica
ctacgacgccgcaagggtttacatcacaacactcaagcaaagccccgagaccaaaaggctcagggtttgcaaaagtccgaaagaaaaacctctcatcttccgtctagacgacggagagaaagtaaccgatttttttgaaggaatcgagctcgaatggagattcgttctccgagctgattcggatatttaaagacacctagtgttttatgtaattatctcaaaaatatattatgaaaatataaaaagaaaaatgaaagttttttttttttttttgtaaagcaagaaaaaagaaagtttataacatataaatttaattgtaccatatttttaaaaaaaaaaaaaaaacttaaaaaatatgagataaatcctcatagataagaaggaagtgccctaaccgtaaataattatcgagttttgcacataggtcccgtttaggagagttttttagaaagttaaaatcacttttggaaaaagttattagttaatatgtgtttggtaaaatttaaaaaataacttttcaaaaatttaagtgaaatttatagtttt

SEQ ID NO: 293862 - DNA, 515 bp, Cannabis indica
cgggtgatgaccaggctaactatcagtgggacgagagcatattagatttgattcgaggggatgaaagtcaattcttggccagttggaagaacaaggagagaatatatatggccctctacttcgatggagcaaagcattgggtggcactagaggtagatctggatcattggttgttgaacatatttgactccagcctcggatcgatttccccgaacgaattgaagcgtcacctggcaatgtgggaaaaattactaccaaatttgctgctgcaggctggcctattcgagagtcatgacatgatcctcgtgcctcaacttaccgcctcagagagccaggtcagaaatttcacttcaaaagtcatggatcgggccgttgttccacagacaaagacaaggtaacttaattacaattgatttttttgttatttaacttgaatttaatttgcatacttttattcatttactttttattgtctcatacagcggtaactgcgggatgtacgtgatagagcacat

SEQ ID NO: 293863 - DNA, 634 bp, Cannabis indica
taaatcaatatccctattgataggtaaaatacccaattcctaccataatagtacccatttttaatatatataaatataattggattgaactagtttttacttagattttgatattaacatccaataacaaatccaatcaaatctaattagaatctaattttaaacatccaattcaatgtaattgtaatttgattaaattaaattagttggattcaattgaatttaatattgtctatcccacatctataatctataacataaataatacatatagtaacaaacaaattacttctaaatgattgaaattaataaccaagtaaactttaaaaatgaatttgtatctttaatatttaaaaattattattatatataattatattaggtgactattcaatggttatattttattgtaattatcatggttacattttttttgtacctgtaatagtaggttacgaataggtgaaaattctatttttagaattaattaattataattaactatttttttaaataattaaataaatatttaataagactttctttagcaattaaaatttataaataatttatttatttatttataaatcactactataattattttaacagttaagtcatttaattataatat

SEQ ID NO: 293864 - DNA, 738 bp, Cannabis indica
cacagaacgatcagctaattgaagtgttatagaagttggttttaattctcctagaccaagttgcttataaacagaataaggcaataaattcacactagctcctaaatcaagtaaagctttgttaataaaatgatcaccaatgatgcatgaaattgttggacaaccaggatctttatatttcacaaggcttttatattgaattatagaactaacttgttcagttaaaaatgccttttttggaacattagtgtttcttttaacagtgcaaaggtctttcaagaatttggagtaggcaggaatttgtttaatggcatctaagaatgggatgttgatacttacttgtttgaacacttctaagatgtcactatattggttgccttttttgagtggaagtaatctttgtggaaaaggagcttttggaatggaaggaagaatttgatcattatcttttgacaagtcatttgtgttggaactttggctttggtctttttcaacttgaggtgtgtaatcgggtttggcaatttgttttccggacctaagtgttgaaatcgacttggcttcttctttatgacttgggactcctacttcatatggcccttaagaatttgggacgggttggctaggaaatcttcctttttctctctcagttacagcaatggcaagttgaccaattgtgtctcaagtttggcaatggattgagattgatttttgcatgattcgttgggtggattgcatgaa

SEQ ID NO: 293865 - DNA, 604 bp, Cannabis indica
ataacatctaaataacatcaaatcaacaacaaaaaaataacatacatattacaaaaaatcaacaacaaattaacaagagtacaacataaaaagaccatattttaattaatttctgtaaataaaatcaaaaatatcgtaaaaatatttaaaattctgtaaaactgtattttttaaaatttttttatatatttttgtgtatttgtaaaatattctcttttttttttaatataatataattatattctaagggacatgattttgtctcgtgatgtactttcacggaatgtattccgtgatgtgcgatgtgagagttatttgatctgagagttggagtttatctaggggtaattatggttaaaatatagtaacgtaccctgagacctatctaatataccctgagactcatctaatatactcctccgtacatcatgcacaaaatcgtctcccctatattctaattaacgataacttactagataacttactctttgttttttcgtttcaacaacagatcagactcatatattgtactattggtataaataattaatacaacatagggattgttttttttttattatatatatatatataagtaaaaata

SEQ ID NO: 293866 - DNA, 451 bp, Cannabis indica
gaaaccttagaattatttaagagtgtttattttgtattttcacattcttacttgctaaatgtttaataagttctgaatgtgtatgaatttatattgaacaatattgattttcgttattaatgttgtagtttaatttcaaatcttcattgttggtgtaacttagcttgttatttttaatgggacaaatccaaaggattgtcatccgttagacaaacataatagtgttagatctcaatagataaatatttgtaaaagcaacatctagttgtacatccaaagatgacaacttagattagtgtttacaatatgaaacaatgaagagatttataaaataagaatgactttgactctcgcctaaaagggtgatcgttggattcttatttgaatcaaaattatcctttagtttttcgtcttagcttattcatttcgaattttcttagaaagtatatca

SEQ ID NO: 293867 - DNA, 600 bp, Cannabis indica
cttgatccttgagttcaagatgaaagaaacttgctaaaaccaattgaagagttggaggaggttattctcgatccaggaaccccaccaaatgtgtgtacattgggaagagcctggacgagcagctcaaatagcaattaataagctttttgaaagcgaaccaggatcaattctcttggagtcatggggatatgatagggatcgagcctaagattatccgccatcacttaaatgttgatccaaattacccggcaaagagacaaaaaaggaggcccttggattccgagaggcaaggggcactaaaacaggaagttgacaagttgttagtcaacgattttatacgcgaggtattttatccctcatggatagcaaatcctgttctcgtctcgaaacttaatagaatttggaaaacttgtattgacttctccgatctaaataaggaaaaacaatgttttccacttcttaggatcgaccagttattggatgcaactgctgggaaatcttatgttgttgatggatgcatattatggatataaccagataaaaaatgtacgtctcagatcaagaacatcaagcttcgtaaccaacatgggactctatgtt

SEQ ID NO: 293868 - DNA, 1223 bp, Cannabis indica
cattgatgaacatcctcaagctccaagatctgacctgaatcacaacaacaagaaaaagatacaactctatctccacacacaaccgaaataactgtctgaacgatttaattgatgaaaaactttctaacagaaaccgactatttatatatccacaaaataagtccacctggcactaactaatacttaactgaaactcacgtaacagaacgctagtgcagatataacagactaaaaacccagatacgactagacattgaacagaacaaacactgtcacaaaataatgacactaacattctcccccttgacaggttatgttcaatgactaacaaacaaaactaaagaccaccaaaaaaaaaaacagagttaataatccagatataaatgtctttaggaatataaacaaagccactacaaaaacgaaacgaattacaaatatctcccccttcattgaatatgatctgtgggttcctgtgctgtgccagactccccctgggaaggtggtccagtcgacaccaagggtgttgcagagtcagctggaggatctagatcaggttgtgctgaactggtgacaggatcaaaggctgaaggctccccctgcatatgtgcattacttccagacgtgtctgatgatgcaccaaacgaatcacgatgaaactcaggcagagagatgtcaggcagagaatccccaggaaaatggtgcaaaagagtggacttgatagagcgaaccatttgatacatggaggcctcaaaggcaagctgacgcttttgatccttcttatagcgtttggcaaaagattgaaactcagaaaacatttgtacctgccagctggaatccgaaagccctttgaacataggagacttgcctttactcactttggttccagagggagtggttgaagaaggcttcctattgaccaccgagagaaagctcttactgagaaccggattctgaacttgataatcatgtgttgtgagaggagggtgagcatccataagaactcgttgaactaaacttggaaatggtagcttgttacgagtgccagtagtttctgaggcttcaagtacccgttcaaaaatgagcgagggcagatcaatggacacattagtgcctacagcatacaagaacttgccaatctcaagtgtaacagcagacaaatgagaattaggaaacccattatacaaggctacccgatgaagaaccctatagaatggagtcagatg

SEQ ID NO: 293869 - DNA, 996 bp, Cannabis indica
cctgttgtagaccccactctatacagaagtatgataggtggcttactgtatctcacagcaagtcgtcctgatatatcctttagtgtaggtttatgtgccaggtatcaagctaatcctaaacagtctcatctctctgcagtcaaaagaattttcaaatatctagctgggacagttaactatggtctttggtatagttgtgacacgaatacctctttggtaggatatagtgactctgattgggcagggtgtatagatgataggaaaagcacttcagggggttgcttttacattgggaataacctagtctcgtggtatagcaaaaaacagcagtccatctccctttccactgcagaagcagaatatattgcagctggcagctgctgcactcaattgatatggctgaataaaatgcttactgattatggatatcctcaacacacactgaccatcttttgtgacagtacaagcgccataaacatctctaaaaaccctgtgcagcactctcggaccaaacacatcgacatcaggtaccactttatccgagaactagttgagtcaaatatgctgtcaatatctcatgtgcccacaacaaatcaattagcagatttgttcactaaagctttagatactcaaacttttactcatttaagaacatgtattggtctctgtacaatctaaactgttcttagtgtcatctgatcaatcaattttgcctatgagtatgcgtgtatgtcacagttcttcagcaatggttcttctgtccttccccatctactatatactactttgattgttactacacttgaatcttccccagtcaaaaaggctacctcttccagatgcaatgggaagagctctcatacaccttgttctaataagtagtatgctccttctctattagttcttggtactcaaagaggacggctacatctctggaagagagtgaaagccatgtctgggtactaaagcaaaagccagagtgatatataaaaaaaa

SEQ ID NO: 293870 - DNA, 521 bp, Cannabis indica
ttctgttaaaccaagaatgttaaacaagaaaatgccgttagatagacacttttaatatataaagatatatatctagctctaatacataaacttcaaaaattgagggggagtgacggttctgttggggtatatgtgtcataactcctgcttgtgacctaggtatggtcattccgaattcaagaggggtggtgtttgtgtcgttcgtgtgggaacgtaagtccctccctcaaacttgagtgggcagagaccctaactattagacaagcagtttcacaatgcatctctcttggaattcacaacatttatttccaatcagattgtgaaagtttagttcataaacttaggtggcgtttagtaacacttttttaatcagttttctgtttttaaaaatagaaaagtgaaaatatttttcaaaaacatgttctataaaactgtttttacttttcaattttatcattaataatcaaaattttaaaaacaacaaaaatcactttcaatatttttttaaacagctttttttt

SEQ ID NO: 293871 - DNA, 807 bp, Cannabis indica
gacgcgaaatataaaatgctctttataacattatgcgtcggtttgaaagtgacataaaaagggttgtgccatttcaaaactgacacaaaaaacttatactgtcagttcttaaatgatgcataacatgctgcaaatatttttttttcacctattgtgtcggttataaaatgaagcataagtgcaagtaagggaaaaatgcagatttccatccaatttaccctacctccatttttagattttagaatcattttatataatagtaaatacataataactaaaaaaaagttaaaataacgattataaaacttatataaaatttttataagtagtaatcaattctatgatcaataacgataaaactaactataactaattacataataccaaaattgttaatagaaactaaaatataaataatattactaatgtttttgttgtcctattgaaactaagcacataaatcttgaaatggaataatttgtttgttctcaaggcaagggatgattaaagtttcctagcaactgatcaagccaaaaaaaaaaggttgtagagaacactaaaaagacaaaattatgtgagacactttagattgaataagatgagaatgcttgactagtattgtgttaattatggtagtggatgatgatatatactttcaaagtagcatatcatgaatatgatatatactttcaaagtagcatatcatgaatctattaaaatttttatcaattttccatttttattgttaaaaatttttgtaatagtcagtgagacataccaaatgtaacaccctaactagcataggcg

SEQ ID NO: 293872 - DNA, 632 bp, Cannabis indica
aacgtgttaaaaaaaataaagtggtcattcaacacattagaactgaattgatgattgctgatcctatgacaaaagacttgccacctcataaattcaatgatcatgtagagaacatgagatttggtgcccttatgtaatttgtacaaataaagttataattaatgacactcttattttgatattttctcatatttatgcgcatcttaattttacatttaagaaaattttagaggacctgaataaacctaaagtttactgtttattcgcttaagtacattgccacataaagtacatcgttttatagttaatatattataatacatggaaaataatactcgactcataataaagacatatcgctatgattaatatgtttttcatataatgagaaacaatgtgtttgaatattttaatctaaatactgaccaagtgggagatattaacatatatttctaattatggaataaaaataaagaattaattttgtgataaataaatattttatattcattgaatctggacaaattaatttcataatatcctatatagggtcagattttgatatttattacgcgatttgattttctaaattaattgtcaaatattctaacaattaatgtggtgcagatact

SEQ ID NO: 293873 - DNA, 903 bp, Cannabis indica
tcaaaacaacaacaaaaaataacatacaaataacaaaaatttaacaacaaattaacaagagtacaacataaaaatacataaaaggaccgtattttctataaataaaatcataaaaatgtttaaaattccatacaaccgtatttttgtaattgttttgttatttttgtgtatttgtgaaataatccatcaaaaccattttttataaaaataccgttttttttctgtaaataaaatcaaaaaaatcataaaaatgttttaaattccatataaccgtatttttgtaatttttttattatttttgtgtatttgtgaaataatccctcagaaccatttttatacaatttttttttttgttaaggaaagccatttctataatatttatttattttgtaaggaaagtcctttctatactttaaatacaacacataaaaaggcatattttataaatactcaaaaaaaattacaaaaatacaattttgcggaattttaaatattgctatggtttataactttttatttactatatatactgactattgatgtttcatgttatttttgtattgtgatcttgttttttttttcttccttcttgtatgttgttctgatattgatttcctgttctttttcatgttgtatttttgtttttatattgtttttatgaataccgtaaaaattgtaaataaaaataaaaaattgaaaaattgaaaaaaaaaaaaattaatgtaaaaaatgtattaaattaaaaatgtaaaatacatttgtaaaataaatgtatgtacttaactgtaaaaatgttaaaaaattttggggttttttctttttttactacctaatcttttttttttttttttttattttttttgtttatttttactagtaaatctacataacaattcacatagc

SEQ ID NO: 293874 - DNA, 278 bp, Cannabis indica
agcagcccaagagagccaagacccaagctgttgtggtattttcaacacgcaagtatacgtatcgtaaacaagtaatagactcacaaagactgaggtcgatcctataaagattgtagttaagtactttaaaattaaatttttacattctatttggctatatctaaatctaagagaaaattaaatctaaaaaataataaaaacaataaaaacatgaagcaagtaaattaataggtaaattaacgataattaaaagttagagttttcgatttcaattgtat

SEQ ID NO: 293875 - DNA, 779 bp, Cannabis indica
agtaaaccacatacatagtcgacttacccataaagcaatttacccaattgccaaagacattacaaaattcaaaacctacatttaaggataatttacattatttttttaaaaaaaaaataatacgagtgatatacattaaaaatatattatatatttttttagaaagcatttttaatattttttacaaaaaaaaaaaaacttcttcattcaattaatttgaacattaatattatattaccaaatgtcaacaatacatttcaattaatttttaaactaaaatttggaattatcaatattaatagttaatgatttttttaatgagaaattttacacataaaaaaaatctaaatatataatatcataatatttcttatgattatatttattttatagtgatattttacgattgttagtttatttttttatgaaagacttttataaataaatcaaatttcagaagaaaaaaattaatcgtggtgtaataattattaataaacatgtaaatgttaatataaaaaataataatctaagtattaagattttaattaattaatgtgtgaatataaattttaataaatcttaaaattaataataaattcaggaatctttcttttgcaattcaagttgtactcagtgctcatggctattcatgcatattggtgccgagtgctcattttgcctaagaagtaaagctttctatgaaaggccaagctgtacacaggccaggtttgattgcttgtgaatctttatgtcaatctaaagccgcatgaggacttgaa

SEQ ID NO: 293876 - DNA, 587 bp, Cannabis indica
aagacacccgtcgaactatggaatggtcgtacacctagtttacgccaatataggatttggggtgccctactcatgtcttgagaaagaaagaaggcaaactgaatttttcttgtttgtcggaaattctaaagagactaggggtggactattttatagtcacaaggacaacaaagtgtttgtttctacaaatgttaccttccttgaagataactatattaaacacttcaagccgaaaagtaaagtggtattaggagaaatgctttcaggtataacaccttctgatgttccatcctctccaactaaagtagaggataatcccactccctcagttgaaacaacacaagatgttacaactgagagaactaccaccaaagttactgttcagaaggtcaccgctcctcgtcagagtgggagggtttctactaaaccatcttgttatggcttggatggtgaaatcaatatggtcgtcggagacggtattgatgacaacccattaacctatgaacaggaaatggaaagtcccgaacagaaacaatggtcagccggcatggattcagatatggattccatgaaaaaagaacaaagtc

SEQ ID NO: 293877 - DNA, 615 bp, Cannabis indica
agtgtgataaacactataaaaaaaaagtctttggtgctcatttcggatgagaagttttctataaaaaaaaacactttgttagaaaatcctaaggcttgataattcccaaagctatttctatgagagttcccttagtgcttagagatagggagaaataaacttttagacaaatgtgtaataccttgttcaagtcatggtaatccccactaatctacactcgaggttgtgagtgagtgtatatatattcattctcttgctatatatatgtattatattacatgtgttgtaatcttcttcttttacctttcatatatatatatatatgcaactaggtggatcttacgtgccgaaccacgtattgttatttagttttatttaaggttttgatttttttaagattttaataactaaagtcgtatgattagttgaacgatttgttttataaaagtaaatgtgtgtgttggtgtatttggtaagtaaatagttgtgtctataatcttatgatatgtatattgttcttaataataaaaagtacgttaatctcaatatatacatactcatacagtagttatccttaatgtaaagaaatatttatgataagtcataacaatatat

SEQ ID NO: 293878 - DNA, 224 bp, Cannabis indica
agtagtaaactgctcgtaataggatctgacaggttgaattcaacacaaccttttctccaccattactcttccttaatcacaaaaactttgataatgtgaaaactttcagcaactaccttttggttaatcaggaaataacactagtagttaagaaatgttggaacggtgccaaaaattcagtctctctttggtagacttagagacttcagataggttttacactt

SEQ ID NO: 293879 - DNA, 520 bp, Cannabis indica
tagtctaattgtattctctcaatttggactttagaacccaaccccaacccctagtcacgaaccttgacctcaagcccgacttggtgctcaatttcgacacgacccctgaaccctagcctagacctggacctcgaccctagccccgtcccgatactcgtctcaaactcggaccccaaccacaacccgacccttggacttggatcccaacccttggactttgaccccgaccttggacctagacctagaccttggcctccgagccaaaccccgaccctggccaaaacctaaatccccgcttgaaactcagcctagccctaaacccaaagcctagcccaaaccccgacctcaaccctagcccttggcccgatgtcggtgttgtaccccgacccactttctctaacctcaatttctcaattctcacttaaataataattaaaaaaaatctaacaataaaaaaatgaaatttactacacgtgttatgaaacacatttttacttcaaaaacaaacaaacaaaaaaaa

SEQ ID NO: 293880 - DNA, 645 bp, Cannabis indica
tctatagtttcggacagggatccgaaattcacctccaaattttggcaaagtttgcaacgggcaatgggtacgaagctaaaattcagtacagcattccatcctcagacagatggtcagtccgaaaggacaattcagatattggaggatatgttgagagcctgtgttatggactttgagggttcatggagtaaatatctaccgttaatagaattttcttacaacaacagttatcagagtacgatagggatggcaccctatgaactgttgtacggtaggaaatgtagatcccctatccactgggatgagacaggggagaggaaatacctaggtccagagtcagttcagcggaccaatgaggcaatagagaagataaaagctagaatgcttgcctcacagagcagacagaagagttacgcagatccgaaacgtagagatgttgagttccgagtaggggaccatgtgtttttacgagtatctccgatgaaggggattaaacgtttcgggaaaagaaggcaagttatgccctagatttactaggacctttcgtagattctcgagaagataggtcaagtggcgatatcggttagcattgcctccagccttatcagcagtgcacaacgtattccatgtctcgatgttgagaaa

SEQ ID NO: 293881 - DNA, 638 bp, Cannabis indica
attttgaccactgaaactcaacatacaaacaacgtcaaagcaacatgctcaaaaaataacgaaattaaacaacatgtttacaactttaaaacaacgataaaacaacgaataatgttattactaaatataagtaatttttcttcatatttataatctcttcctatcaatttttcacttaattcaaaatcaacataattcgtgttctcttattattttccatgtcttaatataagagataatataagtttttattttaacatgtaaaactctatttttttacttgttgaacagttagtgtaatgtataacaatgcataacaactttagaacaacataaaaacaacttaattttatataatattttaaagttgaaataagatgttgcaaacaactttaattgatttatatgttatggttaagttgttttctagttgtttttgtgttgttgtttagttgttttgcgctgagaaaagaagccctacacgtaaaatccactttgtccgaattcgccacgtggcaaccactgctgcgttctgacgctacagtttgtgagcgtcaggcaactctgaaggctttgtccctcactcgcgtgtgagtctcactcgcccacatagccacatgtgtgtcacacttctcctt

SEQ ID NO: 293882 - DNA, 702 bp, Cannabis indica
attttttttattgcttttgaatctttttcgaatgaaaattgtgagtcaattatgggattactttgaatgtatccatgtttgcgaaaccaaaacttgaatttaaaaatgtttttgataggatagcttcgtatttggttgatcactaagatgcacatgttagcaggtttgtcaaatttcattcaattttactatttcaaagattatttatgtactaaatcatgctcccaaactttgatatctaccaaatcatgcccctcgaactttgacatgtactaaattatgccctctgaatttttatccaggttagacttttttactaaaattggaaaaaagtccttaaatccaacaatctcaatagttcatggggtatttttaacgaccttaaaagttcagggggcatgatttagtatatgtcaaagttcaggggcaaaaatcctaattagcctttgaattttaattttaatagatttaaacctataagatttactacaaacctacatttttcacatttgataatgaagagaggtgaaactaaagatacatattttcaatgttatccaatcttttgataaattttgaataatttattatactaaaaattaaatataggcgcatctgtgtctttattatgtttgtataggtatgatattattttttataaataattacctatattgtatattcatttaaaatattttataa

SEQ ID NO: 293883 - DNA, 720 bp, Cannabis indica
tacaaacataccaaaagtggctccctataatagtaaatagataagaagatctctaaatgtagagaattctctacttttttgttaaattattttaatttaattaaaagcataattagtttttcattattttcttaaattagtttatatttaacaaatttaaattataaaatattattcaaaataattaaagactaactaaagaaaaaatagctctctcttctaattttttaactattttaataaaatttggctaaaaaatggaatataattaaagatgctgtaatatataaaaaagaggagacatgatctgattatacgatataatatggcgctacagactggaatttcggattcggataagagatttgagtcccacaacttattaaagaaagaaaaaaaatcatttgtataaacgatctctgcacggatgatgttgactatttatatacaactaattttttttcttttttctagcgaccttaccacttttattttgctgaaaataattgtattttgttattttttattcattttaagccagctccaatagaacttgtttttaagtggagttaagtagcatcatcttataactagtaaattaggctgcgtttatagcgtgggactatttataaaaattttaaaatatatgtataaatattacttgaacaataaattatataattaaaaaagtatatatttatttaaaaaaataaataaatt

SEQ ID NO: 293884 - DNA, 877 bp, Cannabis indica
gtgaaccaatcatgggcattctcttcgagcgtagccgcgagaatgcgacacttcgcgagttgcggcacctggtccacttccattatggtgttaaatttctctaggtagtctaacgggttagatgtacctttatacttgagggattcagataaacggaatccctttggaagttgggcctgtcgcacttctgcggtaaacggcgaggtgccgtgcagcttgtatacgggcttacgctgctgttcgagcattttcaaagcttgcagaagcatactttgatcgattcctcctgtcgcaggaggtggagtcgctacaacagtggggctcgcagccactgcggcaaggtttgaagggatgttaatccctgtggtcgcgatcggcgcgataggcgggttggcaactgcgttgacaccctgatcgcccatatggggatcatggagtgtctccgtgttgcgcgggccgcgggagcgcgccctaaagactgcattgagatgatcacgcagatcacctcggtgtacacggtagcgtcctccctgctgtgtttgcacagagccagacctcgtatatctgcttggagtgcggttatgcgaggatgaagaggctgattctgcgtcgttatctcgaagatgacgactgcgagggttgcggcgctcgggatcctcgtcggttcgcgtgctctggttaggcaaccttgcatattggtctctcgacgtcgggtgattcaaatccaagatttcaggatcagttcttcgctccctgcgtacacggttagtttgacgtcgagaaactgttacctgagggttttcattatgaacggcagggacccgaggagggtgtcgagcgcgactctgtccgtctacctcggcttgtagtgctcgca

SEQ ID NO: 293885 - DNA, 593 bp, Cannabis indica
gggcaactccgtcatgaacttataactaaagtttacatacggtagttctaacttatctatcatctttaaagcaataaatgagtgcgtagctccagaatcaaataaaacagtacatagttttccagagatagaaatctgacctgcaaccacagtgttactagtctcagcctcccctctggttagtgcaaatactcgagctgggacaagtttgtcatccttgagttgatcacccttttgtggacagtccttcttatagtggcctggttgcccacacttgtaacaagtcttgcctttcagtcgacattctcccggatgcttacgaccacatgttgggcatagggggtactccacatatggcttcttccctttgtagttattggaccctatcttgtttctcttgtcggcttcgttgtgttggttacttggcagtttccttttgttatcaccacctccattaccgcctcggtagggatatggtagtttcccctgtctaacaccctaactatcttaggcgaaaccattttacaaaagtctcgggatcccgatttataaaatatttacaaaagttttaactgactaacttttacatcaaa

SEQ ID NO: 293886 - DNA, 608 bp, Cannabis indica
aaattaatcttatttaattaattcaatagtcaatcttgctttgaaaatatattttaagtcttaaatcaaaaactattcctttagttaatatgtgaattttgaaaaagaaaaaaaaaattgtaacaaaatatttatttcacttaacatgaagaataatttttttccaaaatttaattttaagtaaaatttacccaagaattaaacacaaagcttaaaaaacattcataattttataaactaaaattaaactcaatcaagagtattatcataaggaaaaaaggatattaccaaagattattttttaagatgaatacatacatataaaagaaagtaaataaatatattttgggtttttttactagaaaaacaataataaacatataatttttttttatttttataaaaaaaaaatatatatatatatatataatataactacttagcatctaaataataatttttaagtgaaaatacttacctttcaagcaaatgaaggaaatatccatagggacccaccaccaacttaattatgcattgtctcaatgtatcaaaatataaattataaattgaaaagtaaagaagttgagagtttagaatggtcatacctc

SEQ ID NO: 293887 - DNA, 812 bp, Cannabis indica
atttatcgttttagaaatttcatatttagggtgtttaaacaacatacttgtgagtagatctaagatccttgtaaaataaattccaatagttagaacaagaggttccaggggaactagggtcgaggcagtcgccagggtagttttgagacccgatacacttacccagagtgccccagttgtaaaaggcaccatctgggggagtgtagaggacattggtgctttcagtgtgtcatgccagggcattacaagagggattgccctcaactgagaaccgaggcaccaaaggctccagcgaaacccactccagcaaggctgttctctattacttaggctaatgcagaagccagtccttcagtggtgagaggtcaggtctcggtcaacaatttttccttctctgtattgtttgactctggggccacacattcttatgtggaagccaaaatctttagtaaattggatagaccactcgatagttacgaatcaaggtttggaaccctattacctggcggagagttagttacctccaaaaggtggattaggtctatgtcgatcagaattgacgatagggagttaagtgctgacccaatagaaatgagctttgcagattttgatatcatactgggaatggatttcctatccatatattcagccagtattgactgtaagaggaagatggtaatcttccaaccagaaggtgaggaaccgtttgttttgtcggttcggttcagggatctcgaatcccggtgatttcggccttacccgccaaagaattattgtgtgatgaatgtctagggtttttggccgtggtatgg

SEQ ID NO: 293888 - DNA, 557 bp, Cannabis indica
gttctccagtaatggacctgatgtcgagtaagctgtctctctctctctcacacctagatctggatttcaaaatttctcttttggtctaagatttttctcttgtggattttaattagtttttctttttttttttgtgggatatttggatgtgagatttgaacccatgaccttagacattatgccatctacctcaaccaactaagctattaatatttgttgcttataatacacttaaattttacttaaataaagcctaattaattttttttttatttttttattttaggccccggaaagtgtgggccctaggcacgggcctagcctgcctatgcctagggccggccctgaggtgcggtagttgtggttattttggatctgaaaaagaagttgaggtactggtggtgtcgggcaattgtggtttcggttgaggtggatggtggtggtggtaatatttttgatgaagaatgagagtaaaaaaaatctggtggaacaaaaaatatgaaatgaaatgaaagaaagatggtggaagaaaaaaaaaattaattattttaattttt

SEQ ID NO: 293889 - DNA, 648 bp, Cannabis indica
aaccacatatgaccagtttgagaagaattcatacaaggagtcttttcaatgtatgttgtataataatgttgaacaaggtatgtagctacatacactgattgtaactcaatctcgtcatcggtgtctgccattatttttaatttaaaataaacctgtaaatattaaaaaaaaatatatgaaaaagatatcaaatagccatagagttttcatagcaaatacaagtaaacaaaataataaagcatatttattttaaatagtgataacaccaagtcttgagagcaaatacaattgaagaaataacataacaaacatatattaaagtcataacacaaagtttagaaaataaatactactattcagcgtgatttaagcattataagtattccagagtatactcattcctgagccaagtaagcatcaactcaggttcttccaatgaaacaaacatctctctcttctctttcatgataaacaagcgagttgcaaataaatacaagctgctccctttttcgatttcaggcaaagaatttaatattttcataacttcggcaatactattctcctttctagctatttcaatatttctacttcttgtctccacggcatcagcaaggcgaccaatttgttcaaatatcattacaggccctg

SEQ ID NO: 293890 - DNA, 564 bp, Cannabis indica
gaaagcaaacctaattagcatcaccaactatgtgatgctaactatgatgtgaacttcaccaagacacaatgcttagtctcatctggagggaaaacagttctcacagggaacagaacggcagatcactgctatgtcttatccaatcaagtgaaatgccacagggtgttcttggataaacctgacttatggcactacagacttgggcatctaaactacagagacctgaagaaaattgtctccatcaaagctgtccgagggattcctgaattcagattgggaagagatcgtgtgtgtggtccctgccaacaaggtaaacaaattaagtcctctcatcctcctataaatgccctacttacttccaaagtactggaattagttcatgttgatctaatgggtccaatgcaaactgcaagcattgcggggaaaagatatgtgatggtgtgtgtggatgacttctcaagatacacttgggtaaacttccttaaagaaaaatcagatacctttggagccttctcctctctttgtctgcagctgcaaaatgaaaagggtgtcaccattggcaag

SEQ ID NO: 293891 - DNA, 806 bp, Cannabis indica
ataaagtggcacttctcccagtttagcaccaagttagacttctcgcacctagttagcactttttccagattttccaaacaatgatcgaaggaggaaccaaaaaccgagaaatcatccataaagatttcaatacaagattcaatcaagtctgaaaagatagccatcatacacctttgaaaagtagcaggggcgttacacaaaccgaatggcattcttctgaaagcaaaggtaccgtagggacatgtgaaagtagtcttctcctgatcttcaggtgctatagctatctggtggtatccagagtagccatcaagaaagcagtaatattcttgccccgccaatctgtctagcatttgatcaatgaagggcaaaggaaagtgatcttttcgtgttgctttgttgagtttcctgtaatcgatgcaaatcctccaaccagtgactgttcttgtaggaatcaactcattcttttcattcttgatcacagtcattccacctttctttggaaccacttgcaccgggctaacccacttactatctgaaatgggataagcaactccagcatccaaccacttgactacttcttttctgacaacttctttcatgggtggattgagtcttcgttgagcgtcgattgttggtttggcattgtcttccatgagaattcggtgcatcaccgttgaaggactgattcctttgacatcacctagtgtccaagcgatggccttgttatgagctcggagtaccctcagtagtctatcagtttccacatcagaaagagaagctgacacaataactggcagctttttatc

SEQ ID NO: 293892 - DNA, 599 bp, Cannabis indica
gttaaaaccttgcatggtgaatttatgcggatccagtggggtatagttcttccagtcaaggaattatcaaactcttgttaactttgggtgagcaacctacatccacaacattgatgcaagattttttagttcttgacttaccgtcggcctacaacatactattgggtcgtcctgcactaactagagttggggtcagttagttcaattaaacacctgtctttaaagttttaaacaccagcaggtgtaggtgtagtgcaaggtgaccaactactggctcagaaaggctatcgctacaaaaataaaaacgtcgaccatcagttaatggtagtcataacaaaggaaagcgagaaacaatgcaaggatctagaaataggacaaggatcctacgagttcaaagatgaaaagaacgtgttaaaaccgatcgaggaattggaagaagttattttagatccaaaaaataccacaaagtagtatattcattggaaaaaatttggatgaaaaaactaaaataacaattaataagttttttgtaaggcaaatcaggatcagttcgcctggagccatttagatatgatagggattgaccctaaagttatttc

SEQ ID NO: 293893 - DNA, 623 bp, Cannabis indica
tgaacatcagagaccagcaaggttgttgcagcccttaaccctacctgaatggaattgggaggacatcaatcaactctcaatcacttccctctctttttttcttttgttttcctttgattttttatttcttttaattttttttttgaaataacaagtaacctccattgttgaaccttaactccccacgattcctcaaccattttttccctctcatttttgttcttcaaaatttttcaactcccactaaaccaatcccataaccgttttccctctttctttttgtttcccaatctttatataaaatggctgtgacccgttcttcctcatctccttcccctgttcaaaaaaaaattccaaaatgggtttgaaatcactagctaataaagctaagggaaaacgtcctattattgaggaggaagactctgattttgctcctccattaacgaagcgtgggagagctcctcctaagaagaaaacaaaggtcggtgtgcaagaaaaaatggctgaagatgtttctgggaaaaatgataatgttggtgctgttgttcgaaacgaggtttgttttctcccattttgaacattttcttgtagttccatttaatcgttttggttttttctggttt

SEQ ID NO: 293894 - DNA, 1137 bp, Cannabis indica
aagtgggtttgggttctcggactttcgttgtggcgagggagagggagtggaggttggggaagacgaagtggaaagagagagagggaatggaggtcaggaacgctggttgggtttgtcggaggtaggtggggggttggggaagccgaagtgggaagagagagaggagaaggaaactgttagagggaaatttttattaaagggtaatttgggtaacttttaaaattataggcattaatttgtacaaattagtttagggtatatattttgatatgaggtatattattaagggcaaatagtgaaatttccctaaatataaagtataccagcaaacaaattgccactgttcacatccaaaaccggccactcgaatccctttccctttcgattgtcctcttcctcacggtgatggtttgaagctctctattccgacgtagctctcaacgaaagcttctcttcttttgcaccatttttttttatcatcaacggtattagaagccctaaacctcattcatcagaggagaggaattcataggctgttggcttcattaccacctgcgcacaattacttcactcaaaggtgcaggttttcatctatttttacagttttttttttttttaatttctttgtgtctttgtttgcctttcatcactcaaggttaactaggttatgaaaacaagcacattgttcttggcaaaaagctgcaatgtgtcccaaccagccattagttcgttgactctgcttttgcatgtgattactatatttctctttgacgcttttttcttctttgatttttcaatatctatttgggataattatatatgtttggcttcaataaattcaagtattatgttattaatttctgcatatgatcaaaaaaatatcttttaggaaaccaacaaggaaagttaaaagttattttcatttgtagccggagaagaatctgcatactaattttactagcataaaagtctaaaatggtcgttgaagtgagaaatggctttgatgatatttaataataattttatttatgttgaataatttagtagtgaagattagtatacttctttcccaaatcacttcatttttaaatagtttaaactctcatattagtgattggattaaatttgtttatataa

SEQ ID NO: 293895 - DNA, 38 bp, Cannabis indica
ttcacgatcttcctcactataattgaggtatcacttgt

SEQ ID NO: 293896 - DNA, 646 bp, Cannabis indica
taatataataacttttagaaagtatcactaactaatcgcaacgtgacatgttaagaatgtgctaagtaccactgatgcctaatagcaatgctcataattaaaatatgttatctcattctactttgttttatttttattttattttttttgacttattttattaatttctcattttgttttactaaataatatttactactatgtatctcattttaattattattagtaaaaactaaataagggcataattataactatttttaaacaaaattagaaggtacgcatgtcacccaaataaaaagagagtgtaaaagagagtgcaaaagaaaatttccctaacactcctctttatttttttagtattttgttataaagtgtcgtttgataacacttttgttttttccaattttttaatcacaaaataaaagtaaaatttttgtttttaaaaaatttatttctgaaaaacaaaaatgcgttctgtaacaatttttgtttttcaattttaaaaacagaaaacaaaagtgtgttctgtaaagttcatttttattttattttttagttttaattaagtcgggtctaagttcgaggtcggattcgggttcggattagaagccgagttcagcgccagggccgtggggaggagatt

SEQ ID NO: 293897 - DNA, 175 bp, Cannabis indica
tgtgtgtgggcactactctatcacttagaggagttcgaaaaatagagaaggtagagagagagagagagagtggcggctttgaacaagtttttgggtgagagaaattctgtcaaagtgttacaaaactgaagcctttaccttctatttatagaagaccacatagggctatggttga

SEQ ID NO: 293898 - DNA, 759 bp, Cannabis indica
ttgaccaacacaaagccaccagcagctgaaattttaccaatgcaccaagacaaaaaaaggtttgcttcctactgcatatcagtccatatcccaaacccgatcccaacaagccttagcagtaggacaggtaacaagagcgtgcaaaatggattcatcttcaacagagcagactggacaactagcttcaacctgtacatgcttggagcatcgttggaaggcagccgctacctgctctccacaccagattcttcattttaagggggagtttaagactccaaaaatgtttccaaaatttattctccacagtctccaccgaatcaacctctccttttagctcctgcattaatctatatgcacttttaacagtgtacacccctaaaagttctctataccaaaccagacaatcacaagttgttaaggtatcaagagtaatttgcaagatcacatcacggtctcttagctcgaaaagatcattcaacacctcttcatcccattccaatctatcaggtttcatcaagtttacaactttagcattcataagtcctgggtgtgaagatataatccttggattaacatcatcgggaagccatgcctcccctaacaccgagataaaactgccattaccaacattccaacgaacaccactagccaccagattttgagcttcaaggatactacgtcaaacatagctcaggttggaccctaaagtggccgaagtaaaagtgtcattgggataatatctggctttgaatacacatg

SEQ ID NO: 293899 - DNA, 629 bp, Cannabis indica
ggtaggcattatgtgttgttttgattatatttgtgattagtattttttttttttatttttgtatatttgtgtgtgtgtatgtttttatttgattgtctgatgaaactggtttcaattaactttattattaacatttgtattttgttatgattttttataacgtcaaaactggtttcacatgtcgaaactggtttcacaggttttaactgttctgtaatggggttgctcaatttttatgatattattatatattttttagtttgtataaaaccagttttattattgtatgatatttgaacaacaatttttattttattttaattaatcagtttctgacacacatattattttattattttcataactggtttttttaagtaactagtttttataacatattttttttattgttgttcataattgagttttattcaattttttattaatttatttcaagaaactggtttttatttgtttgtttttattttggttgttttactaactggtttctcacattccactgtttttttttgttattcttttatggtttttattgcacttttgtctctttaattttctttgtttcttttttttttctctttgattttaatttatgattctctttgtta

SEQ ID NO: 293900 - DNA, 569 bp, Cannabis indica
atataataaataatttattatatttatatttaataaataattacaataataaaataaaatatttaaataatataaaattatttatactaaataataatttaaccactaatttaatacaaatattaattttctaaaataataatataaattttctagtaatttaaaaaaaaaaaatataattttattattataatatttctcttagaaacaatttaagtaattattattttaaattttgaaagtttatgtgtgatattttaaaattttatatttttactaattttaatgaataaattttaataaaaatctataaataagttataatatttttttattaaattcttattaaatttaaatataataacaaaatcaaaaattaaaaaaaaatactcacttgtatgggattattctatctggatgggataaataatagattcatataaataaaattaattagattaattatctagtccaatcttagttaaaattacattatatacccactttactttatttgtttttatttttacctttatttttatattctttaaaatatacttatttttata

SEQ ID NO: 293901 - DNA, 715 bp, Cannabis indica
caatctttatatcaatttttttgacaaaaacctatacatgggcaagcagtacatataccaattaattaactatattatataattatatgtgattattttataatgtaggtcctattttttatattagggttataattcttaattttaaaaattttatttaaattatatatagttgtattatatatgatagatgttatacttttatatttttttgctcgtcaatgatagaaatgcgacgatttggccattaaagtcacatcatttggtttcgaaccttttatttagagagaaacatatatttgataactggaatatcgagtttaggcgagattgtggtatttaaccaatttacccctaagctttaaacttacttaaacctgaagtaagagcaaaattaaaattttgcctaaggttgactttgtattttagtggaaatagtagaactttcctttaaaatatgctgattattatcattaatataaaaccaaaaaaataaaaataaggataagttagaaaaaatcaaaacttttccattgatatctatctctccatttcggccctaagaaaatcaacaagaattggaattcagctagaattgaaggagaattgaaagactagacttgaggtataaaccctaaaaactttttactctttgattttaggtaagaaatgaattagtttgaacatgcaattttttgaatttggttatgtctta

SEQ ID NO: 293902 - DNA, 622 bp, Cannabis indica
acgaagaatgtgtctggttgcaccttattcctccaggtacattgattttgttatctttcatttatgtaaatgtgtttattaagtttataatataatattgtgatttattagtcgaatgtattactaatacattgtttgtttgtcacagttggtgtacttgactcacgtggagtggaactttggatatgtcgaccgaacagtgctccccgttgatttttggggtagtaaacaatgtaagtccgcttacaaatttgtgaaagacaatgggggtcccaacagcgacaaggtacatcgaattttggttataatgtggtaatgtgattttagttgatattaattattttgggattgaaaaattaaatttgtttactttgttatgtttaacagataacgctcacttcgaatcccgtaatactgcccaactactactccgactcggaaggaagaaagagcagtgaccactttgtcagctctatcaacgagttgaaggagtacttctccaatgagttaaagtctcagttgagatcattttctttgaaatttatggacaaaggagaaggtgtaggtggtattgaccgagagttggaggaggatgctgctgcggaagtggggaagaaggcgg

SEQ ID NO: 293903 - DNA, 754 bp, Cannabis indica
tttgaatccaagcttttccaatgtctagtcatcttctctcatggaaaaaacaacactcggacttaagaaaaaaaaaagaaagaaataaatgtatgagaaatatttgggcctaggtggacttttttttttttttacaattttacagattctatttttttatttatttatttttttttttttattagattttcactctttttttcttcagaaaatattgtagctaaacaacgaaaaaataactgtatttttgtaaagaaaaaagattcgtaaaaatgtaaaaaaaaaaaagtcaatccatagaaggtaaaaagtttgtcattcttgtatatttatgaaataatcccataaatagtgacacttgtaagaatttcaaattgttgtcttcctctctcagcccacaaaactgccccggttctttgggcttttttcctttttcccgaagaatctagctcgaacaaatgggcctaataattattttgggggcccatgaaagcccatccaaaataggaaacgaaggaacagacaccgtcctcgtccccaaacccctaaagcaaagccagcagcaaaagcttcgaaaaaaaataataataataataatttttaaaaaattaatctgaaaccctaaaattgatcagaaatctctcgtcctcaacccatgaaatcccatccgacaacgaccttaatccatcattcttgttcatagggcttcatattaagctctgttactttctcactttctcttcctcaacaatgt

SEQ ID NO: 293904 - DNA, 854 bp, Cannabis indica
agactttataagtcctagacttctctagttaatttgtttaatttctataataacaaaatatatttagaaaatttctagaaattcatattgtattctacattttacctcagaaattcttgaaaagtaatgaagtgtgtagtgattttaatagcacttactatctcatatgctgaccaaagactgctatgaacaaataggtagacaacaaggttagagctattgggttgtgctattgcgctatactcatgtcttcgctaggcctcagccacacactataggtgtccatgggctttacctcattttgtcacactacccaaagttgttacataattttaagaaaaaaggtacggcccatcttagatcatctctaatgaaagattatacatcaaaaaaaaaaagtttgtaatatagataagatgttaaaataaaaaaaaacaatcaattatgttgatatcattttatgctttattaagaatatacaaaagttattactttttttcttttattatttaaataatagtaatatggtaaataaagactataaagtttagtaaaagtcaataaactataataatttgtggtattataataaagaaaaatgtagcatttatcaaaaattttagcatgtgctaaattattatagtagttttcttaagtatgctaaataatagtaatatggtaaataaagactataaaatttagtaaaagtgaataaattataataatttgtggtattataataaataaaaatgtagcatttatcaaaaaatttagcatgtgcttaatagtcatacttgttaaaccagtctaagtttgacacgaccaatttatatcatttattaaaaaatttaacc

SEQ ID NO: 293905 - DNA, 563 bp, Cannabis indica
tttggtgattgtccatgtattaaattatgctcctcatactttgatatctaccaaatcatgtctttcaaattttgacatgtaccaaatcatgtctctcaaactttgacatgtaccaaattatgtctcttaaattttgattcatgttagactttttttttactaaaattagacaaaaattcttaaatctaacaatcttaataattcaggaagaatttttaacggtcttaaaaatttaaaagaataatttggtacatatcaaaattcaaaggcaaaaattctaatgactaatcttagacaatcttcgatgtaaatataattaaattttgaaagaaaagaatattatatttattataatatttatttttagagaaaaaaatattcatcaataaataaattagacaaaattacttaacatatctggatcatatcgactaattaggaattttgccccctgaactttgacatataccaaatcattccccctgaacttttgaggtcgttaaaaatgccccttgaattattaagattgttggatttaaggactttttctaattttagtaaaa

SEQ ID NO: 293906 - DNA, 524 bp, Cannabis indica
atttgaatggccatcggatattgctgaatatcgcaaaacgcatcagttcccggaagctttcctagaatttccgtccccggtcttatcgatatcagaattatctttacaaacgatattgcacctgaaaaatcatcacaaacttaattattatatttaatttaattataactctgtcttcaatattattatatatctatacacatgtatagactacgtcttttgtatatgggtgagatgagttaaatccgtgaaatataattataaataatttaattcattatagaaaaatatttattaattttactgtaacactttcatcaatattatgtatgactattaatcccgattctcaaaatatcaaaatttggggatataaagtttgttagagagatatgtgggatatttttttttttttaatttaagtaaaagattgtttaattttttgggtttaattattttatttgttaacggaagatgaacctattaacatcgttaaatttaacataatattcttttatttttaa

SEQ ID NO: 293907 - DNA, 654 bp, Cannabis indica
gttttaagcaataatttcaaaccttccactttaatgtcatatccaaccactgtacatgatatagaccacaagccctaccacaaaccattaaagctactacccactgaaaatttcgtataaaatccccccattaactcattctactcacattcacccaaacaacaccaatattttttgaaaacacaaaaaaccctagaatttatggatctgggacttattgtagtcgggaggaggacttcttcacctcgacgacgaaacaccatttcaaaaaccttctacttctaccaattttctgggtttcgttcgatttcacacgaggatgatgaatctcttcttgggttggctgggtctcgtgtttccctcctgtgtgctttctctaccacgaattttttttttggattttctttcgatttatcacgaaaatggtggtaacttctgggtttactttttctagggttccttcgattgctcaagcatttctgagttttgagtttttttgtttttgattttatagtttataatttagtttttaatttttgtaactgtttatattttgagttttaatgtgtcttttggagattaatgtgtcttttaaggattaaatgtgtctttaaatttaatattgtgttttttttcctttaaatttttttcttt

SEQ ID NO: 293908 - DNA, 206 bp, Cannabis indica
aataatgaagcaaagggtgcaaaaaaacttacaatgaagtgttgagactggggggtcctgctgtgtaatcgaatgaagacaagaaggactaacagtaacaaacaaagaagaactggtagaaaactgcaaagtgtttaaaggttgtttttctgggtctgagtaatttttcctctctgggaaatttgagcaaagttggcaagaaatgg

SEQ ID NO: 293909 - DNA, 542 bp, Cannabis indica
aagattgttgttgtgttatttttctaagattatttgtgtttttcaagttaacaccacatgttgatgtctaataacttttcatattagaatagggttgttatctaattatttgctcgttgttatttagttgtttaactacgtaaaaaaattaaatgaatatatgtttactttttatgggtatataatttttttaagttaatgcactagtatcttgtagtttcttttacttttttcttaaagattatttatcagtaatttttgaatttcttttgagttaatgcaatgcgttgttaattaattaatttacgtattaatatgaagttgttatctagttattttattttttcatatataattgttcaatcaagagaaaaatagtttatgttttagtttttcatggttcatactttttgttgtttgttggtttctttcatattttatacactattagttgatgtacaattgatttttatgttaaaatagaattgttattgtgttgtttattcgttgctattaggttgtttaacaaaaagaaaaatgag

SEQ ID NO: 293910 - DNA, 503 bp, Cannabis indica
acattgggaatgtcgggaatggccgggaatttagaaattcccaaaaatacccctttagtgttatttatgtggttttagtgtggaggggcaaaatggtctttttgccccattagtattttgtcttctagtgtttatttagtggaattatatgttatttgatattaaatgttggctgaaacaagagtaagatgtgcatgttattcattttcactttacaaaaaaattacaagtttaaaaaaatagaaaattggaaaagctctctctctcttttcctctccatttcggcttcattgtgcagcaaggaaaaggagatttttcttgtgaatctagtaattttcagcaagttttgggtgatctttgaagaggtattcctttgtctagtcttcttaccttgttttcttgatttttttttatgaaaaagatgagtaaatgcatgatgatttggagtttgttgctgctgtagttttaggttgttttctatgattttctatgcttgaattgaa

SEQ ID NO: 293911 - DNA, 390 bp, Cannabis indica
attattgttgatttctgaaatgcatttttatgtcatttagtgattttcataattttgcatttccggtgcccggtaacatggaactcggtgtttggctcaataaaatcacaactcagtatgttagtattgtgggacagtttattagacattaggaatgtcaggattggccgggaatttagaatttcccaaaaatacccctttagtgctctttatgttattttagtgtgaaggggaaaaatggtcattttgccccattattattttgtccttttgtggacttaatatttagaaaataagtgtttattatgttaagtgttggctgaatgtagtgttggtatttcatttaccttttattttcaaaagttagaaaaaaatcaagaaaaaccaaaa

SEQ ID NO: 293912 - DNA, 381 bp, Cannabis indica
atgaaaaaaaaatagaaaatttaagtaaaaatagacaaacaaaaatgcgtacctttgatgaggactgagagctaatggtggtggctattgatgaaaattgccgaaatattctgagtgaaatattataattgctccatatgaaaataatcagctacctagctaactcagtaaaagtacttgtaaaactacagcactgttagaagaataataaatttgttgagcctgaaatgaaagagcaaagataagaaaggaaaaacaatttaaaataatagaaattgcattttaatttttcatttttatttcataaatctcacctaatcccgtgtctgacacatgtgcgttggctcaacttttgaaggaaaaaaaataaaaaaaataaaa

SEQ ID NO: 293913 - DNA, 481 bp, Cannabis indica
acgaatttttaaatctgaccataataggaaatatttaaaattgaaaacattccaaaatagaaatatttaaaaattgaaaaaattccaaattgaaaatatttaaaattggaaacatttcaatttagaaatatttaaaaatggaaaaatgaattttgggaaacaatcccataaaaaaattggattttttgggaaaaaaaaaaaacaaaaaaatcgcaattttgggaaagtggctgcatgcagcagcccaggaggctgccaggagcctcaaacgcgcgcgcagcatgggcacccagccgaggaatctcaacggatgcagggtgcttgagcgagaaccctcggcgcacacaggggagacacgggcgaggctcacgggcgctggcagggtgcactcgggcgtgtcacgcgcgcgcgattgagcacccatgcctacccgaaatcccgattttccaaaattcataactttttctaatttttatcggaa

SEQ ID NO: 293914 - DNA, 528 bp, Cannabis indica
atgatggtttcctatttgttgcagttaattgttttttctattttgatttcatcattcttttttatctagctttatattaaaataaagaaactgttttattatttttaatattatgaaagtaatactgatgcattactttttatttttaagttcattatttcagaatacagattactttttaatttctttttaaatgttttatgtttgtttaatttcagagaattgaagtttttgtgtagctttaatggtggagagcttcgatggattttaatggcggtccagtaacttcgactgagttgttcgaagagcttcaatggtggagattcgaacagtgcaaaattctagtttgagattgtttaaatttgtttgatttcagagaattgaagcttttgagtagctttaatggtggatttagttgccaggttcacagacatgattggagagctttgacgatcgagttatgatttcgaagcttcgacgatagagtttggatttggttgatcgaagcttttctttctttctttcttt

SEQ ID NO: 293915 - DNA, 768 bp, Cannabis indica
atcggtcacgcctggctgcttgtgcgtgtggacagtatgcaatgcatactgtccgtacagctcgcaatttttttcgtttttcttcgatttttcatgctatttcatggaattaacttccgattttttgtgtagttttgtattttgatttttacttttcaattttcaaatctaatatcagaaataaattaatttgaattttttaaatttaattttagatattagtgtaatttgaatttgaaaacaagtaaaatgtaaagaccgcttagtttaatttggaaatcaacagttaattatgattaattatgggaaattatttatagatatttaaataattgttattactattattattgaattctgaaatgcattttatgtcatatagtgaatttcataattttgcatttccggtgcccggtaacatggaactcggtgtttggctaagtagaatcacaacttagtatgttagtattgtgggacggttaattagacattgggaatgttgggagtggtcaggaatttagaatttcccaaaaactaccatttagtgccctttatgttattttagtgtggaggggcgaaaatggtcattttgccccaactgatattttgtcctttagtggactttatgtggtgaaattatgtgattttaatcgttatgtgtttgctgaaataataagagattaggtttatttcatcttttattcaaaagtttcaaaactttgaaaaattagaaagaaaagcaaaacaaatttttcctctctctctctc

SEQ ID NO: 293916 - DNA, 641 bp, Cannabis indica
ccagtcaaagtgaaaggcacgatcatttttggccgcattggtgattataatagccaaacttgtggcaatcgcctccttcacttccttgggaggttggcgatgcccttatatgctaacggtgtcaatactctaaaatttttgtgatcaagccagacctatagagaagttcaattgtcactagctctctgaccttcaattgatctttcaagaaagccaaatattgtgcttctctcttgatcatctcttccgtcctaacactctaaacgaagcactgctacaagttgagaaatattagcccaagcacaaaaaattgacaaagtttaaaaataagctaaattccaggtaagttggtaggataccttggagttggaagcttaattgcagagatggcaccctactggtataaaaactagaggaaaagaaccagtattcttagagatcatggggatgatcttcttggaaattggggcagtaagtgtccggacgcttatctagtgagaagaaccccagctttgacctatttgccctcatgggattggccttgacacagtagaaaaaggatctccttcagggaaggaaccttcagtttgttgattttgtagaacacgtagcacccatccaagagtctgtacgatgaagga

SEQ ID NO: 293917 - DNA, 530 bp, Cannabis indica
tcaacattgacaatagggaaaggagcagtaggattcacagatgctggtaaagaataaagaagctcattataaatatccaacagagagaaaaactatggcaacatgacagaataaggttccaaagcaagtaagaaagcagccttgtactttgagatccttagagaattatacaattatatatttctaaatctcatgtcaagcctccccataacctaatgactagcagtttttttgtgcaccaataacaatacatggttagcctgactccaatgtataccacatcgaagacgtttaccctttatgaaatgagcaatttagtgctttggatggacaagggatattttttctttcaaacttacaaaattttcatgcaaagacttgatattaatattaaaataacaatctgtagttgtaatcttcatgtttgttgcagcagattacttagcattccttctcaaatataaaaattgacatccatatgctgaaacattaaaaaaaaaacttaacaaaaacttaactaacaaataaac

SEQ ID NO: 293918 - DNA, 704 bp, Cannabis indica
tcgatggcgcccttcagtgtttttattattttgtctttttcctccgggtccaggttcttccctaaccggagtactttggtggagtcgacgtcgcacactgatacttcttcgacgtcctccattggttccacgattctttcggaccctacacgagggtccaactcatcctcttcagccacttctggctcagcggactcccggaccataagcacgggcaggtgggttgcgacattgtaacattgccttgcttccccctgatttcccctcacagttccgactccggcctcccgggtagggaactttaggcacagatgccggattgaagtgactgcgccaaagtctactagggccggtcggccgaggatcgcgttgtaggctgtcggacagtccaccactacgaaggtgcagtatttgaatgtgctctggggggtgtccgggcacaaggtgactgggagccttacttttcccattgggataagtgtcgtcccgttaaaccctgtgagctgggacccactgggtgagaggtcccgatccgtcaagcctatcgcggtgaaggcttctttgaagagtaagttcacggaactcccattgtcaattaagactctggccaccactttattcgcgatgggggtctcaatgaccaatgggtcgtgatgagggaagcgcaccgtcttggcgtcttcttccgtgaacgtgatgggttg

SEQ ID NO: 293919 - DNA, 212 bp, Cannabis indica
agcaacaacaacctatatgcatctataataaaaattaaacaaataggctcttgaccaagggagtcatgagttaaaatcagatcattggatctgtcttaaatttcgaaattaattaaaaaataatatttaaaattaaacctacaattttgaaaaattaggtttcaactaaccttaaatatctttttcagattttatgatttaatttaaataaa

SEQ ID NO: 293920 - DNA, 549 bp, Cannabis indica
gttttgttttcgcctgatcttttgggctttgttccgttaaaaaagtttttatattttttttgcccttttgtatcatgcttattcttactaaaaattaatgtaaatatatcgtaattttttttttttttacttaaatataacataagttttacattttttattggagaaggtgttatgaagacatgttatgttaactatatttttttaattaaaaaaaactaatttttaacatatatttataaaatggatgattttacaaattaaattttacaaaaattaatcgtgtaggaaagaaaaaaaaatactacattcagttcaaatgttgagtggcctaacattctcaattaaatattagagcattaactatccatataatagtgggagatctgaaatggtttaagatatgagagtcaaaagttttcagttaatgatgcacattgattgagaatgtgaaaattatataaaattgttaatcttcaaagagcactagggagggaggcagccttttgctctgtactaatataaattatgagaattgttaaaaagtat

SEQ ID NO: 293921 - DNA, 628 bp, Cannabis indica
ccacactaaaatcacataaaacacactaaagggtatttttgggaacttctaaattcccggccattcccgacatttccaatgtctaaaaaactgccccaaacttctaacatgctaagttgtgatttctactgagccaaacgacgggttccaaaataccgggcatcggaaatgcaaaatatgaaaactactgaatgacataaccatgcatttctgaattccataaataacagtataataaattatttaaatagctataaataattttcataattaatcataaacactgctaatttccaaattaactaagcggcctttacaatactcttattaaattgtaattaatgtattaatgtgtaactttttgcagaccaagtttgtcctcccacgagataaccctacattcgtagactacggtgagtacgagatgtcaaagggtttacgtgactggagggcagactgcaagaagaagtggatacaaaacattgaggagcttggacaggagagggccgacatgtcacctcctgagggagtaactcaagaggtgtggagtgactgcatcgcttattggagcacagacaaacaaaaggtacattttttaaaatttctaattttggtaatgtttaattta

SEQ ID NO: 293922 - DNA, 576 bp, Cannabis indica
ccgaaaaatttagagaggggggcctcggctatggtgcttgtttggtcaggttttatagtcagggcacaacaaaaaagaaagagagaactcttattctgtttggccaacaatggccgattaggttagtgggttttcctcattattttggtttttagtttcatcattattattattatttttaaatctatatagatagaaggggatgaagatcgtttcaccgggaatgagagcccggcgattctaatattggagcattgccacatggtgatggtgataattatggtttttaaattcttggtcttctctctatatgcgttatcacatgcctgatccaaaagtatctataatcatcagaaatcaaaacattttctaatcagtctagaagaatttttacacgttaccttagataaaaattggtgacagatatcttcttctcagcaccggaggtaaggttcattcggcattcttttatcttgttctctctataataagattagagttaagttctctttagtctttttgtcatttttttcatcaatgaaatcgtgtaggtttgttctgttataatcaatgtca

SEQ ID NO: 293923 - DNA, 1235 bp, Cannabis indica
aatacttaataacaattttattaacgtttaagaaaatgagaactaatattttagaattaatttttttttctttaatctcacgtgttaaatatatattaaattaattaatatatatattttttaaatgaaatatattaaatatataaaattataaatatattttaaaatatataaatataattgataatcattagatgataattggattggtttgattcggttatttattggatcagatgttccatccaacaatcgatccgatccgattagattttcaaaatttatatttgatttgatcccattataattgtatatccgattatattagatctgttaggattgaattggttggttgtaaacttgtaattagattggtcctaagtgacgccttaaaattgatagcatccctaatgataacattttttaatgtgttaaatatttttatatcatccaaagatataatattttattttatttttcttctacattatttttagcactcttacttctaaagatgtatttttttttattaaatcagtatataaatattacagttttaatttttaatttttgttttttttaaaaaatataacatcaatgtcattgtgtgacatgaatacaaattttaagaatattttttcatctctaataatataacatttttatatttcagtacctaaattttctactttattaaactatttttaaaatgttatcattaaacatactttctagccatatactctaaaagttttaactataaaacttacccatatgtactttttttttttgtgaactataaagccttcattcatagaaatcagtacaaaggattaggcaagtcttgcacaagggggaataaccccaatccacatagctctcactttattagtcaaagcgtaattggctaaaatatgtgctactgcattagcctccctatacacaaaagagacacctacaacaaaacgatgtaacatcaattgcctaatacaacatagtatcccatcaacgtcccgacaaccgtcctccttcgaatggattaaatgaacagcttctatccggcgttgtattccagtttgtaagccatgtttaatggccaacaattctacatagagaggagagtacaccttcggcacagtagtagccgaagcaaaaaatgcattggccttccacatcgcgcacaacacagctataactcgagtgacccgtaccttgccgcacaccagcatccacat

SEQ ID NO: 293924 - DNA, 444 bp, Cannabis indica
ttattttgaattattattattttttttaaagttactttgaattatttttatattggtatttattttaaaaaaaaaattgttttttctaaaacttatttttttttgcttttcataatttattgttggtttttttttatgtttacacctagtcttttctttgttttgctttttgcgtagttctggtgttattgactgttttttcagtggtttatatcttgttgttgtttggctgctcttttgagacgctacttataaaaaaaaaaaaacattaattaattcggttagatattatttttttctgccaaaaaaaattgagcttaggaaaagcaagttggtacgggtttaattaaagagcatctaaaaatcattcaagcgatcctacattagaagaattttttgaaaaataaatatctaatataaaaaataatttaaattaattttaaa

SEQ ID NO: 293925 - DNA, 664 bp, Cannabis indica
ttcataacttcaatgtaagatttaccatcaagctcacgagagaatagacccttgatatagtctttaattcccactgttctgtatagagcaggattttgttgattgatcaagctgtgggcagggcctatttcagattctacacttgtattgaggaatgtggcaatagagagcctttcctgcacagagtttactattgctctatgctcaatgctacgatatattccattagttataatctacaaccatcatatgcaaaagacaaattaatgaaacaatattacttgtatttgatgaataataattagtgggttatgagttattacctctagaatgtctcctatattgacaataaaagcatttgggagaggcttgacagggacccacatgccatcttttttgacttggagtccttctacttgactcacttgaaggagaatggtaaggcctacggcatcagagtgaggagtgagacctataacttgctctggttcagggcatggagggtaatagttcattctcatcgattgcattccatcttcaaacaacttggaaatttccttgctttctattcctagagcctttttccatttttggagattatatcttttggctagtttttgccaattctaatgaataaagttccaagctgtccctgcaatattca

SEQ ID NO: 293926 - DNA, 748 bp, Cannabis indica
aaaactagaattagtttatagatatcagttttaattaattacaaatatatattataacttactaaaatattacactaaataacatatatgcgcttctcgcgattttatactagagttaatataattttagaccacatatatcttataaaataaaatataataatattttgagtctgattttagactaacattttcaatcttaattctaaaatttatctttaattttagtttgatttttaatataattttaacactaaaaatagttcgataaatagactcatgatatcatcttattttattttgtgaaacatagtgttaatgataattaatttttgtaacaagaaaacattatattttcaaccatgtttagtttttttttttttttaaattttatattaaaagtaattaatttcaaatataatagactatttttttgtttaatattttttgtaaacatgtataagaatttacaaatttgtatatattacaactatgtaaaaagtatttttgataatgtcaaattacttaaaaatttatgtttatagatataataaaatttctataaaattaatctcaatttcgctataaacaattatagtccaaacttgagacgattatatacagaaataatattataatcataattagttattaaattttaaataccgtttaataaatatataattttttaataattatatgcactaacctactacatctaaccattttcacgcaattaggtgtaatg

SEQ ID NO: 293927 - DNA, 660 bp, Cannabis indica
atatggtggttatggtgttttccgatctagtgtggtggtggtggcgtggttatttatgttctcaattatttatcgacagattctcgataggttatcgacaagatgttaaaaaaaatttgttttttggtttttttttgttggttaatttagagagattatatattgtttgtgttgaaatatattttattttgatgaatttttcttattttatggtcgattttatatggtagttatggtgtttttcgatctagtgtggtggtggtggttatgtatgttctcgatcatttatcgacagattatcgataggttatcgacaagatgttgttaaaaaaattatttttgtttttcttagttagattgattataaattatttgtgttgaaatacatttcattttgatgataatttcttttaatttatgtaagtttgattatcgacatattatcgatggattctcgataggttctcgatagtagtaattagtcttttagttgtcataattgatgagtgtatactgattatcgatgggttctcgataggttctcgataggatttagtggatatagtgttttttgatctaatatggtggtggtggttatgtatgttctcgattatttatcgacagattctcgataggttatcgacaagatgttgttaaaaa

SEQ ID NO: 293928 - DNA, 561 bp, Cannabis indica
attcggttccacttcagttgggccggtttgagagactccaatagatgtacctgcagggttagtttctgtggaacctgcatcaagctcattagtatttttacaaggaaaatcattttcttgaaaaatcacatatctactaatgagagttttgaaacctcctttccctttcacccacaatctatagccctttacaccctcggggtaacccagaaacacacattttagagccctaggctctaacttgcctacactttgatgtgcataagccgcacatccaaaaactttcaaattagacaagtcaggtggtttaccagtccacctttcttcaggagttttaccttcaattgcactagagggacttctgttgattaggtatgttgcagttacactgcttctccccaaaatctatttgcgagcccagcattgaaaagcaccttgctttgttcaatatggttttattcatcatttcagcagcaccattttgttgaggagtttttctcatggtcctatgcctttggattccattgtcttgacagtaacctgtaaactcatcattacaaa

SEQ ID NO: 293929 - DNA, 624 bp, Cannabis indica
tacccaaacaataagtgttctacctgtgaaaaaaaaaattggtttttgttaggtaagggaaaaactaaatctaaaaatctgagatttatttgttggtagcgaagcttttttatttgatttcaaatttcggatttcggatgaactttcagagttcatatttatttgttcttcatagtgctgggtttgcgtttatgggtttatgatttttatgtctaagtttgtatttttgcttggttttaggttttaattttgtctgagtttgttagatttatatgtatgaagaatgattttgtatattagtttctgtctaatttggaatttggaatcaggttaatgaatttgattttgaattaattttactttcattttgttgtgatggaagtttgaattttttgggtttgtgattttttacatttttattacttttaatttaattttaatcattgtatgtttttatttatctatttaaaatacgaattttaatatatattattatttttatttgattttaaaattatttttttattttaattcttaaattcttaaatgaatttttaattaaaatattaattaatgatgtggaccaataagagaatgacagctggacacttacctggcgcttaa

SEQ ID NO: 293930 - DNA, 627 bp, Cannabis indica
ataataatatagttccattaagcatgtagttaaattaatttcatcattttacccttctcgggtcataattactaaaatgcccctggctcaccaacggggtcttaacatgttaaaattcatattaattcacataaattgaactatataataatataattcctcatttattcataattactagttaggattttgctaatccatttcctagttccagggtattacagtctccgtcagcatcgactggctgcccaacctcattgtactccccgaagttagggggtgcaacctcttcctctcccttcgcctcggaaggacttcctggacgcacctcgtccagctcctcaacctcctggacctcagcgtccccctcatggtcctcctccatcgggacggccgaatcctgttcggcgtcaggcagagtggcaagccgagccacttgaggatcagaagcgtcggccagacgcgtggttttcttcgtacgagccatcatcctatggctgggtacgaggtcagaaaagtttccttcgttagaaggaggattagcacgagacgaggatgaacttcgtgcagaagttgaagcaactcctggtcgatctgatgccccagttcccaagactcacctgggtt

SEQ ID NO: 293931 - DNA, 564 bp, Cannabis indica
ggagggttattggatgatggacgaacagaggaggctaggggaggattttcagatgaaccaagtgtgcgttgacgttcttcttgaacgatcatagcaaaggcccgagaaaggtttggtataggttcattgagtagtatttgggcacggactgaagcataggattcgttaagcccagtaagaaattgaagagcttgattttgaattgtaaaaaattaagaaaagccttcatagcaccacaagtgcaagttgcattcggctgaaactctttcagctcatcccatagggatttcaatttggtgaaatatgaggtgacggaatgatcaccttgttgcaaccgagtgagttgcgtttgaagttgaaagattcgaggagcattaccctcattcgaatctttcagctaaatcatgccacatatcagtagctaggtcaaagtacattatactttgggcgatttcagcggagacgaaattcacaagccaagacatgaccatattgttacaacgaagccaagaagggagaagagagttaccagatttaggctttgggagagagccatcaataaaa

SEQ ID NO: 293932 - DNA, 791 bp, Cannabis indica
gtaaaaggtaaaaaaaaaatgaagaaaatgataacagagaacacgtgcttaactagtgaattagagagttcatacaatgagttcaatcaatctacaattttctgcatacggtttatgaaaagaaaaaacaaaatagacacagaaaatatactctaaagttattaagtaaaaacagtgggtgaaatttggtacaaaacttagctatccattgacatgtatgtggaaaaaccacttccaccactcataatggaagttttttttttaactggccgtagctatggaattcaggcacatcaattgtgaatttattagagaggaccttcaaggaaattgttgaataaacctaatccgtgagaataatggaatcaacgtgacgtgatacaccccacacaaagagaaaagtatgcgcttaaaaatccaattttatgtgaaaaattttccctgaaaatggctcgtatatatgatattttcttctttatattaatatctgtaggaatttggcttggtgaaatcccaaatttaccctacaccactcaagaaaagagtcaaaacgacagggacaaacttgtcccagaaaaattcaaattaaaacctcaatcaacgacaaagaaaacttggtcgtttctcttgcacgacaatggaacttgtcgttctcgcctacacgacagatcgtttgattcaaaacgatctgtcgttctccttagaataaaaccaagaggaatcagagctagccctagctcatttcctctcttcgaaccttcgagagtctctgaactctctctctctctctc

SEQ ID NO: 293933 - DNA, 160 bp, Cannabis indica
aaaaagttattttattagatttttttttaaaaaaaaacatatgaaaaaacaggataaaatagctggttataagagagcctatcctcctctaattactccagggataacccattactattatttaattttgggatattggcggctaaaccacttgaattta

SEQ ID NO: 293934 - DNA, 889 bp, Cannabis indica
gctttttggcagcattctctattgaccgagcacccatttcatgcagggtgcccgaaccaataaagaatgtgaagacacctacaccagctaaaaaggctggaagagggaaaggtgtgaaaaacatcactaagactgcacaggccttaagaggcaaggcagcaaagggatttaaaaagaggcaagcccgggcagtgaaaaggtctgcagcaaaggttgccaagacagaagggaggccaacgaagattggctcccccgtaatgatccaagaatgggagcgtatcttgattggttctgttcctattttcttgcccactaccgtctcagtgatggttacctctgcggaggaaactgaggcaacaccgacttctcaacctcggagaggtaggaaggcgaaaaaagggaggaaggggacaaacacttcaccttcaccaaaccctcttgaaatgagggaattagtaggaggcaccccgattaggcctccgatcgtaatctctgtcaaccgccaaggtcaacagggggcacctgctgagatcaatgaacgccctttattagatgaagggtgtaggacgcctttctccttcccaaagaaggctagaagcgatagtgtaagggttcccaaagcaagccctaacgcattccgaagagaacatggtgactggatgtttctccagggctaccgaccaacaagggtcacctcaactgctaagcttacctcctacacgggccctgtaactcgatcgagagctcgcgccatgcaggaatcagtgaaacccccctttcaaaaaagttcaggaagaagggtgtacatctgaacactctttagaagacactcccctacttgaacacagtgagggcatgtctgctgatctcattactcagttcgaagcac

SEQ ID NO: 293935 - DNA, 730 bp, Cannabis indica
attaatttttatgtactaaatcatgctcactacacttaaatatctatcaaatcatgtcactcgaattttaacatgcaacaattacgttctctgagctttcatcaatgttagactttccttactaaaattggaacaaaaatccttaaaattaacaattacaataatttaggatgaatttttaatcactttaaaagttcaaaaatattatttggtgcatgtaaaagtttaaaagtaaaaatcttaattagtattttttcaatgatcattaatattatagactatgaaaaaattagttaagaagccaaatcgtttagaagaatagatataaattcaacagaaacatttttaaataaagattcgatcttaaaaataataggaagcacaagcaaaattatgagcaactctgttagtagaatattaaataattaaataagagatttcgctcaaataattaaataaatgtttgcagtcattaacaactaattttaaaaaaaaagtttattatcaactggctctgaatagtctcaactactactaaataatttgtctctaatatcatcgccagtcattttttattcttaattcaactgaaaattttcttgatactcataattttagcgaactcaagttccgcattcccattaaaagaaatagtacgagctttaacaaaactataatatgctaattaagtttggttagaagcaaagtaaaaaagagagagagagagaga

SEQ ID NO: 293936 - DNA, 720 bp, Cannabis indica
gcattacatgaacatgtagtcaaaacattgtgcaaccgggaaaagggcttaaaaaccgacgccataggggtacatatgacgtcggttcatataaaccctttagcgtcgccctgatcagcgtcggtagcgaatttcacgaaaatcgacgctgaaagggctaaaaaaccacctctaaagggggtttttgtagtagtgatacacttcttaatgggtaataaccattgatgggaactaaaaaaattaataaggtaataatctaataacctttttatggcaagtttctaaaaataattttttataaaattgaaaataataattacaactaatatataatttgaaaaaaaattataaattatttttaaaaattaattaaaattactactttattattttatgaaattatgagtttattaataatttattattgtaaaactaaaaatcatttacatgtatattaatgtgttttttttattagtaagaataggagcttgattgtggaatcaattgtcttaatattattcatattcttaaaaataaaacgactacaatacttcttagttcttacttaggtctatcattgttagaaaaatattattaccaatccaatgatttttttgtatattaccatgaatcattctcctagaataactaaagatagtgttgttcattatttatatttttagatttaaaagatgatatacttgtctaggagtcaaatat

SEQ ID NO: 293937 - DNA, 522 bp, Cannabis indica
aggacaggcgcggacttcagaaagtcatctctgcgaggacaaataaaagataagtatgaataaatttcaaggcactagtttataacgtgggatatgttacctgaggctggtcgagaggtttgcttggagaggcatttgtctatccgctcttgttgtttctcagatggttccttgtatactggctctctttgaagacttgcgttctctggaatcagcttgtgttctcgcagcttagcagtcgtacacaataatcgccagtcgcgatcttgtaccggaaggctcccaagaacttcagctgtctctctgcgagttgcgtcgagtgcaggtcgagctggtctatctgcaaaaacaaaaaagagcgagttagcatgagatctcaaactaattcaaaaaatgtctaacttagaaaacatgcgacgtactaggtctacgattaaaatcagttctaatccctgggactttgaagatgtagaaccactttgatttccaatctcccatattagataccattccttctacccc

SEQ ID NO: 293938 - DNA, 870 bp, Cannabis indica
gcatcatttccgcgggagaaaaaggtttatctgcgagtttcatcgctttacaatgaaaacatcgccgtattttgatcggtttcctggtcgctttgaggcttacgtggctgttccacctggctccttatcattttcttcttatcttagtttggtatttccctacgttaggcattcgttggacaaagtattatatttatataaggcatgcataaatattttattctgaacagaagtgtacagacatatataattgaatgaggtgctgacacgtgggatgtggtgagtacgtggaaaatgacgaggacagctttggtttacacgttgatgtagtgactattgactagtgactagtgagtttgtaatctagtagaaaattccactgtttataagacgacgtttacttgaatttacagatgccgccaaattagcgaattatacacatctttccaactattatgagcctatgagcatctttaaacgaagtaactaccactactgtgaaattttcgtaatgttctataattggttaacaacttttaatctccactataaaggttacttagaaacaacttactgcaataaaagtgggttagcttgatgtacaaataggattttgaaaaccctcgaccttcgatgcctttccttgagtatatccgagccttcttatatatttgtctcttttatgattaataaaagggaaatttcaatttttgaccctaataaaataccccatttcaaaatatataccctccactaatttatacaaattaattccactattactcatttgtacccaaaatacccctcaaatttaattttcctattcacactctctttccgtctttccctctctttcactctctctctctc

SEQ ID NO: 293939 - DNA, 546 bp, Cannabis indica
accacatcctctatgggaataattgctagatttgtaaaaggaaggtgcgccctctgagttggcttaggtcgcaaagacgcaactcgcagtaggttcagcctcgtaaaggtggtgaggtctgatttggtaaccctcgaaaccaaatcctcgcacgagaaaggcttgttcagctgggtgtcgtcgaccgagtcagtaccgctcccttctgcctcttcctcctcatcgcctgattcgcgagctggggtcgtccagtcgtagtctgtctccttgacctcaacatcaggggcatgcctcgaatgaataagatagtcgcgcgctgacaccgtggactcgctatctcgaatatcaatggccccaggctcagcgagctcttacaccattttctcgatgtccgaagaagacatcggacctagctctatgcctacagtaggtgcaatctcctcttttgagatcgaagttgggagaaagctatcttcctcctggtcctcatcaccatcgaatgcgtggcctcccgagccgagcagctgactatccgacaggtcgctc

SEQ ID NO: 293940 - DNA, 737 bp, Cannabis indica
acagattgctgagccctaacccacaggatatgacttaatatatctgaggtgagtcttcagattgtgttgatcttgctggcccaggggccaggctttgagaattcctgagttaaggcaaagagcagctggccaggcccagctaccttagctcctctctactctgagaccttcccttgatggcccccaactaccttcccctcagtcattctagaatccactcactcttccatctatagctctgggatccagaagaggggctcacatgggaaaggaggacccggctctgttgaaggtcccttcactgagccttagaaaactctgtgggatggactttctgggacacagcatttcacctcaccaggaggagactgtctagaattaaaatcagaataaattactgaattgggtaatctgcacttactgtatgccttctaagagtttatgtgtgactggcaggcatatttggagatattgttatgctttgttggtaagaatagaagaattttgaatcagcagaatttagagcaacatgttctgtcagcaagatagctagagaaacagaaatgactgaggaataataaaggggaaatgactaagggccaggacaggagccagagcctaggtgtaatctgagctgagatctaagattttggagtctcctacatactgcctctgtcttgaaagccttggggcgcagctggaacttgacgcatccactgcactcccacgacgtgaga

SEQ ID NO: 293941 - DNA, 687 bp, Cannabis indica
ttttttttgtcaatataaaagttaataataatctgatatagagttttttacgccaaaactaggtacactttttgtatttgttcgtgctagaaattattttaagttggttatattaaaaaaaaattatcgaaaattgatctcagtgtactattttgtattattacaggatctaatttgctattttacaaaacagagaattcaatcggtaacttttgcaaaatacaaggtccaaaatagtattaactgaaaaataaacttataaatatgacattctttttcttcagtttttaagaaaccctgtaaaaatctaaacaatcaaatatgccatatattaaaaaaattatagattttaataaacttgtggcattatatttccgtcatgttataaagggattatttcataaatacccaaaaatgacagaatatttatattttgatggatttacagttttttagtgttatttttttgttgttttcaaaacaatattgctaccacagaagataccgtgaatataatattttttttaaaataataataataacaataagtaaaatgccgaattatattaaaaaaaaaaaaaacaaaaaagactaaatttgtttactgtataaatgataaatggatcttgtattttactaaatagtaaaataggaccctaagcttaattttaactaactttttttaat

SEQ ID NO: 293942 - DNA, 905 bp, Cannabis indica
aagtaaatgtaattgtactatttcactgttctaaagtacggagacagtggaatagagtttccaattttgcaaaggcccattaatatcagcccaacagacttaaatgtgatcaccaacccatattactctacaatctgaggcattcaatctcataaaatctaatttcactcgactcaccactatctttcccttactcttcatctcaaattcttggatatcaataacaatcgaacactctactccagtacattaacgtcgaaggaacaattggtacttatcagtaagtcctttttttttatctttctcgacaaccattccttacctattaactttatcatttaaattgttaattcaaacagatacaatatggaggccgagtctcaagcagagaacatgatgaggaacaaacctacgaatgggaaagcataacagcagagctaaacatcacaaaaccagtgaatgagattcaaatatgtgacgtcctaggcaagagtctcgacaaactgggaaaatgggaagcattctacgaaatgtacgcgaaacggatgggtttcggcacaagaaaagatgatgtacgacgttctcacggagtcatcgtaatgcgcaggtgggtttgttgttccgagggttacaaaagaatcacaataacggaaagacaaagaaaaaagagacctcatgatgtcactagaaccggatgtcaggcagcattacgtattttactcacacccgtctaacacttggaaatgcaaagagttcagcacaatacacaatcacgacctcgcttcatcaagtgaggtacaatttttgagatcataccgagtagtgtccgatggcttgcttgcccaagttaggtcgatgaactcagttggaattaaaactgccaacataatgtctcatgttgcttt

SEQ ID NO: 293943 - DNA, 744 bp, Cannabis indica
agaggtgcaaggctcgacttgtggctaaaggctatagtcagagagaggacattgatttcaaagaaactttttcgcctgtttccaccaaagattcgttgcgaatcattatggctataattgcctattttgatctagaactcaaacaaatggatgtaatgactgccttcttgaatggtgacctatctgaggatgtacatgactcaacctgtaggttttgagaagtctggcgaagaacacatggtttgcaaactcaagaagtagatatatgggcttaaacaagcatcaagacaatggtatctcaagtttgatatgattttcagtgggagaatgtggtggatcaatgtaaatacatgaaggtcagtgggagcagttttattttcttagtattgtatgttgatgacatcctgattgcatctaataattctgacctgttagctgagacaaaacaactcttattagatttttgacatgaaagaccttggcgatgcttcttatgtgcttgggattcaaatccttcaagatagggccaatggtattcttcttttgtctcagaaaacttacattgatcaaatcttgaaaagattcaacatgcattcatgttcttttgggaaggcactgatactgaagggtgacaagttctcaaaggcccaatgtccacacaataataaagagagagatgaaataaaagttgttccttatgcgtcactgttaggtagccttatgtatgttcaagtatgcacacgc

SEQ ID NO: 293944 - DNA, 577 bp, Cannabis indica
tctttaaagtccttgagctccttcagctccacggccaagtttgccctggactccaagtccgcctggcgcaattcctctaaggacttcaccttggcagccatttcgtataaggcttccctagcctctcggagctcgcgtttggccttggcaacagcctcgccctccgccctcagctcttcccgatgctttgcctccagcctgtccctccgaaggacttcctctcggatcatcgcctccgcttgggcttccctttgcttagcctcttcctcgaacttggccttagcaagggcctcctgccacgcagcctcctcttggaacgtccgcctttcagcagacaggtcctgcagggtcttcacgacttcgtctatgtccccaaattcggacaagacgaagttgtgattgattaggttcttggaaaggcggccggcctctgcagcaagctggaaaaggatgcaagagtgagtaaagtccttaaggaaaataatgagggaaaaagtaaactacagaatacttaccacactcaaggaatggctgagatcctgaacttgaaaaacagagttcaaggatgcacaagcag

SEQ ID NO: 293945 - DNA, 569 bp, Cannabis indica
tcttgttgatctccgaagttctggttgactatcatcatgtccttcactttgatgcacccccgtttgccatggattctgaggttgtcctcgtcctcgatgttttcttctttcatctgtatcttgagctgtaggtaactcaacaatttgctccccattttcttctgcaattcatcttccatttctttagaatctggtaatgattccttttgtgatgaccaccatgatgatgtttcattcaaagaccacattccttgatgtgtaacactttccagttgtagggtcgcaacatctccaccctttccgttggctgtcgtatcccataaagatacatcgtatcgccttcttgtcaaatttgttacgtaggtggcttggcacgaacacgttagcactacacagccaaatactcgaaagtgacttactgcaggtttataaccccacagtttttcatagggtgaaacgaaccctaacttagcctggggaagcctattgattacattgagcagctgtcttcataccttcagcccaaaatctccctggaacattctttgcatgtaacatgcttcgacatg

SEQ ID NO: 293946 - DNA, 795 bp, Cannabis indica
tggcgagaaatgtgagatatacactgaaatacttctttacccagagagacctgaatatgagacaaagacgctggctagaactggtgaaggattatgattgtgagatcctttatcaccctggtaaggccaacgtggttgccgatgccttgagtagaaaggggcagagtcagataaatactgtgaaacaaatctcgcagcagttagcaaatgagatgacccgagctaaaatcgagttggttgtagggcagttggctaatattaccctgcaatctactcttttagagcgaatcaaagaagcacaattgcaagatccagagttaatgaaatcccgagatagggtttcggctgggaagactagtgactttacagtggatgaaacaggaatgttacgatttatgaatcgtgtttgtgtgcctatggatgacggtattaaaagagagattatgactgagtctcatacgactccttactcagttcatccggggtcaacgaagatgtatcaagacctcaaggccatgttttggtggccaagcatgaagaatgacatcgctgagtttgttgctaagtgtcttacctgtcagcaagtgaaggctgaacatcagaggcctgcagggttgctgcagccattgaatatcccagagtggaaatgggaagacattgctatggactttgtggtaggcttgccgagaaccacgggacagttcgactctgtatgggtcatagtggacaggtttacaaagtcagcgcactttttgcctgttcgaacgaacttctccattgatcagtatgctgagt

SEQ ID NO: 293947 - DNA, 501 bp, Cannabis indica
ggtcgaccagttgcctacaggggagagtttttcagtttttcctccaggctggttttagggctcggggtggttttcagtgttcagtgtgcaatatttagaagttgtaaaacctaaccaagaactattggaagttaatgattgtccagttttgggaattaaagattattctaaagattttaataaatgtatttattgagtgctgttgtcgtgacataggacccaggatcgtcaagctttgattccacttagacgtgatgcacgctaaacttctggactgaggtaagaagagtattaagcactatatatggcaaacgttatgataattatagactcaattatgattgagatctcggtatgtgtttgttgtaacataatctcaatcgagattaatgatatgtattggttgtgactcgattatgatcgagagaatgttggaaattattttaccatgatctagatttactaacaagtatgtttaattaacaccctaatatgaattct

SEQ ID NO: 293948 - DNA, 734 bp, Cannabis indica
ttgcatgtcttatattgataaacttcacacaggggacgagagtagatgcagtaattttcgcagaagatattgaagctttggaggacactttgcatgagttacacacctaccacatcagtgatgcccgtgtcaacagaacccctgccagataccttaaaaatggcacaaattacaattttagctggacgctgaactcaaaaacacaagttgttgaagtccaagaagaagacaaacaaatttctaagccagtccatgagttcgtttcgtttaagaacttgtcatctgacaaatactccaacacaccacaaggtaacttcggatcccaacgatataccaacatgacaaatgatttacgaagttttaactaacatcacattcaatttttagatatcataggagtagctgtcaaaataaacccaacaaaagtggtgaacacagtgtatggacagcgaaccatacaagaaatttatctaatcgatgacaggtatatataatataacatacaaatatataatgataatcttcattggagcactcataataatttcatatggatttaaaattatgatacatagcaaaactaataattaccattactattttcaattacagttgtagcttccacccgatatgtttaactctgtggggtgctttggtacaagatattagtgaaaaattgtctgaagttactggaaacaacccaataataatgggaacaaaaagatagatgtttc

SEQ ID NO: 293949 - DNA, 724 bp, Cannabis indica
ccgcacaatttaccctctcagttcccgtcacccccatattatcgaggatccgggtaacagtgctcatccactgatcggccttaataatgtcgatacctcccagaaaaaccggaggttgcagcttcacaaaccgctcgaacacagagtcccgatgcggcataacaaacccttggttacccaccactggcacaggagctggtggtaacccttgattagctggaacagcttgttgcctcaaacgttgcaactcttcttcttgacgaagtataacactccgcatttcatgaaacatctgctgccaatcagcaggaggattagcattaacagcctccgcattatcccccggattttgcggaggtggaggcggtgctggtggatcggttcgggtagccccgggctctacttgctcgccctgtggtctggatgattgcggagggtccattactagtacccctgaaatcaacaaccccagcgagttaatctaaatttatgtatgtcaacctgtaacgccctaaataattaggcacgctacccaaaatgattatgaaaccctaatcccctaaccgggattactaattaaaaatagcgcagaatttaaacttttatattaaacagactgaaaataaacttgtaatatatttaaacttttcaaacatagttgggatcccaaaaatatttacaaaattattacaagctctttcttactagccgacctaagcggcaa

SEQ ID NO: 293950 - DNA, 1418 bp, Cannabis indica
gtttgagtcccaaatctagtttcggaccgagattggggttcggttctaggtcctggccccaattgtgtgtcccgattctgcttccatgtttgggtctgagtacaggtccaagttcggcatcgagtttatgtctgggttgggatccaggtccgggtttcagttcgggtctaggtctgggttggagttcgggtcctagtccggttacggttccgagtctaggtccaggtctgattacgtttccaggtccaggtccacgtccaagtcctggtttctaacctcgttctgggtcccggtctacttccagtttcggttctaacttcggctcacaaggtacgtgttcgggtcaaggttgcgatttgggacttggttcaagtctgggtctagtttcgggtcctggtctaggttcgatttcagggctgagtcccagatccaaacaccgactacgggttcagtccaagccccaactccagatctggatcccgatctcgggtctcggtatggttccatttcgtatgtcgagtaacgagttgggtcctagaattaagtccgggtttgggtttgggtcttgggtcccggtcctagttccgttgcccaagtctgtatctcgattctaggtccaggtctcgatttgggtcccgattctatgttcgagtttgggtccgtagtcgaggttcgggcgttaagtcttggtcgggtttgggtcgtctggtctgtgtcttatcttggtcctggtcctagtcctagtccggctccagttccagttgcgattccgagcttaagtttgggttcgagttttgggtcagggttcgagtcctagtttgagtttgtgtttgggtccagatctcggtctaggtctgaatctaggctccggagagtggttagggtcatgggtctgggtcaaggttctggtccgagtcccaaggttttgatctcgatcgtgtagtcgtgagtttagttcttaggtctaagtcctgggtcctgatcctggtctgggttcgagttcgggtcctggtgcaggtctatgtttgggtctgattctgagtctgtgtctgagttttggttcggtttcgggtttggtcctggtatgcgttcgtgtccaggttcctgtcctagtttgggtccggggcagatttcatgtccaggtcttggtccgacttcatattccccggtccaggtcaggtcctagttcaggttgaagtcccgaatttagatcaaggtctgggtttcggggcctaggtccttggtctaggtgccccatccaagtccggttcctaggtcctagtctggttccaagttcgggttcaggtcctgagtcttggtttttgtctaggtcgcggtctgggtttaggtccagggctcgatccctaactttgtctgggtttaggttcgggtccttgtcagggtctagatcctagtct

SEQ ID NO: 293951 - DNA, 790 bp, Cannabis indica
atttttagatttgaagtaattgctgacggttttaaactatggcctataatactataggccacgatttgaaaccatcggtaattcccctttgaaaaaaatctgcaattcttaaggcacgtttaaaaacagtcgaaaatacctcacgagtatttaaaattatatggaatactcaattttttccaacggttttaaatactcacttaattttttttagcgatggtctcccaaaaaaatatttttaggaccgtggtgaatagtggtttttgtagcggtaaaaataaaataaattattgttgttttatatttttaacaacaaattaaaataaataaaataaaaaatttaaaggaaaaaaaattgtacttagaaaaaaatgtttaattttatctttaattatattttccttatatgtaagaatgtaatatatgtttaatttatttaatttttaaatatatttgtatcgtattattaaaattttaaaaaaatatataaatttatatatcaatattcaattcgtgtaaatgtgaataggatttgattgaattgactcgtgctaattaaattagatttattattttgtgaatacccctaaattaatagtgctttcttgatcggtgtagaggtgtgtcagatagcctatcttggattcaacctgtcatcaatgtcttgataaatcaatcacacatcgaagaggaaaattaaactagaaacaagtcactcactctggacgatcaaaagatctacatgtgcattccctattgtttttttttgtttttttttttttttttaaaa

SEQ ID NO: 293952 - DNA, 650 bp, Cannabis indica
gacccgaacccgaacatgaactcagacccaaacatggaaccagactatggacacagaaccagggtccggacctagaaccgcaccccagtctcgatctcgaacccaaactcagaaaagggacctgggacctgaaccagaaccagaccaagagccgtgacagtgatccagatcttgactcgggattcgggtaacggggcctggaacagaccagtagtcggtgtctagatctaggactcagactaggaccagaacccaggcgaagaaccaaacccgaacccagacctagacctgggacccaaaattagaacctgaacaagaatcgccgaaccagggccctagaacaagactaggaccgtgatgaggacccggacccagacgtggaaccgaacacagacatgcctcagacccaaactgagactggaactcaggcccggacacggtcgtgtacccagaccggaacatagacctagactttgaccgaaatctgggacccgatccacaacaaagacttggacctagatagggatctggatacgaacctggactcgaaccaagacccagactgggatcgaaatggtggacctaaatctggaccgagatcctgaccaagacccaaacttggacccgcactcgggacctgaacttggacc

SEQ ID NO: 293953 - DNA, 515 bp, Cannabis indica
catattcctaaggacttggtctatattgaccaattatttagcaaatatataactgaactgaagttactaaggcacatttccaaaaaaaaaaagtctcagactcagagtgtgacaaattgagttttgttaaggattggaacatatttggggtgtacaaatttggtatgtcagccatgaaccatgccaggaatgtgaggttattattttcaagtttatttgatcataacttgtttctttttttttttttttttttaaaagtcataactgtattcgtaaaagcttgtgaattgtgtgtttttccattcatttctttttagtgtataataataattgatttaatgttctttgcttgttacatttcaggtatttgtgattatcgctccttctaattaaccccagaacatgagaaacacccctcagttacttcttgattaatgttttaataatatgcaaatgttacattgtctaataaaccaaaaaaaaaaaaaaaaacgaaaagaagagaataataagaa

SEQ ID NO: 293954 - DNA, 514 bp, Cannabis indica
tatttaatttaaataatatttaatttacattttaaaaaataaatatagtaatttaaattgaataaaatcatatatataaattaataaatataattaaaataaattatataaaattaaagaactgaaaaatgctcgtttttggcgtcggttattagttaggaaccgacgccatatatacccccaaggccgccggtcctagataataaccgacgccataggagtataaatggcatcaatttttaaaaaccctttagtgtcgccttgatcagcgtcggtagtgaattttgccaaaaccgacactgaaagggcttaaaactgcctctaaagggggtttttgtagtagtgttactttctttcactagaaatttgctctagcaaaagctcctccttctctcgaaatagccgaacccacaacttgtgccgaccctaggcataggcgggctagccccgcgcctagggcccgctcattttaggggcccaaataaaaaaaataccttttaaaaaatatacatat

SEQ ID NO: 293955 - DNA, 526 bp, Cannabis indica
tttttttttttggcgggttcaccaattcgggttcgggcgggttgctcgggttcgggtcaaacccgctcaaaatgttcagccctactctcatgcacattaaaaacccagaaaacagtgttcccactcaaacagaaaacgaaatgcagtgaagtttcgaaaactaaccttttacttctggtaaatctgttcccacgaatcgcccttgacagcactgtagaatcaagaaaaaaaccacgaagaaaggcgaaaatctgggcaatttatggaagtgttttttggtggtttctctgaaagagaggaaacaaagaagttaaggaagttaaagaaaatgagagaaaatggagatttttggttcgaatcagagggtttaaatacccaaatccctcattaattgggatcacgacacgtggcaattagaatgcctagagtcgcccaatccaacggccaaagatggccacgcctacacagaaaccgaagagttctgtgacgtggcaccataaatgcaataaaagcaattattatagcc

SEQ ID NO: 293956 - DNA, 780 bp, Cannabis indica
cagaccagtagtcggtgctaggtctgggactcagacttggaccataacccagaagaagaaacaaacccgaacccaggccaagacatgggacccaaaatttgaacctgacaaagaatcgtcgaactaggaccctagaacaagacaaggaccttgaccaggaccgaaacctagacctagaaccgagcacagacctagcctcagacccaaaccgagactggaactctggcccgtacacggtcgtgtacccagaccagaactgagcctcggacctggacctaaatctgggacacgatcccaaacacaaacttggacctcgatagggatctggatacgaacttggactcgggccaagacccagattgggatcgaaatgttggacctagatctggaccgtgatcctgacccagacccaaacttggaccggcactcgtgacccgaacttggacctggacccaaacctagacccagattagggtccagacctggacacaaacccggacacagactcggacctgaactcaaacatacagctagaataagacccaaagttagacccagacccggacccaaagtcgaacttagaactgaatccagactcagatcggtattggaacttgggactcggacacaacctagaccaagacccaggaggcgaacccacactcggagcctcatctgaccctagactgaaatccagatccgaacccaaactcagaccaggctcgaactccgacccgaactcaactccaaactcgaactcagaatcgcaaatggaactag

SEQ ID NO: 293957 - DNA, 938 bp, Cannabis indica
tcccttaaagtgttcctttagagcagcagtttctaggcttcatcatcaatgcccgaggaatagaagctaatccagagaagattcaagccctccaagatatgaactcgccaacgaaaaccaaagaagtgcaaagcttaactggtcggatcgccttgctcaacagattcgtttcaaaatcaatagacaagtgtgtcccattcttcaacatcctgcgaggaagcaagcagttcgagtggacagatgagtgtcaaaaagctttccaagagctaaagtcacaacttgcaaaacctcacgtactctcaaaatctctggacggtgaggaactgggaatatacttagctgtcacggaacatgtcgtgagtgtcgtactaatcagagaagagaataacgtatagcacccagtctattacatcagtaaaagactcattgaggccgaggggcgatacccgttaatagaaaaactcgcttactgcctcattctagcatcaaggaagttgaggccttattttcaagctcatcctgttcgggtatataccgaccaacaactacaccaaatactgcaaaaaccagatgcttctagacggctactcaattgggcggtagagttgggcaagtatgaaatcactttccaaccccgaacaacaatcaaaggccaagccttagcagactttgtggtagaatgcacaggcaaaaaagaaaagcataccagaaagcaaccccgagccggtacaaacacctcagccaagtcacaatgaggacaaaccgacctggaaactacatgtagatgggtcggctacagatcaactatctggtgcaggaattgcccttgtcacgcctgggggcaacacctacacgctgcagtcaagttccgattcaaagcatctaacaacaaagccgagtacgaagctctaatcactgggataagactagagcaggag

SEQ ID NO: 293958 - DNA, 850 bp, Cannabis indica
cctggccactaacgcccgcctcgcctccagaacgagaacggggaataacggagacgctgcctaaacactcgacttctgggtcgtcgggaacttcaacgttttcagtctccataggaggagtatcagaaactaacaatgattcgacgaatccaggagcaatactcgaggaaagagaatcagaagttgaaggagagacacctggacaatccgtattcgacattacaccacagctaaaacgacaatcgggatccaaagcctacccaataaaaaagaggaagagagaaaggctaatcctaagaagaaaactgcccttacgaaacgaggaaatgccaggactaaaagggggaaatcggagaatagggtagaagaaaggggaagatcccagaagaaaaatgggagggaagacaacggaaggatggaaatccaaaaatatacacggtaattaaaacaaaacctataaaaggggtaaaaatgaacgagaagaaggcaaggatgaaaggaagatataaaaaaaagggagggagaaataaaaaaggataaaaaaaagaaataaaacttaagttaaatagagaagcataatatatatacctgaagacagcaagatctagcacagagaagttgaaacgagcaacagagagaaaaacacgaaatgaattttcgaaattggtagtcttatactcgagagtgcgccgccaaaacacagagggaggttagggaattaatagggcatttataagaaaaaacgattctcgaggttccaccatcacatcaagggtaaccgccacttcttaagaaattgaaaaaattcaaaattagggaactgtacacaaaaaaagatatatgatgagaa

SEQ ID NO: 293959 - DNA, 739 bp, Cannabis indica
cttcggcaattgaaataaggctgaagtggcataaaagttcaagcttagacatcgcttgaaaatatcaaaaggagaaaggaccacggggagtaagacagacatcaagtagtccttccattatgggaaggagggttgaagacgtgccatagccccagtgatctttcttgcacgaaaaacatcgtgcatgcaagagtcacattgaatttttatgaggcaagcttcggcttctgcaaaggaaggctgaagtcgcataaaaattcaagcttagattttgcttgaaaagatcaaaaggagaaagcactgcagggagtaagacagacttcaagtagtccttccattccacgaagaagggtagaagacgtgccataccctcattgatatttcttacacaaaaaacatcgtgcatgttagagtcacgtttaatttttatgaggtaaggttcagcttttacgaatgaaggctgaagttgacataaaaattcaagcttagacttcgattgtaaagatcaataggtgaaagcaccacgggagtaagacagacttcaagcaatccttccaatctcaaaagtaggttgaagatgtgccataccccctgttatctttctttcacgaaaacatcgtgccagcgagactctacgtccaatttttatgaggcaagcttcggcttccgtgaaagaatgctgaagtttcataaaaattaaagcttagacttcgtttgaaaaagatcgatagggtaaaaa

SEQ ID NO: 293960 - DNA, 444 bp, Cannabis indica
ttttttttgtatccattaattataaatactctcatattatattttattaaaatttactcatttttataagtgggttgccaaatatattctcaccctccacttaaatccagtatataatttacattaacctaatgagtataatagagacttagcatcaaaagtataatacaacatcaactatataaaatataagtatacaattgcacaactctaatagctagactatatagaatggaaacaaacatgtgtccaagctgtttgaatgttgatttagtatcttaaattatttaaaactttatgataatttataggaacttgacatagtcttattaaatattaggtaatagcaactatattgcatgtttatttagttctacttaaaaactttattcattttattttcattaagaaaattaattattaaaaaatttcaaataataaact

SEQ ID NO: 293961 - DNA, 928 bp, Cannabis indica
acatggtgaactagaggaggagatctatatgagacaacctaaaggctatactgaaaaagggaaggaaaactatgtctgcaagctagtaaagtcactgtatgggttaaaacagtcacctaggcaatggaataaaaggtttgatggatttatgctaaagctaggattttctagaagctactatgaccactgtttgtattacaaaggaactgatattaataaagtcatatatctacttctgtatgtagatgatatgcttataatcagtaaggaaagagcaagagtaaacacaatgaagggcctactcaagactgagtttgaaatgaaagacctaggggaagctactaagattctaggcatctctattaagagaaacagagcagaagggacacttagcctaactcaggaagactacatacacaagataattgagaaattctcaatgaagggatctaaaattgctagccaacctataactacacagtttacactatctaagaagcaatgccctgagagcaaagcagagaaggaggaaatgagtaaaattccctatgctaatgctattggatctgttatgtacctaatggtaagcactagaccagaccttgcttatgctattagtgtgcttagcagattcatgacaaatcctggtaagacacactggcttgctatgaaatggctactaaggtacctaattgggacaactaagctaggactcaagtacaagaaacaacaaggaagcacagcaatagaatgcttcagtgatgcagactatgctggggacagagatagtaggaaatctacatcagcctacatactactactagggggaaattgtgtaagttggaaagtccaattacaaccagttgtggcattatccacaactgaatcagagtacattgcaactacagaggctattaaagaaagcata

SEQ ID NO: 293962 - DNA, 576 bp, Cannabis indica
gtcgtgtacccagacaggaactgagacccagacctggacctaaaactggtacccgatcgcaaacacagacttggacctcgatacggatccggatacgaacctggactcgggccaagacccagactgggatagaaatgctggacctagatcttgaccgagatcttgacccagacccaaacttggatcggcacttgtgactgtaacttgcacctggacccgaacctagacctcgatcggggtgctgacctgtacacaaacccggacacagactcggacccgaactcaaacatacacctagaatcagaaccaaagctagacccggacccgaacccaaactcgaacccagaccaggatcagaaccaaggactttgacccagaactgaatccagactcagatcggaattcgaacttggggctcggacccaacctagaccaagacccaggaggtgaacccccacccggagcctgatctgaccctagactaaaatccggacccgaacccaaactcagaccaggactagaactcctacccgaactcaaccccaaacttgaactcagaatcgcaaatggaactag

SEQ ID NO: 293963 - DNA, 395 bp, Cannabis indica
ttctcttttttgttgcttcatttgattactctattataaaatctgcaacttcttcatccattgcaaacatgtttggagagattgttatttgactattattatgatttgaatcttgtccttcattatcaaattgctggttgaatggttcattgtgtatttgtagaaccagttcctccactgtcttgctttgctcttttcttagctcaatgtagaacttgagggaattgtcactcagtagctttattagtgttgttcccgatgatatctggtacgatatgtctatgctgtttctgttgtaatttatttatattttatcaactccatcaagtttgctagcgaagaattggttagaattagaatttcagtcattgtgtagtcatcataatttgtatttt

SEQ ID NO: 293964 - DNA, 1384 bp, Cannabis indica
tacactgtggacggccgttggttgagctgggttgaatgggtggcgtcgactgaagaaaatgggtttgagagtttactggtttcagctaagagagaagaagagagagggatggtttgaaatgtaaagggtagtttaggaaaattataaaagtgatcatatatgacaaattttaatgactatagatattttaagcatagaatttcaaatttcccaattaatattagtcgttgtttcttagttttatggtgcaatttgtaatatcatttatagcaattgaattagataaacactcttacatctaacatcagatttaaaaacaattagtatgtcacatatgtcacaccatacatatatttccttgtatatttattaatatataattttgggtagctggctgtgtaattagaccatccaaacaattctacatgcatgtcacactctattagggtagacataccctacatacattggtcgattgagaaaataatgtaaaatgagaatgaaagttaagaaaattttcagaaatgtgtaaatgcaaaaaattatattaataaagtgttgaaaatataagaatattttatatattatatatacaatcaatcaataatttgtacgtgtatataatataataaatattttatatttattaaatttgattacaattaattagttgatattttatatatggttagattataatttactaaatatttgttttttaatttaattttctgaattaattattaaatatatgatataattatgtagagagcttgatgtaaggtagtcacttattatataaatataaaatactcgattcatgagttcactactcattttgtgaaacacggtaaatctatccaaagagagtaaaaagaacttgaaaatttgattacccacactaatcaatctttttatatagtatatatgttcgattcatttaacatttcatacataatcatatatgcattaatatcattcatataaatatctaaaagaaaaaacatatataagatctgtcttctgcctagcactattatgagataatgtcttataattagttaactattttttataatatttattaaaataaaacaaataaaatctaattttaaataatacgaataataatattacactatacaaaaataccaaataccattaaccattttttgatatcagaaagcctttggatataattatgtgtatatctatctatacatagatgatcaacttgtcaagttggtagaaaataataaaagttcatgatgagaagatttgtactattgtctttattattgtctccctccttaggtagaactaggacatctctgcacatatggtcccaaagaaaaagagaaaataatgtaagtaatttaacagc

SEQ ID NO: 293965 - DNA, 807 bp, Cannabis indica
atttgtcatataagataattttaatataatatttcaaataaaaaagataaagttatcttttaatttaaaatatgttaaatatcaaaatatctaatcttataattaaacaatatataaatattaaagaaattaacaaatttttaaatctgaccataatttaaaaattaaaataatcaattttaaaatttaaacctcaaaatatcaaaattaataataatctattaaaaaaataaatattattaatttaaaatatgatatttaagttcaaatatatttaaaaataatattttattttaaatttagggtttgaaaattggaaaaatcgaatttttgggaaaaatcccacaaaattccagttggaggtgttggctgcccagtaggctgcacctgcagcccaaaagaggctgcaaaacaacccttacgcacgcggacgaagaggaatatgcagggtgcgtgtgcgtgaaaggtcggcgttggcagggtcgtctgggcgaagctgtagggtgcgcctcgggcggacacgactttagacaaggagtgatgttcgagcccacgcgcgcgtaacccctggttgtcccgagagcctgggtgcgattgatgcacccctctcgacaaccatggcacccaattttccaaaattcataactttctcaatttttatcggaattaagttccgtaaaaacgaaaaacgcttaatttttcacaaggaatccaaataaaatatgttcaaaaacagaaaaaatatttttcatggaaaaaggttctgtacaacacatacattcatcaattaacacataaaccacatga

SEQ ID NO: 293966 - DNA, 117 bp, Cannabis indica
tgccaattttccaattaaaccatttaaatgccaattctaaatatttaataacttaaaaaataattattaaataatatggccatttaatatatttattatttagacatataaagtatc

SEQ ID NO: 293967 - DNA, 954 bp, Cannabis indica
cacaaaacgtaagaaacataacagaacaccaatgtttgtttacgaaaaaaacataaaaacaacattaaaaaaccataagaacaatgacagtctgattgaaaaaacaaatcacttcttgggaaggctgggaggggcctcggattcactttcaatgttctcaagttgcttcttcatgccatattgataaaataacacagccaaacgatcgcggtgaatttccacatcaaaaccagaggatgggatgggtttgccatcaatgaaatactcagcaaatgatgctacaaaaacaccacaatcactggaaaaaaacaataagaaaacacaaaaacagacactatgagaacactaataaaaatcaaagtcacataacaaaaacataacaatacaaacaagcagtgaaaaacattgaacactatacataaaacttacgctgtgacctgctcgggtaaaccatcaacagcaacaatagggaacggttccatcgtgctaaacttagcttcgttgcgaaggcctttgaagtctaacatagagaagtaatatggtaaaataacagaaaaaggcttgcaagcctctttggcagctgtcatataccttccagaacgcaatgaattgtacagatatatccgccgctcagctatgtttagacgaccacaaatccaatgatcctgtaattttacattgataggcataacaacatgatcaaccaaatgccaaggagtggcacataatatcttaccaccttgaatgtactgggccacattgtgagaaagagacaacaccgatatatcgttgtttttctcaacaaacttctcatacaaacttgttatgctagaacaaaaaaggcaatcagttgtggtgactttgattttcggctcggctgagtacattattttcttacgaagataatagaaaataatgtcaatgtgctgtacaaaaaaaaaaataagtaaaaaa

SEQ ID NO: 293968 - DNA, 579 bp, Cannabis indica
ttcttaaaaaaaaataaaacattatgcagctcgaagatcaggagctttttaaggtctatatggcagctcgaagtccctccaaaaggtgaaccattttttgtggcgtgtcttagttggatgtctaccaacaaaagttcaattaagcaccaagaaaatcaatgttgatctgtactgccctttctgcaataatgcagtggagactatcagccatgtcttgctggaatgcaggttcgcgagcagctgctggtgtgtttcgatcgtccctgctggtgtggtcagcaacggcttcaataattggctgtccgatcttgttttgcaccagtccgcagcagttgtcaaggaagctgcgtgtgttagttggaaaatatgggctgtccgcaatgatcttttatggaataataaaagttgttctgctattgatgtggtccgatcggctagaatagtgcttgaccaatattgtactgctcaatctcaaaagacgggggcattgttaattaatgatattaataatgtcgatgagcggtggaagaaaccaattgctaatatggtcaagattaatgttgatggggctatttttca

SEQ ID NO: 293969 - DNA, 545 bp, Cannabis indica
gataaaactcgttttaatataattttatttattaattaatcaaaaattattttatgttgtttgatttacatgttattttcatgattataaattatatatatatatatattctattaaatcttgaacatataattactcatgattatagtattgtcaacacagagaaaaataatcatgattatattctttaaactatttagtctcataatttatcagtgtattagatttacactgacgtgattattagcgatgtattttacttacacttgaataagtagaatgtcttttccatagcattaataaagtaaacttgtatcggatgtattggctatacatcggattggaccgatattgacagtggaaaatacattataaacttattgttatgtcttttttaagtcaatataacttaattgatcttgttgaccgaggtttttcggcaactattaaaatataactataataatgagctgtaagaaagcgagatgaaaactttttacgtggttggggcgttaatgagccttagtccacgagccactgctatt

SEQ ID NO: 293970 - DNA, 545 bp, Cannabis indica
aggatagaatacatctcctcttcaggaacacatctccttatgatctgatcagcgcagtgcttgtagaggattggttcttcccaatagtaatgtttcacctcagaaaagaatttcttcaattgttgacgcgaaagctcgggtggagttatttttgcagccaagaaattaacatagtcagcgtaccaaggtaccatcaggttttccctcacactaaagagttgttcatcaggaaattgctcatttatttgtacctcctttgtattctgactctcttgcagctctaatcttgacaagtggtctgctaccaggttctcggtgccctttttatcttttatctctaagtcgaactcttgaagtaaaagtacccaccgaatcagtcttggttttgcatccttcttggtcataaggtatttgattgctgaatgatctgtgtaaacaattaccttatttccaattaggtagggtcgaaatttgtcacaagcaaacactattgccagcatttctttctctgtagtggcgtagtttaattgagcatcattcagagt

SEQ ID NO: 293971 - DNA, 676 bp, Cannabis indica
gattaaaaatagtatatggagtaattactttaacatgactttttattttatttttattctttgaacttttttatttataaaaatacattttcagtaaaaacagtaaactggtttttggttgttttatagtttatttaaagttatcatgattttgtttttctagttgttcttagttttttttatagttgtcgttaggttgatttttgttatttttaatttttttacttactttatgctgaaaaatgtattttgtaatttaaacttaaaaaagtattttgtaaataaaacttaaatacgtaaattataaataaacataaaaaagtattttaaaatttctcaaatatagaaaagaaaaaaagtaaagaaaataaaatcctagaataataaggtactacctcatattagggctgttcatccgatccaatccgcacttttttggtcaaacaacatccaatccgcactaagtgcggatttcattttttggatccaatccaatccgcacaatagctcaaatccaatccgcaaaagtgcggattggatcggttactttggattggttacttttaatattaaattatttaatatttatgaaaaaatattttttttcacataactagcaacaaaataaaacaaattatagttattttatgtctccaacaacacattaaataaataa

SEQ ID NO: 293972 - DNA, 341 bp, Cannabis indica
tctctctctctctctctcccctcctctctctccctctcgttccctctctctctctctgtcgttccctcttccctcttcgacttcgacccaacaacgcacgacgacgacccaacgacccaacaacgcaccaccacgaccacgaccccactccagccatccacccacgaccccgacccaaccctcattttctctttctctctctctcggtcagtagccaaatcgacctgtgcccgtcgaaaccaccacgaaccaccacgaaccaccacaaaacgtcgccaccaccaccacccgtgatcgtcgacaccgaacagaggccatcgccaccaccacgagcaggaccc

SEQ ID NO: 293973 - DNA, 708 bp, Cannabis indica
atacttatattaatttataagattgaaatattactaagggacaacttaatacaacataatatgattagtgtaatttaaaattaaaattagattgtgtaaaatgtgttgcaccaacaacattatattatatgtgttggacaccttgttttatataaaaatacacataattaaatttataattaataaattaaattctcaactaatgaaacaaagtcaaagagtagatcaataatctaatttgtgattatctttaaactacaagcttaaatcaatcgcactcattggacttaaaaccattcaaagaagttaccttaaaacttctccattggtccaaaaaaagaacctttgaaaaaaagtaaagatgtcatatcattactctagggtgctcactaaagtgactaattatatgatgtcacataacatgaccttataattaatggagcctttcaatgttaaaagtttgtatgagtcatcccatttacatattaatgagaacttaaccgaacctaattagcattgatgaaaaaaaaaagctaattaataattttttacagtcaaagttactaaattatgccccctgaattttttgtaccgttagaaattaccctccgaattattgtagattgttaaatttaatggacttttgtcctaatttctatctaattttattgtttctagtgattgtttattgtactaaaccatgctccc

SEQ ID NO: 293974 - DNA, 184 bp, Cannabis indica
tgtgagtttaaacaagtaatggattgtcaagataagaaactaagaagaaagccaagagaactatggtttgatccattcacatggagtaacctaaagtttttctattacaaggacatgaaaggaaattttagtttataagtctattcaatggacttaacaaaacttcatgttcctagtattatag

SEQ ID NO: 293975 - DNA, 613 bp, Cannabis indica
atggaagttccgtgaacctactcttcaaggaggccttcaccgcaataggcttgacggaccgagacctctcgcccagtgggtcccaactcacagggtttaatgggacaacacttatcccgatgggaaaagtgaggcttcttgtcaccttgtgcccggacaccccccagagcacatttaaatactgcactttcgtggaggtggactgtccaactgcttacaacgccatcctcggccgaccagccttggtagattttggcgcggtcacatccattcggcacctgtgcctaaagttccctacccaggaagctgggatcgggacggtgagaggaaaccagggggaagcaaggcaatgttacaatgtcgcaacccacatgccggtattaatggtccgggaatccattgagccagaaatggctgaagaagatgagttagacccccgtgtggggtccaaaagaattgtggaaccaatggaggatgtcgaggaattatcagtgtgcgacctcgactccaccaaagtactccggctgggaaagagcctagatccggaggaaaaagagaaaaataataaaaaacactgaagggcgccatcgacatcttttgcatggcgccaaga

SEQ ID NO: 293976 - DNA, 393 bp, Cannabis indica
ttctaaaacgataattaaacacacataaagttaaggaaaccttacattggttgcagcggaataacatgtctccttccactcagatctctaactcttgtatcctttctatcgcagagtattatcaagatctgagtctgaatgtccttctctttgaattggattcttcacgatcatccaaactatgattgaggtaccacttgctgtgtgtgggcactactctatcactatggtgtttcgaaattatgaagaggaaaagagagagagagggggtcggctatagagagaaagtggaaggctcagtttttctgaaaggcaatctcttgaattactgaataacccttcttttagtgtgagccaacactttctatttataggcaactactaggtttaggt

SEQ ID NO: 293977 - DNA, 683 bp, Cannabis indica
tggacctagatagggatccggatatgaacctgtactcagacgaagacccagactgggatcgaaatgttggacctagatctagaccgagttcttgacctaaaccaaaacttggaccaccactcgggacatgaacttggacctggagccgaacctagacccagatcggcgtccagacctggacacaaacccggacacaaatttggacccgaactcaaacccatacctagaatcagacctaaagctagacccagacctggacccggaccaaaactcgaacccagaccaggatcagaagaaagaacttagacccagaattgaatcctgacgaagatcggtattggaacttgggactcgaacccaacctagaccaaaacccaggactggaacccacacccggagcctgatctggacctagactgaaatccggacccaaacccaaactcagaccaggactcgaactccgaccctaactcaaacccaaactcgaactcagaatcacaaatggaagtagaaccgaactaggactaggaccaagacaaagtcctaaacccaaacctgaacccagatcaaaaaccaaacagagacctaaacccgaacagagactaggacttgaacccgaacctagacttggacccaaacccaaacgaataaccgggacgttagaccaagaatcaggataggga

SEQ ID NO: 293978 - DNA, 726 bp, Cannabis indica
taaagaatcttataattaaagttgtcataaactataaaatttggatgagatcgacagtaaatcgaaatcgttcatatatttttttagtacaaagtttttcatctatttatctactactacaaagaaaggccttttatcccgatttttaagcctttttatcgtagtttttgctaaaataaaaatcgggatatatgccattgggataaaaggtatttaaaaaactggaatgacgggtactttttatccccgcttttatgaaaaaactggtataaaaagtacttttttatcccgcttttaatgaaaaactgggatataaagtacccctttatcccactttttagagagaagtgggataaaagggtacctttatcccacttttcatgaaaaaattgggataaaatgtaccattttatctcactttttataaaaaaaactgggtcaaaagggtacatttatcctacttttctaaaaaagtgggataaaagtcaccttaatttgatccattttgaaaatgtataggtttttatttttcttcgtttaattttattaatttcatttcatttattttttttcaataataataaatataatttttctctttataattatatagagtatgtataaaaaaaacttaatttaaaataaatgattaatatcatttttaataacaacaataataatttgtaagttcaattctaaataacactttacatattatgcataaat

SEQ ID NO: 293979 - DNA, 764 bp, Cannabis indica
aaacatataaacacatatactagccaaatatgtaaaaattcacatattcactagttcaaaggtatgtccaaagttcaccaaaaatttgcataatgacctataatgtgaatttttcaccatgtatagttcaagaatgtcaaaactcaactaatcaaaacttttattcatagaaatagtatgtgacataccaattaagcatgtatgcataagagagtgaacaagaaggatcaaaagcaagtcaattagccaaacacttcaaatttcattttctttttatctaggcatcttaatctcatcaaaataagtagaatgaataagaatgatattaccgattcccaaatttgttaatttaggttgtgttcaagaattgacacgctctttttctatgctttttgagacttgttggtaatgtaggaaattggcattcttctttaagcatcaacacccaagagccaactttggttcctctttattaatacctacaaaacaaacttatatctttctttttggtacccacatgactttgggtcctttgatgttagtctttaaaacctttggtatccaaatagccttaccaaaataggcattctttttcacatggcaataggatttagtatgaccatcttggttacaataagtgcaagttaagttcaaattactagatgatttgacaaagaaattcctaagaaatttttgtttcacactagtgttatatcctataccactttttgaaaaagcacatttttgactcccaagcatcattt

SEQ ID NO: 293980 - DNA, 529 bp, Cannabis indica
aaacatttatttttgacgcgtatcacttttgttctatttggattgtggaatgattggcttgacatggaatagaatttgtttgacatactctcttgaagcgaaattcttgttgatttttgtttggaaagtgatttaggcaagttttctttggatcgattgagcctttcaagcctacctaaaaagttttatcctagtatacccaaagttgagccttagcctatttcaaaaattttcaccacttaactaagctgaattcgttatctttaactactttcatcctcaacataccttattatgccataagcttttaatcaagtttggggggaatggagtgttgtaagtggggaataattttgagagtaagagattggaaaaaatagttgttatgtgatgtgcctctgttgtaaaaagaaagaagaaaaagaaaaaaaaaaaaaaaaaagtaaatgtgataatttcttcttgagaaccaattgtgaacaatgaggtaggcacataggaaaaaaatatgaaatctcttactatcttc

SEQ ID NO: 293981 - DNA, 516 bp, Cannabis indica
atgcacccaatcactaaagccttcatttattaattgtcctctaacaattcctgttttaaaaactttgcaacaaaaacaaaatactctatctaactcttttgaataaacaagccaatctctatcacacttctccccatttgataaaactctagtatacaaattagcagtgaatcgtctagaaaatttacctttaggaccagccataatagaacaatctctttttggacccttcatcactaataaatcaatcatttttggatcaagagcatcccaatttcttggatcaaatatgtcaagtaaatttttaaatgagtttgtttgctcagcattattattatcctctaaaattttattttcgagtgaattattcaaatgatcatcatcacaattttcataatcaaaattttgattttccatattatcattttcaataggcacatcacctttattttccacattattattttcaataggcatgtcacttctattttctacatcatcattttcactatgatt

SEQ ID NO: 293982 - DNA, 758 bp, Cannabis indica
aaagtattttcttgaaaaggaaatattaagcagattcgttctgtaatttaattataaaatattcattaaatacatagtattttctttatgtcaaaataaatatataaaaagacagtatttgttggttgacaaacatgcccttacctgtcctaataaattttacaataaatgcacaaaattcttccttaagtttccacgtgtatttacttaattatttatttatatttcatttttcaccgtctaaaaaaagaaaataaataataaataaaaaaggtttgattgacaaataaaaaataaataatttaaaataaaaagtttcaacatgtcaagtttttattggttagaagtgtacggttctcctcaactaattcactaattctcatatgtaaactttatattaaaaagtgattgacctacgttttttgtttcattattattaatattaatattaatcctctcaagtctcaatctaattaagattatcgtggcgtagtaataaaatatttgaattttatttttaatatattaaattattaaaaaatttctaaaaaacttacaaataattttaaataattacaatttgtataatcatagaaaaaaaattaaaattaatctaaaaaaattttaataaatatcgaactaaacacgtctcaattttcactaaaatactattttaatcttcattttataacgtatatttttttttgtaaattgattttatagcacatatttagtcataggaatatgaataaatagat

SEQ ID NO: 293983 - DNA, 594 bp, Cannabis indica
ttatttaattttgtgggggcttttctactattttggcctataattattatattaaaaaatttatatttaattttttaaaaggcaatatttttgttcgtggtggctatagcccccacatcaatcttaatgggtctgtccctggatctaagtcttgaattaagttttttaaaaaataaattgaaatcgggtcggatcagatccgatccaaaaaaaaattaggccgggcggagcggatatgatcaaagatccaataagtatccaaatgtttcggattagaggtgatccgtcgggtcggagctccaactcgctccaactacttttctgttaaatcctattcaaacataaagtatttgcggcataaatacactatgttttaaatttcatacacttatataccacatgttttttcttctgacggattaaaaacttaaagttacatttacattaccttcatcactacaagtctcttaaatcctattataagagattttttcaatattatacctaaaattgattttatttacaaaaataatttcaacaaatttatttgcacaaatacgaagaaacaagtaaagatataactataaatagtat

SEQ ID NO: 293984 - DNA, 575 bp, Cannabis indica
acctagaaggattcctataaatagatagtgatacacgcaaattgacagatgattgacaactttagttacactagcctttcagtcaaatttgagccttctcttctctctctctatttcgaatcctcctctctcgctttctcttcaattttcatcccttatagttatagagtacttgcccacacatagcaagtaagtactcaatcatagtgtgtaagactgtgaagaatccaacacctgaaggagaattggactcagatcttgataatactctgcgacaaaaaggaacaaggcttagagatctgagtggaaagagtcatttaattctgctgcaatcaatataaagttttttgaactttatatgtgtttaaattctattgttttagaaattcatgtttagtgtagaaaatagtgattcgaattgtgtattgatttcatagaataatacatatttatatacaaagttaggagacataaaagggaaactaccaaaaaataggaaactactaaatatctactaaacatctaattcttttacagctaatatctaacactacccctcaagctggaacatagat

SEQ ID NO: 293985 - DNA, 739 bp, Cannabis indica
cacagtcaaatgtaccagtcatacatgcagtttatgtttcagtcgcaacaattcgcaagattgttgaatatgatgacgcagtcgcctcagacgtctcatgtgtcagagcctcggatgccacaaatgtcacagatgccgcaaaatgttcagatgtcgacacaagggcagcaatatcagaacacatcgcagaacacaaccatggagcagacatctcaaatgatgccgacacatctaggacaacagacttctcagatgatgccgacacaacaagggcagcagacatctcaaatgatgccgacactacatgggcagcagacatctcagatgatgaccagctcgcaaatgccgccatactacccacagatgccggatgttcctgggtcggatgttcctcgagatgctagtgatgaggacgatgctactacaaacttcttttagaatatctattttaattttacgaactatcggtctaatatgtttgttaatattttatgaacactaatttatatttaggtaggcagtactataatgtttatgacttactcttattgtaatattagtgactctaaatattttcttttagttaaatgattttatatcttaattaattcaataattttatatattaattaattaaataattaaaaataattaaaatttaaattaataattttaatataataatatatataaataattaattacaaataattttaatataattatttatttatttttt

SEQ ID NO: 293986 - DNA, 478 bp, Cannabis indica
tttttgaaaacttacaaacaagcaaaaacacatactcctgcaacaaggttagctggatagttggaagtaggatttatttaattttaaataaataatttcgaaaaataaataattaaataaatattttattttcgaaaaataaaataaataataatattaatttattttttcgaaaaaaaaaaaaataaaattaaaatttaattttcgaaaaataaaaaaaataattaatttgaatttcgaaattaaaaaaatttaaaattaaatctataattttgaaaaattaggtttcaaccaacctaaatatcatttcaaaaatttgctaactacttttaaaattaaatgttattttataaataaaattaaataaaattagaaaagaggttaggaattatttggcattaaaataaatggaaaaatacaatttgaaacttctcattaagtggccgacaatggtgttgtagtgggccccacttgattt

SEQ ID NO: 293987 - DNA, 659 bp, Cannabis indica
tgcattgttgtaatattgtacgaaagaaaaatgtgtacgaatcgttttcatttatttattttcttaattaataaaatttgctatcattcaatcaagaagtgaccattgttagaaggcacgggcactcgtgtcttttttttttttatcatactattattggtataattaagtagtaagttccataactaaaaagataaattttaaagaataatattgctaaccaatcataaagtactacctataaaaatattggacatcattagtgtcaatacagtaaatacgaccaattggaagtaagtatgtcctcttaagtaaatttgaagataatgaaccacatgaaattctatttgtacaacttttacaacttttggaaccattctctatcttcttgaccaatcttttttggccaactaattctactctatgtttagtttggccaaaaaagattggtcaagagatagagaatggttccaaaaattgtaaaaggtgtacaaatagttttgttgagatctttctaagcaaagatgctctttctttgtaatcgaaatgtaaaagttgtggatcaatataaacgtttgatttaatctaaaaaaaaaaaaaaacttgaaaaacattagaacatattacactcatgtcggacttttttttttttttttttt

SEQ ID NO: 293988 - DNA, 1045 bp, Cannabis indica
gatcacaataagattataacaatggttaaatgagatagcatatctatatcgtggaacatataatatgctctatataagtctgagagtgcaattctaagttctaagagtggattcaacgaggaattaataagtagggatttacttagtaaattcggttcacttattggaagctcagcatatagatccatggtccccattctagttgagactatactgcttgtaagactcaataattgatttgtgattaatcaattataattctaaagttagactatgtctaatttgtgaattttcactaagcaggggtgaaattgtaaagaaaagagattctaggtttatttattaattaagagactttatatgtctaattaataattaaattaaatgacaatattatttaataatctattttagttattaaataattagttttggcatttaaatggttagaattggaaaattggcgtttttgagaaaatagaaataaaaattgtgaaaactgcaaaaaccaagtgaggcccattaacaccttggccggccacttaagcaggtttttccaattaatattttcattattttaatgccaaataattactaacctaaacctagtagttgcctataaatagaaagtgatggctcagtcaaataacaagttttcataacctttttctgtcagaaatttttttcagaaaactgagccttccctctctctctatagccgaaccaaccctctctcttttcctcttctaaatttcgaaacccttagtgatagagtagtgcccacacacagcaagtggtacctcaatcatagattggaagactgtgaaggatcacacacaaagagaaggacatttgtgagtagatctaagatccaggtaaaataaattccaacacatcttccctgctgatttcttaatacttgacatggaggaagatgagaatatgccaatcatcttgggaagaccatccctagaaacgggaagagcattaattgatgtacacaagggggagttaaagttgcgtgttcaaaaagaagaagagactt

SEQ ID NO: 293989 - DNA, 564 bp, Cannabis indica
tggcagccgcgactgcttgatccggagcaatgagctcgtttttttgatgtgagatccagttcatgatagcgcgaggctggaacttcttaggatccagattctggtcacgggtaacgagagtgataagccttttagcgtccgtatcgtcatagattgagaaattacgggaaatgcccagacggtcaatgtcggtgcgtagtattctcaccgcagcagaatggaaggttgacacccacatcggtttagcgcgatttcccaccaggtcaacgacgcgcgccttcatctcggccgccgctttattggtgaaggtgatcgccaaaatcgacccaggatgaacgcctcggtcccccaccaggtgagcgatgcgtcgcgtgagaactctcgtctttcccgagcctgcccccccgacaacgaggaccggcgaaccggcgtgcaacaccgcctcacgttgggcctcgttgagatcaaccagtaagtcagcaggagaggctgctccggccggtcacgggggcgataggtcggcaaaacccctggctcaacagagctgcgtctctcatgagccga

SEQ ID NO: 293990 - DNA, 757 bp, Cannabis indica
ataatttaaaatgctgaaggtcccctttacagaggcaccaattgaataactttcttggcttcatcaatatggcctcccaaataaggtttcaatcgttgaccattgactttgaaagtctctggtttttctcctttaacttctaccgcgccatatgggaaaacttgaaccacagtgaacggtcctgaccaccttgatttcaattttccaggaaaaagcttcaatctggaattatataatagaacttgttggccaggctggaactcttttcttgctaaatgtctatcatgccatcttttagttttctctttatagatcttggcattttcataagcctcgttacgaaactcatccatctcattaagttgtaacaacctcttttctcctgctgccgccaagtccatatttaatgtcttcatggcccagaatgctttgtgttctaattccactggaagatgacaagccttaccatagaccaaccgatagggagacattcctattggtgttttgaacgctgttctataagcccataatgcatcatccagttcttagcccaatcttttcttgaccgttgaaccgtcttctccagaattaatttaatctccctattggaaacttctgcttgcccattactctgaggatgataagggagtgcagttctatggcgtactccatatcttgcaagtagagcttcaaactgttgttgcaaaagtggctcccttcatcactaataattgctctaggcgttccaaatcgagtg

SEQ ID NO: 293991 - DNA, 727 bp, Cannabis indica
cctaaagcaagcacctagacaatggaatatcagatttgacaagttcatgtcaaggataaaattcaccaagagcaaatatgatccatgtgtttattttgacaaggaaacctaccttctattgtatgttgatgacatgctaatagtaggcaaggataaacacaaaatcagtgagttaaagtgccaactcaaaggtgaatttgagatgaaggatatgggagaagccaagaaaattcttggaatcgaaatcaggagaaagagacctggtttcatcatgctaacacagcagggatacttgaagaaagttctattgaagttcaacatgaatgaagccaagcctgtgatgacaccattggctcaacattttaagctcactaaggagcaggctccccaaactgaggaagaaagaagaagcatggatggcataccatatgcaaactgtgtaggctgcttgatgtatgccatggtatgcacaaggcctgacttggcctatgccatgagcatagtaagtcgatttgttgctgaccctggaaacctgcactgggatgcagtaaaatgggttatgaggtatgttaaaggatctctgaacatgggtttgatctacaaaactacagagaaaagtgaatgtgaggttgaaggatttgtcgattctgattatgctggatgcattgacacaaggagatcattgacagggttatatcttcacagctttaggtggatgcatcagctg

SEQ ID NO: 293992 - DNA, 645 bp, Cannabis indica
aggatagtatataatgataaggtacaccaaatgaattaggtgaaggtgaaagaatagttggtatagggttaggttggtttactatcagtgcccaaataatatatattcatgtgagtcctatatatctcataccctaattagtaatcattcttctatcaccaaaaaaaaaaagagcaatcattcttcctctctctctttcttttttttttttggtatatgataccatatatataaatattatgggatgtttttcttggtttccccatgaaatgattagtgggactttatgctctgctgatatgttacataattgtaccatctagtttgaatcatagaatagtattattattaagcactaacaatatcattttaagaatgacaacgatagtaaaatatgttatgttaaataatgtaagactctagtggtaagttatagtttaaaataaataaataaaaacaataaaatattaattaaaaaatttgataaaattaaagaataaatttaaatattaaccaataagatgctattatggaatttgaaacaataaatataaaataacttatattatactaaattaatattatattattatataactagttaaatagaaagaaaagaccactaaggctaacttagtagtgagg

SEQ ID NO: 293993 - DNA, 384 bp, Cannabis indica
caccgtcttactcactatgattgagtacttaacttgctatgtgcgggcatggcactctttcactaagggttcgaatatggtgaagaattatgaaggaggctaaaataactattgaaggtgtctctattctactagttgtcacagaatgaaaactagatttggtaggttgaatagtcaagttgacaagaggattagatgagagcatcatgttctttttatagtgtttaaactaggccttagggctgaattatatggattataaaagaatataatattgggaaaaattcacttaatgacttgctatgaaaaggagcaatctctagttacaattttgccactttttttcaagcacttattctgttggaaattattttaccaagatct

SEQ ID NO: 293994 - DNA, 585 bp, Cannabis indica
gtggtgaaactttttttttaaaataggctaaggctcaactttgggtaaactaaggataaaactttttaggtaggcttgaaaggctcaatcgatccaaagaaaacttgcctaaatcactttccaaacagaaatcaacaacagcttcgcttcaagagagtatgtcaaacaaattctattccatgtcaagccaatcattccacaatccaaatagaacaaaagtgatacgcgtcaaaaataaatgttttacatctaaatgaacaaccttctaacacacatccaatttaattcaaagagttatgactcaagcacacggttaagattccaatccattgcacaagtaaataacagtggttcaatcaatcttccaacttagctatcaacacatgacactaaagataacaaagactaactaaaaacgaaaaaaactgaaaaaaaaaaaaatactctccccccaaactaaagatgcacattgtccccaatgtgttaaaataaaattgtggttgagagatacttacttgagcggcacatcaacaagcggttgacgcccgtaataagcatcatgcaagacaacttgaaaattattgt

SEQ ID NO: 293995 - DNA, 953 bp, Cannabis indica
caaaggcagcacccggacggaggaaaaacgacagaaaagggggtacactccccaatacacccaatacacggagttgacggactcccaagaacgtgtgtactttgatactaggcaaaatacacactatcggagacctcctcccttgtacaaggatagttcccagagggaccccaacaagagatgcgagtatcataacgacattgggcacaacaccaatgaatgcaagaatctcaaagatgagatcgaaaacttaatccgattaggacacctctacgagtgggtcaagaatcgactgcctcatctcaacccgggtcaggcaactggagctttgccacagggaacaccagggggtgcagcaggagtattggctccagttgctcccactggagatgcccagcatatccccggtctgccgcccagacctaatgggagagtggccatgatctcaagaggaccccatatcggaggaactacccgcaaagaattgaagcagtatgcaggggccgtgaaacacggtgaggtttgggaggttactcaactcccagctcaaaggccccgactgatggatcaacccatcacattcacggaagaagacgccaagactgtgcattttccccaccatgacccgttggtcatagagacccccatcgccaataaagtggtggccagagtcttgattgacaacggaagttccgtgaatctacttttcaaggaggcctttaatgcaataggcctgacagaccgagacctctcaccaagtgggtcccagctcacagggtttaacggaacgacacttatcccaatggggaaagtaagacttccagtcaccttgtgcccggaaaccccccagagcacgttcaaatactgcactttcgtggtggtagactgcccgactgcgtacaacgcgatcctcggccgacaggccttggtagatttcggcgcagtcacatcca

SEQ ID NO: 293996 - DNA, 732 bp, Cannabis indica
acttatttttcatgaaatgtggaaataacctttttcattctgcataaacagtttaaatcctatgaattggagtaggttcttataaatcttttgcctcttttataggctacctgaaaagtttcctgaagactctcgcgtatttgttgttgaccccatgttagcaacaggtatgaatttaatggctccaaaatgatctctatattttgcaaaatagtttcttgcatattacagtatctgttttgaatcttaatttcttatgtgtataaactgggtttggtttttcaactatttcgtaatctctttgtattgactactaggtggcacaatagtggcagctctcaacttgataaaagaatgtggggttgagaacaatcaaattaaagtggtaacttatatacaacttcactatttctgtcaattttattttcgtagttaataattttggatctttagcttgatggagttggaactgagttgcatatatctatggctatatataagagtgtttattttttttttgctgaacagagtgttattttttttttagatattacaattaaattaaattcaccacatatctctcttatcttttattaatatttttttttatattttatattgattatataatataaaaaaatatatttctattactgttcttttttcaaaataataagatagaaaatatatttatgtttctttagattactatgacatcgttagttactaaaa

SEQ ID NO: 293997 - DNA, 522 bp, Cannabis indica
taaaataatttccaacaggatcttcattcgatcattgcctagaaaatctggagaaggtgctaatcagatgtgaaaagtcaaacttggttctgaattgggagaagtgccactttatggtgaaagaagggatagttctgggacacaaaatttcaaaagcagggatcgaggtggacaaggctaaagtgtcaacaatagagaatttgccacccccggtttctgtgaaaggagtaaggagtttcttgggccatgctggtttctatcgacgattcattaaagacttctcaaagatctctaaaccattgtccagcttacttgttaatggtgtacccttcgagtttggagatgaatgtttaaaggcgttccaagttcttaaagagaaactgatttcagcaccaatagttacttcaccgaattgggagttgcctttcgaattgatgtgtgatgcaagtgactatgcaattggagcggtcttgggtcaaagggttgacagggtgtttcacacaatctactatgctagtagaa

SEQ ID NO: 293998 - DNA, 577 bp, Cannabis indica
gtgaagaatccaaaatgaaaagaaggacattcgggctcagatcttagtgatactctgcgacagacaggatacaagtgttagagatctgagtggaaggagacatattattccgctgcacccagtgtaaggttttctaaacattatatgtgtttaatttcattgttttagtaattaatattaggatgttaatgaagcatacttgttagtaaatgtagatcttggtaaaacatattccaacagtatacattggattggaccgatattgaacttggataagatatcataaacttactgttatatctttctaggtcaatgtgactagttgatcttaggtctatggatcttaatcctgatatggttaggttcgactaagttgtattatttatattcttcaagttgtactaatggttctgccagatttttgcatcttgcgagcatggtagttcaattgagtgggagcgctgatgatagatatgaaatctaaaacttctataagtatttagaataaaacgatgaattctatcgagcttggctgaatagaaataaattattgaggcctcatttcagtgattatatt

SEQ ID NO: 293999 - DNA, 585 bp, Cannabis indica
gtatattgaaaactaactaatttttcgtttagtttctgagaaagtaagttaggaaattaatgtgaatttttgtactttgacacactaaacgattttccttgtgaaaaggtatttgtgataaatttgtctctgaatttaaaaattgcaaataaagtgttatcagattgtgtacttatttcacttctgtagtactgttgatgtgatctttgtatttataggtttgtccgtttgtgttcttattatattaatatatgtacatatatgaatgcgttgaatcatataattgcattattatgttctgcaatctatactatttttttttttgaaataacattgttgacaatttttctctctctgtcttgtttatttcaattttttcagagcttccgatccgaacatcttcatcaaaatgtctgggtaagttggttttttttttttgtgtggctaattgattattgtattgtattggcatctcctaagctctttatcatcgtaaagtacctttattttttttgcttctattatcaatataggcattgtctaaatgggtttaaattctaatttttggcttactgtaaattagta

SEQ ID NO: 294000 - DNA, 785 bp, Cannabis indica
acaatgctggtgcaggagccttggcagcgaaccccgtttttcatgctcgaacaaagcacatcgagatagatgtgcattatgttcgtgacaaggtactgcagaaacaactggaagtcaactacattccctcacatgatcaaatagctgattgccttaccaagggtctttcacattctcgattccaatttctcacaagcaaactcggggtcagatcatccccctttcgtttgagaggggctgttgagaaatagaaattgggcaccaggtgtcacaggactatccaatatcagcataacaacctttggttacaacagcaatccctatgaagattttatcaatcattagtgaccttttattgttagaatattccctgtaactttttgtaaaatgctgacagctgtacaaaggctaacgaccttattttccctcatgtgtaatactctgtgtataaatacaaagcatagcagctctgtttcattgagctgagaaataccatttacaaatcctctgtatttgcttgtttttgacttataatatcaacatttttttcgaaagaaaaaaaaaagacaagagttaattttcacgtcatattaatcgaagatagtattatatatagatatgtacatttatataaattaagctagtattgaagacattaactgaggtataggttacagaaatcagatatattgcgcattgatggtctaggttgaaattattaactaacgtaaaatatttttatattacttaattttttaatttttttttttaaatttttatttgtt

SEQ ID NO: 294001 - DNA, 590 bp, Cannabis indica
attaactaaaaatcaattaactgagtcttacaagaagtttgtctcaactagtatgggcaccatgtgcctatataaccgagcttccaataagtagatctagaatttacaaagtaaattctctaacttattaactcctccttgcaccactatagatttggaattacactctcaattatatagaacgctctatatgttccacgctatagatacgatatgagttatccattgttataatcctaataatcaatgatcctctatggatgatttacattgagtagggacaaaattaccattacacccttcaatgtttttatcgttaaaacacttagcaacctgtaaatgatatttcagtgaactaatataatcactaaaatgagtgcctatcatttatctctatttagccaagctcaaaggaaataatcgtttcacttctatgtccaaatagaagctatagatttcgtatctatgattagcccttcctctcaattgaactaccatgtccttaatctatatatcacgagaagatccattggtcgactttaacgatagattgaagaaaacaaaaaaatacaattgaactagaacataac

SEQ ID NO: 294002 - DNA, 525 bp, Cannabis indica
ctcaggagaggcctgacacatcccggagaggcttcatgctatgcgagcttccgggagtaccttgtactccgggtgcctcctccaggacctatgcccagggtgcttccttgtggcgtacaaagactcatcaaatatttacaagttatctgatccacgtgtccctattcgactggtccacgtattttgggcaaattcgggggcaacaataataataatcaatatatatatatatatatatatatatatatatataaaggtaaggtttaaggtagttatgtggcacacttaaccttcttatttttctaatacttattttctattttctaatttcttttttaaaaaaattagtatgtaattaataactagcactaaattaatacttactaattaaaagaaatcaaaccaaaaacctatagtattctaaaataattaccatgtatactaaattaaaagaaatcatcaaaaaaatcaaactaagaacttatagtattctaaaataattaccacctattttattattataaa

SEQ ID NO: 294003 - DNA, 514 bp, Cannabis indica
tatatataatactatatattcaaaatatattatatatatatgatagtatatatataggagagtttagaggagaataagagaacaatataaaacttgagaatagaataaaataagaaaaaagaacaaacacccaaagtggagatggggatcaccaaaagcttgaacaaagtttttacacctttgcccaagaagattatttccccctctattaaacacttagggctttgtgaaaatacttctaggaattatcaagccttagaactctctagctttgtgtttgaaagataaaagagaagagtgtatctcaaagggtaaaccaagacctctatttatttaagatcacaaactttgaaattcaaacaccacacacccaatggttgttaccattgtttaatggggtgtaaatgggattaaatgggtgctttggaggttatgggagttgttaaaagtcatcccaatagcagaaaaacgttttactattaatgctgaaaaaaatagtaactagttactagtt

SEQ ID NO: 294004 - DNA, 785 bp, Cannabis indica
catactttgaactagtgaatatgtgaatttttacatatttggctagtatatgtgtttatatgtttgaacatgtccaaatgagtgtatttagcatgcctaaaggtttttcttgattgaaatatactttaaacaaaattttggtatgtcatttgcttattttcaactttttaaggccataatgggtgaaattagccaaaatttcatattgttgagaaaattgttgttttgaaagcttgtacatctctaaatactcatatataaactgtctcaaaaagaatttttcaaaaataatgctcaaatcttgattttggtactatcttgcataattttgactttttaagacctaaaagagtgtttttcaccaaacgtgctcaattttcattatttttcaattccgtaagtttgtacacctcacatttgatatttttgacctactggaaaaagaatttttcaatttggttgcatagaactcatttttggtagatttctagtttttaagcaaatcgaaaagcttaccgaaaagttaggatttttgacttttttctgattttcttgtttgagcatgtttgttttatcatatatcagctgttagaaaagattttgcatgaaaattttgcataaaatcaatttttagtaagtaagttgcttaaaatgaccttatatgaccaaaacgagtaaaacttgccaaaatctctcattttttgaagctttttctatttttccagcttgtacacttcatattaatcatgtttaagctgatacaaaaagaatttttcaaaaaggat

SEQ ID NO: 294005 - DNA, 795 bp, Cannabis indica
atatgtgattaatctgaaattaatttgagaatatttgtgatgagattgactaaattgcccttgtgcatatgtgagcttgatttttagccttaggggcaaaatggtcttttgacctattgatttatattagataaaagaaggaatttttgaggaaagaaaatttattttttggtgtgttccccttcaacttgaaccctctctctctctcaccctctttgatattcaattttttgatttggtggaagttgcttgatttggagcttgatatttgaagatttttgagctttgctttgattggaattgaggtagtttcctttactgagtttgattgaagttcttgttgaattttaattgtggtaaaagcatgtttttggttttattgttcttgagtttgcatgttcaatgaattggtgttgttttgatgaatttaggtgtgaaattgatagttattgttgtgggttagattgttgggtttggatgagatgttttgagtattttctaggttggaaatgatgttttaagtagtgttatgctgctggaaaaattatgaggttgaaggatttaaagctcaagtctttgagcttgaagagttgtgtgttaagcatgattttgggttttttgtgcaatttgaattttgagagttgtgttgttgttgttagctctctattgtgatgatttttatctgtaagaagttaattttgggtatggtatgattgaggttcgaatttatggaaaaattggcatgtttaggccttaaaaatggagtttttgggtgttctgaacccagtcgtcgcg

SEQ ID NO: 294006 - DNA, 291 bp, Cannabis indica
ccctaaccctattaaagaatagtataaaaggaaggctatagtctcatcatccaactaatgcaaaatatgccactaatgcctctaaagctaaaaacctagatgagacctcttccttcttctttcttcttcaatttgaaacactaagcctttcttcacactaaataaattcagccattagtgatagagtgagtgcccacacacatcaagtgatatctcaatcatagtgtggaagactatgaagaatccaatcaacaagaaggagaatcaggattaaagaaggagagaaagaga

SEQ ID NO: 294007 - DNA, 729 bp, Cannabis indica
aatctggaatcccgatcacttataatgtcttcgggacccaaagtacttgaccacattcttcatgatcagttctgctgccacatctgctggacacgcatgaggcgcaggaatgaatatgccgtatttcgaaaatcgatccaccaccaccaggatagaccgaaaccctttcacttctggaaatcccacaatgaaatccatgcttattgactgccatggtttctctgggattggcagaggttgaagcaacccagcttcttgccttctttctgtcttgtcttgttgacacacaaggcatgtcctcacatacacttctatgtcttgctccattttcggccaatagtaagactttgacagcaaagctagcatcctagccacacccgggtgaccagcccacttaggatcgtgggtttctttaagtaactctcttctcaaagttccactgttcggtacaaacaacctgccacccttggcatagagaagaccatcttcttcccagtaccgcaccaattctccctttcttgcttcctcaagaagcttcttgtaaccaggatcgagcaaggactgctccctcacccggtcgaagaaagttgaactcacctgagtcaacgcaccaacaaaaacttgtacatcctttcggctaagtgcatcagccacttgattctgcttccccggtctatgaacccacacaaaatcaaattcagccaaatactcttgccaacgagcttgctt

SEQ ID NO: 294008 - DNA, 841 bp, Cannabis indica
tttagtcaaaaatatatatatatatatatatatatataaggaactccttaggtgagagtattactttagctctcacttataaaagtattttttttagtattttaattggttaaataatggaagtgcatataattaaaatagattattgtacatacaaatatatatactgttagttatattagcatttttaaaattgaatttttgttttttaatcaaattatgaaaatgacttttgaaagtgtgtttggtgaattttttttatataaaaaagtatgttaggtaactgaattttattttctattttttttataatttaaaatcaaaattttgatgtttttaaaatttttataagctttttttttctctcccatatttttctctcgtcttcttcgtatgtctgcgatttcgtattgtagttgttaattttaacctcaaatattggtagcaaaaatttgttgtctttgtttactaaatataaatctaagcaaataccaaatgtgaaattacttagcaaatcattatatttatcatttaaaattagtttataagctatattctgataattatattgtgacaaatcataattctcatgagaaaactaaagtttatcctcatggagttgtagatatttgtaatgagcaatctggaagagaatttaaagtgaatgagcagcgtctaaaggattatttgttagactaagtgtgactttgtaatatgccacataagcaactgttttaactaactctttcagttagttaaaaccgttactctaatgtcggtttctctagtacctaatgttagctataaataccatgtaaatttgcaatgtagaaatctaaat

SEQ ID NO: 294009 - DNA, 634 bp, Cannabis indica
tataccttaaagggcatttttgtcatttgaaaggaataagagataggtggctttttgggtgattgacacctagcaaagatattttcagcaagggaaaatggattttccttaagctttttcccatttagagaaaatagaagaaaatagaaaaatcaacataaacctttcctctctctttcttgctttcggctggggaaaatcaaaggcaaaccagatttcttcctttcatttccttggattttcagcaaggattttagctattggaagtgaggtaaagccctagactaatggttatttattttcaagcttttaagttaggttgaaatggtgttttggtttgataggggctgttaggtttgtttatgcttagggttcgaattgtataagttatttgagttaaattaagttcctagcagctaatattgttgattgggttgagctttgtgcaaccttgagctttgaatgtaaagctttgttcattaatggcaacttgagttgtgatggtttgttctgtgaattgctgcctggaaatcattgtatatgcattgtataggtatactggagagtttggtaaagtttgggattgaattgaatcaagggggatgatttttggttcccagcagtagaaccggaa

SEQ ID NO: 294010 - DNA, 764 bp, Cannabis indica
ctgtcattctatacaacacatactaattttatacttatagttttagttattaatcactaattataagttttaatgcatattttttaattataatgttattattaatcaattttttaaaactatttaatttgaattaatgatcgttaatgatatttgttataagaatttacgtattggaatacattaaaatattgagtgaaatataacatttctttttttttttttttagttttgttgttttttttttatattatttttatgttattttatatagtaatacagtaaaaatatatataaaaaaataaacgtaaaaatataaaaaatttattaaaaataatactttacctaattattccatttatttatttattatacaatctttcttaaaaataaaataaaagttatcaaacattgtgttagtggagagcctccttttatattattctaaagagaaattttatgttacagcaacacacaagaataccccaaacaagagtattcagtttaccaataatcaccacaagaacaagatccattcttgaaatggtggaagcgatgcatgtcacggacaatgatttctcgtccagtaacgagcgatatatattttgtggccttatgacagtcaccacaaactcttagattcttcctaatgtgtaatgttgtgccaggactggtattaattagtccaaatgaaatagccagcttctcactgtggctattgagcaactgtttttgaacatcatcttcaacatcatgaattgaat

SEQ ID NO: 294011 - DNA, 316 bp, Cannabis indica
ccgccaaaatttgagttttggggttaattgtaagcaaagtgattaggggtttgccgcaattaacccgtagaaaaaaataaaagaatctatttatctttgtgtcataaattttatttcattaaaaatacaaaaaataaaaggtttctctaatccaactagagtattctcacaagatgaaaaattgacagagagtactccctccgtctctatactccattaaggattttaatacctcatccgaacgtatttcctatcagggatggagtgaggaatctcctaataaaaaataaaatttataataaaaaattaaaaatat

SEQ ID NO: 294012 - DNA, 654 bp, Cannabis indica
atatatatatataaacttctttgataaaataaattgagtctcaaagtaagtcttatattataatttcctttttcaataattctccatgaaaaagacttcaaatcaatcacacacagacaatattttatggtggtatcagataccattccaagtctttatctactttattatgaccactctcaattgcatatatgccaaatcaattcatgggattctatccaacaattccttatctagataaatatcacaatgttatcacaaagataattccaagttatatttggatcctttccttttatcctttaaaatcacaaaaaaattattctctattttatctcacacatttaggggtgtttgttttgactattgagttgcctaaagattttggaaaggttgggatagaaaggcatgtgaaactcaagttcacaaaagtattgatattagggcttttttatgtaataattccttgatatgatctattaaaaattctatgggatccaccttattctcaccaaaaaactgaaattgaccatcaaactaactagactgtaaggtcggtttcagttttgttttttttaacttggcggccggtttcggtttttaaacaaaaatggttaaatcagaaaattatcaaaactaccgaaaactgtcaaa

SEQ ID NO: 294013 - DNA, 524 bp, Cannabis indica
gagtatgttaactccgtgtaatgggtgtattgcggagtgtatccccttttttgtcacttctcctccgtccgggtgctgcccttggaggatcgtttactcctcgagccctgggaaggacctgccaggctggcggttggagcagagtgcgagggagcttgtccatatatcccagagggatttccaaaatgggacgatgcgggggccaaggcctggccctgactgtatccgggagtagcagagaattgtatgccgctcatcggtggagccgcggtcgggacagtacccgacagcagggctcctggcatatacccggctatcccggtgggatagtatcctccataggccactatttgggcctcttcaaggttgatgtatttttggactcttttctggaagtcttgaaggtttgcggctcctttctgttgtaattcgttccagaatggagtccctatacggatgcctgcctggagaagggcaaggtgttgcccgtcatcaactttcttggtcttcgaggcttcctctcg

SEQ ID NO: 294014 - DNA, 558 bp, Cannabis indica
ataatctctttccaccttcggttgatctccaacctctttctgtagaatccgcctttggaaatgtcgtacagcgtctagctttattcaacaacactgattcagatgaaaaacgttagtttctttgttcttttttttttcttttttgatcaagaaagttctttattattcacaaacacaatacaaacaagcctcaaacgaccaagacaaaaacaaaatctggttttcttttttctttttgattttccaaacagatctgcataaatttcttgtacttaattccttaaatttttggtagtaaatgtgggatatttatatctgtcgttcttcattatttatttgtaataaatagaaagtagcaacagactaacaaaaagcttcaatagaggaccgtgggagtacatagcagaaaatgttttaccagacattatttcttcatttaaatgagaatgggaaccaaccaagaatttgacgatttgaacaaaataatgttttggtttttgtgagcttagaaagaagagtgagaaagtgaaaatgtaaaaacgagggaacgttagagag

SEQ ID NO: 294015 - DNA, 665 bp, Cannabis indica
agcttcgattgtccacgtcaaaacagatccttggggtcctataagcttaaacaaatgttctttaaacccagaaacggttcaagtacgtttaaattcgatattgctcaagaacatgcttgaatgtgcatgaaaatggtggatttcgaaacctctgctcttagcccgtttggtcatgacctttagcttccttagatcgtagaaaagctactcaaaacgatcaaacaaacccagaaactctctaagtgtttcaagatcaaaatttctctttctctctctaagtttcatgtaaatctatatcggtctctctcgctctctttccaggacttcttcacctacgaatttggtctttaggcttcaaaataatcgtataaaagatcgtaacaaactcattgtggaacgattcatagttccacaattatcgggattttgttacgatgttactaatacttattataataataaaatatgtaacaattacaccattctataacaatattattaatattactatattatatctctaataaaatgacaacaataatataacaaatatattacaccataatataaaataaattcacataattattattgttatacccacaataataatatgcacaaaataaataattaaattatcacaagtatttaattatttactcaac

SEQ ID NO: 294016 - DNA, 655 bp, Cannabis indica
caaataaaaagattttgatcaacaaattaggagtaaacaacgatggcgacggagaagaaaaggttgtactagaggataattggatgcagcaacaatgacggtgaagaagcagtgacgacggcggtggagacgcaacgacaacagcgacaactacaatgttagagttattttgtgccatggagatttgacaaacttctctgtattatttctattgcagacgccttcaacatgtctggaaaaatactttgagttttacaagcacacttcaagtgcctacaaaattaatgtcactttcacacacaattgcagtcgaattttcaattcacgtctatcttgacaattatactgggacgcattaactataatgcgcttacaaaagaatagattcttatagtggtttcaagtcgtactttcgaaactcgaaacagtgacctccgacccttactataacgttaaaagacttcctttggtcgtacataagtggtctcaaacatccacttctacccaaacttgaaatccactcgaagaacaaagaaaaactacgatatatcgtatacaccgtactctctctctctacttacgatatcactaatgttcattgggcacaatgatgaaagttaggtttagctggtacatcattagcaactacatttgc

SEQ ID NO: 294017 - DNA, 563 bp, Cannabis indica
atgaaaaaaaaattagactaaataatttttctgaatgtcgaaataaattaagggtgcatcaatacatcccttttaagggggtgcattgtagaatcacctttaaaattatataggggtttagccgcaaatttctctattttttcaatttatgttcacaataaattttagcttatgattagtatttagtggccaataaaaaattgagttgatgacattatgttatgagtgttgatgtacattgtcactagtaataatacatatagaaaattctcataccacatcgtcaaggttacaaattttaaaagagaatctcaagtataaacagggacggagggactttagcccatatgtgggctaaagccctcactcaaatataaacatcaaattttttatatgtagatatatacatatattaatttactttgctcaatttattaaactccaattcacaaaagccctcactcaatatcttaatcatgattcatgagcctactcttattctaatcaagcccattttaaaagtagtccaatacaaaataataaaaaaaataataacttattaa

SEQ ID NO: 294018 - DNA, 620 bp, Cannabis indica
agttcctggtaaaataacttccaacatcaacgcctgcaaaaagtgaatcgactgcaatgataaagatcattaaatacgccttcacgcacccgaagcacgtgccaggaaaccgaggagtcaaccggaggcatctgaacaagccttgttcattttttaaataaacaaggcttgggggtaaatgttgcccctgattttgcccaatatacgtggaccaaccagacagggacacgtggaccaaaagatcttaacatttaaattaattgctaagtctttatgaagaaaggcagcatccgggacctgcctcccggagaaggcatacgaagtcccctatgctcccagaggcctaagtagcatcaaagcatctccgcgaggtgtcaggcttcccctgagcagtcatctcgcatttaatgccgcatgggaggaaacgtgttgggactaccacacgcaataaagtctgacgacacaacccccgatctgcacctacagggctatgatcacttaagtctattgacggctacactgtgaagagtcacgtcagtcaaaaggcaataaggacattccacataaaagccctacagcacctagggatttgaccatgcattacccatggtatattcatt

SEQ ID NO: 294019 - DNA, 612 bp, Cannabis indica
tagttttgtaaggctaacatatggctagtttttagtttttgtaaagttattatatgactaggtttgattttgtaaggttagtttagtctaataataacacatcaaatgtagtgtagtcaccgtcagcaatagataagttctagtatttacattagagaattttgtgactatttacataaaatttcatattttattttatttttttgtaagggaaatttcattttttttattaaatatttattatgtattaattttttctctttattttgtaggtgttctactggtggatcggaagtgacaactctcagttttgaggttttcttttctgatattatggttttattgtctagttctcctggggtatctctgcatgcccttaggatagacaatgaactgttatagatggaagaaaatcctcctctgcttgcgtaactttgttacctttgttattttaacctgtatcggtttcctttaaaaaaaaaataataaagtattatttaattacaatgaacattctgtgttatatattttagcattttttttaaaaataataataaaaaaatatataatttttttacatacatatagacaatggcagacccaggatttaaa

SEQ ID NO: 294020 - DNA, 813 bp, Cannabis indica
atttttttttaattgaggatattgtcttatatagaataaataataaaatattaagtcatatataagaatacgaactattctacttattactaatgaataaataataaaatattgagtcatatataaaaatatgctctactcatattttgttccttttatagttgtctctaaaaagtgatgaatatgtatgtgggtggtaatgacatatgtcaatgatgcatttatcttcttagtaatcatcatggattggtgggacacaagacaaatagttattagaatttatgaagaatggaatattttgtagaaagtatagaaatggttttggggcttcattaaacctttttttattgatttaatcatactaaataaaacatatttaatgcaagacccccttgcttatgtgctgatctcccttcagttgaccagtatgaactcctttcaggttcagctgattcaccgtcttttttcaacaccttgaagatccatgaatatcaatctgcaacaaaaaagataacaaagtgtatttttccctaacaaaataagaatcaagtaatgattttatcaaaggattggagagccagttagaaaacagttaaaccagtttatatatcgctaactcaactactaaactgactcaaccaataaaaccactaaagtctgacgtagcaaaatatgcaacaaaaaaaatattcacacagatgcaactaaataggatatagatgaactattctataccaagaaatgaacaaccacataatttgccacacgacaaaacatgacacttacacaagattttgtgactaaagagatgta

SEQ ID NO: 294021 - DNA, 574 bp, Cannabis indica
aaatgagtttgaagctcaaatcctctctttgtaggttgtcttcttctccttcttctcaattttcttcttctcttctttgtactctcttcttttttcctttcttttctttgtacttctctttttctgctgtaattttcgtaccctatattcaaagtgcagccaccatatctattttatcctccttctctctttgctccccaattagggtactaaagtttaccctaattggaaatccaagtcatggtccacttgtccttcattttccacctatttgttgggtcattagccacatttcgccacctcagctcgtttttctcttcattaatgccagctggacgttctgccaaaatacacttactgggctgacaaattgctacgcgatgattatagcaatgctagtcagcaattagcatttttctgctccttttcttccttgtcccaaacatttccaaatacctattcttgtattttttctgcttaatacattaaaaaaaaaaaaacaaacaacaacaacaacataagtttatttaacacttactaacacacacagacttccatttattacaaagacaca

SEQ ID NO: 294022 - DNA, 523 bp, Cannabis indica
tctcccatgtcgatatcgatgcctctggtaattgggtgaaccaatcatgggcattctcctcgagtgtggccgcgagaatgcgacacttcgcgagttgcggcacctggtccacttccattatggtgttaaacttttctaggtagtctaacgggttagaagtacctttatatttgagggattcggataaacgaaacccctttggaagttgggcctgtcgcacttctgcggtaaaaggcgaggtgccgtgcagcttgtatatgggcttacgctgctgctcgagcatcttcaaagcttgcagaagcatactttggtcgattcctcctgtcgcaggaggtggagttgctacaacagtggggctcgcagccactgcggcaaggttcgaagggatattaatcccagtggtcgcgatcggcgcgataggcgggttgttaactgtgttgacaccctgatcgcccgtatggggatcatggagcgtctccgtgttatgcgggccgcgggagcgcgccctaaagactgcgttgag

SEQ ID NO: 294023 - DNA, 594 bp, Cannabis indica
acatgatgttgatggataagtatattgcactttaacaaatttcataggaatcactatcactatataaaagaaaaaagtgacgataggaattaaagatgaccacatatatatatatatatttatatatatatatatatatatatatattagcagcatatataattgatttgcatgggaggtattcagtgacgtaagctagctagggttaattcaattgtattatatacatggggatatatatatacaatacaacacacgtgatgatcacatgacaactatcaaaattttattatagcaatgcttacatatttaatgacctaataaattattatataacatattaatacatttaattagtttattaaaggctaattatagtttttgttttaattttaactatatatcaaattatatttatttttttaaattattatgattattagatttaatttttttttttactaaattttcatttcaatttactacttcagtaattatttatgtattaaatgatactctacagaatttgatatttatcaaattatgcccataaattttcatctatgtaaagtttttaaatttaataattttaat

SEQ ID NO: 294024 - DNA, 583 bp, Cannabis indica
aaatatatataaaaatattttttttccttattagaaatttataaatcatatcttaaatatttaaataacatagatatttttgtagagatttgaatattgcttaatttgagatattttgacatataattatggtaattattattcatttattattttattcctaaaataataattatctaaccaaatctattttaaaattggtttattttattaaattataagatctgaaagtgatattgaagattctttcctttcaaatcattgatcttattagatatttaatttaatttgattcaaataaacctagatattttaaaattagtttcctttatttggttagtttaagaataataatttaattatattaatatcttattttcacatctgttacatggacaatgtttgtttatttatattgtttattcaaaaactctttttaacaaacctattatttatctgatctaaattgctatgattaacttgttgacagatccaatgatctgattttaatcatagtccaattgacgatagatcttataaataatttgtaacaggtaaattttgtacttctttcatctgtgta

SEQ ID NO: 294025 - DNA, 349 bp, Cannabis indica
aatctcctaagttggaaaaataataatctttcatatggtctccccaccgggtcgagggcatcctaaacctatgaagacgctcatcaaaccctacaggcctaagactggcatattcgccaacggagggaacgtaatgtactgctaaaggagacttaccagaatcggaagtactggcatcaggagccccggtgttcggcacctgaaccgaaggctttggcctgggagccctcctctcagccgggctcccaatgcgaaggaacttccaaacaatcacctaacttctcctctcgaccgggctccccacgcgaaggggcctcccggatgctgcctgggccttggataagccttc

SEQ ID NO: 294026 - DNA, 473 bp, Cannabis indica
gcctttctggatttaacgagcatatcatccacgtacacctccatatttctgccgatctggtctttaaacatcttgtttaccaatccttggtatgtagctccagcattatttagaccaaacgacatgactttgttgcagtagagacccatatctgttcggaaacttgtatgttcttggtctggcagatgcatttgatcttattgtagcctgaataagcatccatgaagctttgaatttcttgcccggctattgcatctacgagctgatcgatccttggaagcggaaaatagtcttttgggcatgctttgttgaggtctgtgaaatcaatacagactcgccatttcttattcggcttgggcacgagtacggggttcacgaaccaagccgggtaaaaagcttcaattatgaagttgttgttgcggagcttttcaacttcatctttcagggctactgctcgttctttatccagcagt

SEQ ID NO: 294027 - DNA, 568 bp, Cannabis indica
tgatttaagaaaaactcatacacattaattttgtgtaaatttcgaaagttataacccattttacaatcaaacccctaaataaagtgggttaaactttaaattaagttgaaaattgtaatttttatttcttaggagattgtttgaaattatggttgagatgattgaattgaaccacaatcattaataaaggaaggtcgttggaagttatataattatttgtgtttttatttatttattattatttgcaaacaaatatatataatgatgtgattgataacaattaattaattctttatatttaatataaaaataacaaaaatgtaataaaagaaattcacgttaaataaataaactttataaaggcatttattttaattatttttattttatataaaatatatatctttaatttataattttttattattattttttgtttttatattcttaaaaaaatatctatattaaattaaaataaatattttttaaaatacgagataaaacaatattaagaataatttttaaaattaatttaaatttatttattttaatattagagtgtactcat

SEQ ID NO: 294028 - DNA, 443 bp, Cannabis indica
ttcagcgggataccttatagggcttggttctctagatttcagcttttgggtacttggcgaggatacgtggattcctgctgcctccatggctttttgcatggccagcatcacctcttgcatcttttggttttgcaccttttgggctgcgatttcagcttcatgatcgacagccttttgccttaagagtaccaattctgagtagctgccttcgtcgtaggcgtactcatcgaggtttccctcgtagtcgtcatcagggattccttcttcttcctcggaacccacggttgctcttgaggccacgtcctcgccatttagatcttgaccatcttgaagagggcgaggttgacgtgtgcttcgagtctccaccattgttatgttgttgtaacgcagtgcgtgcttacagacgctttcttcagctctcaatgaaagcaccaaaattttga

SEQ ID NO: 294029 - DNA, 756 bp, Cannabis indica
ccaaagccccatcaaataaagagcacgaaaactgtgaatgcctattattagaccatacaaaaaacgacacttaaagaatagaagaacagagcttacgacagcggcggcggtgtcgtcgcagctggtttcaatacccagaacgatgagatcgtcttgggccttcataaatggagtcttgggagctatagaggtggaattttcggatgttaagcttgagcaataggccgtgaaggaattgagtgaagaaggggaagaagaagaagtagtcggaggtagcaacttggagcttcggttcagcaggagaggtttccatgatctatgaaaaataaaggaaggttttgggaagagatttaggcgcgaaaatgttgatgaaagcgccatactcacgacgaagataaagattaaccaagttatggtcctgcacaaccaaaacgaaggggacgaacaaaaaacggccaaaaaaaactttaaaagctcgaaacgttttcattatgaaaatgaaccgtttttcgcgtagtggtgtttctactgtttgggcctctcagtaaagataagcccagttgtaactagtattgaagcacagccaagattttacaagacaattttgtaggggatagtatactaatttttaccatttttctagcagtattgtttatttttatactgttttttttataagtttcatactgcagtatattgttgttaagtttttactgttgttctattggtgttttttagttattctactgttatttt

SEQ ID NO: 294030 - DNA, 649 bp, Cannabis indica
gtttcaattaaatgcaatattatttggcataattttttaaaaaaaaaatacaaaaataacaaaaaaattacaataggttgtataaaattttaaatattcttacataaaatataattttttgatgtaattttatgttgtactcttcttattttattgttgattttttattatttatttatattattttgttttcttattactttcataatatttttgcgtctgtaaaaatatagaaaaacactttgaatataaagaaaaatttacatggtttactaaattttcctattttatttcaaaaatactgctacacgcgtatttttacttttatactgtgtatgaatttattgttttatacggagtatactatcattggtactaattttattaatactttgtggcttacacgtgtcttcaccgaattttgccacttcattttttgaatttttttccttcaaaaaaagctttgatgtaacgtgggtgtcactatttgacagtgtgctttcttttggggttttgatttattttaaaattatttataaatatttcaaaaaaaaagcttttgatttgacatggtgtcactatttgtgcacagtgtcctttttttggggttttaatttaatttaaaaataatttcaatatatttttaaaa

SEQ ID NO: 294031 - DNA, 87 bp, Cannabis indica
gccgaataaatctaacttaaccctaggtggtttcctataaagaggtagtgacggctttcaggaaaaagatgatgcatctcattcctt

SEQ ID NO: 294032 - DNA, 706 bp, Cannabis indica
aacttttgcaaaagatccaaaataatatatatcctttttaaaataatttacatattatatatgatgatcactaatgtattattcttgtatattgacatatttattttgtaatttgcattataattaaaatataaaattaaattatataaatttttattataaatatttataaaaaaaattaaagaaacaaaaatataaaaaaaaaaaaaacaaaaaagaagacgggcattacacctactaaactcattagtaacataaaatgttatattataaaatgtttaaagtgagaggtttttacatcaaaatttctaattttttttttattgtgggattgaaatttttaaaaaaaaatactgtgtaagtttcatactgtgtcctgtgttaagtttttactgttattttacgattattttttttttttatttattttactgttatttttaattgttttgttttgttattttacgttgttttaggttattttatagaaaaaaagtatttttgtaaaaaattccgtatgtaaaattgtaaatttttgttcaaaaactaatatttttataaaaacccctaaaataattggtgttgatcattgcttgtctcgctcaaaatgaaagaactcaaacataattcattatgagacgtgtcttttcaataattcaatgaaatatgatcttattttattatatgtttatatataagaataatt

SEQ ID NO: 294033 - DNA, 1140 bp, Cannabis indica
aaaaattttctatatatactaggttaatgttacgttcaatacacgtataaataagttttctttttaattaggttcaattaggtgatttcaagtgtaatatatgtatgtttattttttttaaattaggtactgtattttcttattaatttttgaaatggggtttgaaattttgatatttgagaatttttttagctattgtggttacactgtcctttggatgtgagtatatatgcgtattttatatgtacaataaaattcaagtgagatatcatagtgaatcattgtatggtcgattgagtgaaattagaattatctcttattttaatttaaagttaaactaataaagttaaaaatatgattaaaatatctataatattttaaatatttaaatttaaattaaattttattatataaaatatctacataatttttctttttattttaattcaaagttaaactaataaaattaaaaatatgattaaaaatatctacaatattttagatatattaaattatgtatataaaatatctacataattctttattttaaatatataataaaattaaaatttctttatgtagagtatatttctacataattttatttaaatgtaataatatttaaaattaataaaaaaaatgttactgttaaataatagtatattttattaaaattaacgtaaaaaattagaaaaataacgttaaacaaagaattatgttacacagccacaatttatattgaacagatatatgtattcaataaatcatgaaattttatcactaacaattagttaaaataatagtctgcaattgaattgggacatctctcatgttggggacacgaacaagattaaaattagaaaaataaactgaataatcagttgtctaatttccagattgtttgacaaaaacattaaaataaatcagatgaaaatgattgcaacatcacaattaaccttaagaacacctatattttgtttcacccactgctcagataatacaacagtagaaactgttgtagcatgttcaacctcgtagcatgagcactcaactattgtgtaaggtatgcaattgtactactaattaacaaccctttcagttggaaaaaatttgttattgctaaccactaacagcgatgta

SEQ ID NO: 294034 - DNA, 635 bp, Cannabis indica
tcacaggatatgctttcacagttttgggaggctatgtaagctggaaatccaaccttcaaaaggttgtggctctctcatcccctgaagttgagtatatggcagtaactgaggctgtcaaagaagccatttggctcaaaggactggggtttaacacagatgatgtcactgtgtactgtgataaccagagtgctctgcacttaatgagaaaccccatgtttcatgagagatccaaacacatagacatcaaacttcattttatcagggatgttgttgcaaggaaagaagtaaccatgaagaaaatcaatactgcacacaaccctgctgacatgctaaccaagtgtgtcactcaagccaagttcagacattgtctaaacttgctgaatgttaatggctactgaacacttgtattctcaagcctttaacctctgctgagtttcaacttatctctcttctcaaagtggtcaaaacaaggtggaattgttggtgttttaactactttgaagagccaaacagaattaactgttttctttgacaactcagcatacggttggtgacttgttcaactgtcacactatataaacctcctctctccaactcgacatgacacaaaaaacgagaaacaaatgcctacacca

SEQ ID NO: 294035 - DNA, 54 bp, Cannabis indica
cagtctaaatccagtgaactgacaaatcagagaataaactttcgaacatataat

SEQ ID NO: 294036 - DNA, 637 bp, Cannabis indica
ctcaataataatgctacgaaaaaatatacataaataaaagtattattattggacactgctagtgtggctaatactttttatagctgacacactataattggttagaaatatttcttaaaaattattatattataaatttttgagcattgctattaattgagcatcagtactattgataccttttagaggtgataccctacaattagtttgtaatatttcccaaaaactactatatataatctaatacttaattatgcaactagtgatataatgtctaggagtgtgttagacactaatagtaccttttaatatttctctaaattatatggtatataattcttaattacactaatatcgatataacaataaacaaattactaaataccattaatatcttttagtatttctcaatagatattagttcacacttctctagtattagaagtgtgtgtactaattgttagacatttatttgtatagactaaaacatacatgattatgaataaagtgcggaattaataaatcatatatgcactataatttaaggatcgaaatacctccagccattgattcttgagcttcaaacccacataagctttgatctgcaaaggaaactggttgatgtgggtaatcgggc

SEQ ID NO: 294037 - DNA, 923 bp, Cannabis indica
cccctcaattaatgaatatcaacccaactacaaagggccattaatagatagattgaggagaagtgtattgatagataaatggagcccatggtgattaacattgatatgttgcgctgggaacttgggcttggactcatttgggttctaacatttccattcacatatatattattatcattacttgctcaaaatctgagaattaacacaaaattaaaataaattaaatatttcaattaaaataattttacaattaaaaccatgaaaatatctaattaaattaatcttatgtatacaactagaggcttaaaatatacaaatttgcacattaatcacaacccccaactagcttattgctagtctctagcaattcaagcgaaaataataatgtcaacataatattttcaagtcaaaaattttaaaaatggcacaaatattcaagcaaaatattagtaacaagccaataagaactatacaaaattaccttgaataaatctagagttgtgagtgtgtgcaccaaacctgaaccttcttaccgcaaaccataacacataaatgctttcgaaaaatgtaccaagtgaaagtctcaactccattagcctcacaggtcattgaaaatatttatatatggctaaggtattcactcatggagttggaaattgaaaagtgagcactcgaaatggataaatcaatttatgacaaacatttgaataaacattgaaacgaagatagattatgaattatttggaccaaccaccataagagtaccacaaaccagcttttcgggatttttgaacgaaaatagacaatcatttacatttattctaggagccaaaacaaatgaaatacaacaaactttttttttttcttttctttttctttttctttatataatgatggaaatgttgctcttgtatctttttttt

SEQ ID NO: 294038 - DNA, 519 bp, Cannabis indica
ctttattcgcgatgggggtctctatgaccaatgggtcatgatgagggaagcgcaccgtcttggcgtcttcttccgtgaacgtgatgggttggtccatcaaccggggcctttgagctgggagttgagtaacttcccacacctcattgtgtttcgcggcccctgcgtatcgcttaagctccttgcgagtagttcctccgatatggggacctccggagatcatggctaccctcccattaggccggggcggcagaccggggatatgctgggcgtcgcccgtgggagcagctggagccaatgcccctgctgtaccccccggtgttccctgaggcatacccacagtcgcctgacccggattgaggtggggcaacctattcttgatccactcgtagaggtggcctaatcggattagattttcgatctcgtccttgagattcttacattcattggtgctatgaccgatgtcgttgtggtactcgcatctcttgctcggatctctccgggagctatctttgtacaacg

SEQ ID NO: 294039 - DNA, 571 bp, Cannabis indica
ggggcggccggtgatacatcccggacgtcgccggggttttgataccaaccacctccacaatattctccagctggtgggggcaagtcaaagtagagtgaagctcagccacttcccatcccatagcacgaggtctgtacccctcctgagcaacgagacccaccatgacttcttccaaggtggccagacgtttttctcccttcttggaagatttagaaccggatgcagacatttctgattatgaaaaagagttaaaattccagcaattaggccccataccaaaccctagatcaaaaaagggaatgggggtcccctaaccgctggaaagaggcccccttcggacgactgtcaacaagaaagccctagaaggatttcctggacaaaagtcgagtgcaaaaatttcacagatagtgacattgcgcataaaataaaaagaaagaggaggggcagaaaatcgtgaaaagacaaagtcttctctatacccttgaaggccatcacgcaaaaagtgaatgggcctttacaaaaaataataataatgtgtaaaaagagtgaccctaacaccaaagaagggaaa

SEQ ID NO: 294040 - DNA, 579 bp, Cannabis indica
gtaaaatgcccaaataaaaaactattgatttattgttaataagttggaataaaattgattttcttaattccctgttagaaattttaaattctgatttgataaagaattaatatttccttaaaaaaataaataaaaattatttttgatttattggttaataaatgtaattcaaatatttttatacttgaaaaatataaattaattcaaatgtttattgttgtttaattggttaaattctgtaaatcatttgaatgttcaaattattcatgtaataaaaataaaaaaaaaaataatagagttacatatatattgaaataaaagaaattgttgatttaatgttaataagtgtgaacaaaattgtttttcccaattgtctgttagaaattttaaatttttgtttgataaagaattaatttttctttaaaaaaaaattaaaaattaatgttgatttattggttaattaatatgtaattcacatgttttcttttttttttttttggtttgataaaaagcgtttatatcataaattcaaaataaggttagacctacatggtcattacaaaatatattgtctggtaa

SEQ ID NO: 294041 - DNA, 580 bp, Cannabis indica
agcacaagtcagtgtggagtggagctcatccgcctcccaaccattagcacgggacttaaagttctcctgggccacgggagcctgcatgacctcctccagggtggccagttaagcctcccccttcctagaagacttagaaccagatacggaagcagacattttagttctgaaaaaattaagaaaatccaacagttaggccccaaaacaaaccctaatgttcaaaaaagggaatgggggtcccctaaccgctggaaagagaccccctccggacacttgccaaataagaaaaccccaagaggctttccttggtaaggggtgcaaaaatcccaaaggcagtgacattgcaaaggaaaaagaaaaaaaaagagaaagggaaaaaagggcaaagccgaaaaagcaagatctactctaagccctaaaggcgttattacgtaagataaggatgattcctcaacagaaacgtagcaaaaaggagcaatcaagacgcaaaaaaaaaaacgagaagaatttaacgcatcctacagtatactcaggcaaactcattcctagaagttcgacatccaacccagaaatcataaaa

SEQ ID NO: 294042 - DNA, 230 bp, Cannabis indica
atgatatttagaattgaaataggaatattaaatgtctaaatacaaaactacacaaaaaattggaagttaaatccatgaacgaaaaattgcgagctgtacggacagtatgctcagcatactgtccaccccatgcgcgtgttctcggacaaaaacttgtcctaacacgcgtctggccgaggatttaggccatccgcgcgcgcgtgtcttagtgatgtcaccctgatattttt

SEQ ID NO: 294043 - DNA, 885 bp, Cannabis indica
taccaaatatttcttgagttattattctctcttggaccgccactattaatctaactctaagtctaatttacctaaagtaagcatatacaagtaggagatttctaagatcgaggatttatatcatttcgggatagaatgtcgggaatataattttctgcgccatccatttcataagagaaattagagtggcatcataagcagatgatttataaactattcatccaatgatatattatcatagcaaattcgaaatgaaaaatctaagaggaaaaataaaggataatttcgattaaaataagaatctaacgatgtcccggtaggcgagagtcaaagtgatttttattttacacgaaatttacaactacacttaataacagaaacaacatggttcaatataaattcacacacaattcaaaaattattaagcattcagcaaataacaaagacaagtgaaaatacaaaacaaacacatcttaaataatttctaaagtttccaacaaactgatatagtgtcccggtaagcgagagtcaaatatatcattcattgaatagagttgtcagctcatctaaaatggacaccattctagcaactttttattcgatcaaaataagaatccaacggtgtcccggcaggcgagagtcaaggttattcttattttatgagcttccaccattgtttcatacttcgtaaatttatctctaagtaggcaccgtaggggagagtgtaatagagacgaaaacttaaaaaatacttatcataagatatcgttacggtgttaaatgcttcacgaataaccatccataaaggggaggatgtctagcgtctcgaggttatattgaaaaaccatgtaggacccacaatggagatcaaatatccttataact

SEQ ID NO: 294044 - DNA, 661 bp, Cannabis indica
ttaagtagtgtgctaattaaaatttacatattttatataatggtatgtttttatttactcactttggtcaagctgcaagaactttaaaagataagttttattacaattctctttcttcaatattttactttattactaatttatatgacaatttaaaaactgttattttaacgtttatttatgaagttactaatctatttgatgtattttttagtttaatgtccaattttcttaaggcgtcccttattcatgcaaatcttttagctaatgtcgctacgcatgaattagctctgcacgtacttaggatgaatggtgagctaatttggatgaaagatcttcgatctcttctttatgatgtactcaatgctaattttttctcaatgaaattttgttcattgttcaaaaaataaatgatagtaaatggcttaaattaacccttgatactacaccatgattaatatatttttttaatttataattaatcttgaatattattaattataagtttcaactaacaaactttaaattaattttttttgcgctttttattttatgtctatttaaaatttagttctaattatatatatttttttaaatttcaaatttacataaaaaaatttaattaaatttatttttaaaaaaataattatacttatagaaa

SEQ ID NO: 294045 - DNA, 510 bp, Cannabis indica
cgcaccgtcttggcgtctcttccgtgaatgtgatgggttgatccatcagtcggggcctttgagctgggagttgagtaacctcccaaacctcattgtgctttacggcccccgcataccgcttcaattctttacgggtagttcctccgatatggggtcctcctaagatcatggccactctcccattgggtctgggtggcagaccggggacatgctgggcatctccggtgggagcaactggagccaatgatcctgctgcaccccctggtgctccctggggcaaagctcctgttgcctgacctgaattgaggtgaggcagccgattcttgattcactcgtagaggtgccccaatcggattaggttttcgatctcatctctgagatttttgcattcattggtgctatgcccaatgtcgttatgatactcgcatcttttgttggggtccctttggaagctatccttgtacagaggaggtggtctccggtagtgtgtattttgcgtagtagcaaagt

SEQ ID NO: 294046 - DNA, 548 bp, Cannabis indica
attataagttagaaaaatgatatttatatcattttacttattagaaatttataaattatactttaaatatttaaataacctagatatttttgtagaaatttgaataatgcttaatttgagatattttgacatataatttggataattattatttatttatttattattttattcttaaaatgataattgcctaactacatctattttaaaatttgtttattttgttattttaattttattaaattataagattagaaaatgatattgaaaataattttttgattattttctaatcatttatcttattagatatttaatttaatttgataaaataattcaaataaacctagatattttaaattagtttcattttttttttttgaattttaaattttgatgagatatttaaggttgtttttcacaaccctaaattttcaaaatttagttgtttagtttaaaataataatttaattatattaatatcttatttcacatttgttacatggacattgtttgttatgtatttaattgtttattcaaaacttttt

SEQ ID NO: 294047 - DNA, 573 bp, Cannabis indica
attctcttcgatattttttgaagtctagtataaaaatctatgatgaaatcgacaatcatgaatattagtctcttcatttctctttgattatatatcacatcaacttattttctgaagtctagtgaattaaatgagattggaatgactctttacagtaaacaaaaataaaaaagaactaagaagaaaaagaggtagattcatttatggatcttcacttacccttatagagcttgaagaatgaccttgaataatttagttttttttctttcttttctcaaattatttttctctgttttactcttacatatcaatttctttccaaagatttttttcaaaatttttgttaactgttcagccctctatctctttgtagccacgtttttttttattattattttttaataaaacacacttaacgtaaaagtggtagaggtggaaaaactatctccttagtttgctctcttttttttttacttaactcattcccacttttttatttattattttaagtagtaaataaccattttgtaaccctcgtgttttattaaaagttacagattggaccctgtgttt

SEQ ID NO: 294048 - DNA, 958 bp, Cannabis indica
ggtagaaactataagcttgataattccagaagctattcctattcttcttcctaagtgttgtggtaaggaaaataagctttggacaaggtgtaaacctgttcaagtttgtgacttccctacttgacacttggtattagtggtgttgagattgttcacacatctatatatatatatagtctatttatattgttgtttttataatcttctcttcatcttattttctatatttatgtatatattttgtctagagttatattattttattaatattattgtttttgtattttttattttgagttgtattttgacatattggtctttctatttctactaaagcacctataaatttccaaccatttcaaccagtatttatcttataaagaaatacaaagcacttcaacaaatttttgataacactcttcactcgcgatcacatacgctccaccattagtcttgtaatcacctaggtctcacgtgcactcggcttccacacagtgactgacaggagggagaaaatgcaaagtggggagcaaatggtgaagtaaaatattttttggggctattaaaaaataactactagtaaattttgtttttctttttaaaaaacaaaatagtataattaaacttgttattatgggacaattcttatggatttttttttttaaaaaaattgtaattgttgtatacaataaaataagacgtgtgataagacatcaataatattttttatacattgaatccaaaaatataaaatttgtacttagtgcgaaattgattggatgaacaaccctattaagaatgataaagtggagataaaactcttcaaaaaaaaaaaatagaaaaaaaattaagtgatataaaatcattgaatgaaggttacaaggattgaactcatgtcacttaccatatgtgctagaataatttattgcatattttgaatcttattgctttatatatt

SEQ ID NO: 294049 - DNA, 490 bp, Cannabis indica
aagaactttagtaacatgatgattctcttcttaactgagccttcttggtaaatttaatagttttttttttttatttttttttttcacttaacgtgaggttaaattcagtcctaaaactttatagcttaatatagttaattctggtttacatttgacacaatatttttgtattacatataggtcgaggtgcatgaaaatatatatgttttatttgtttttaaatataataaagagttaagttttttgtatgttttttttttaaagaaagagagttagtaattatatttgtatggagtaataatttaattttagaatataatatagataacgataatattgaataaataaatataaaatttattatcacttttatatacacataaaaaatatataaaaaggcaatacaaaatgatatttaaaaattaacgcgatattaattttgtattataattagaaactatttatatatgtctaaaaagaattataagta

SEQ ID NO: 294050 - DNA, 517 bp, Cannabis indica
tcctcgttgacttcatcattaaatttcttgcctatttgactacatagttaaaataagtagagttctagaaccatataaatatcaagataatttccatttttcaaaattcaacatgtttccttttaccaaaattttcaagaaaattatcttaagtttccaaaaagacaatacaaattaattagtaattagattagactattgctgtaaatacaggccagacttttaatttaactcgatacaaaatcaacacgatcgctcaaaaagcacgagtacgactagacacgaaaaaatacgggcttaaatatgacatgacatgcaatgctacaaattaattgtcacgacacaacacgaaaaaatatgtctttaaagcatgacacgagacacgagaagcactaaaaaatacggcacgtaaaacacgaaatagtagcccgaaaaagcatgaacatgctacaagcgaaaaaaataacggcacgacatataaaaattcttataatttattattaataataataaagat

SEQ ID NO: 294051 - DNA, 422 bp, Cannabis indica
cgaccagaatcaaaggaacaacaataaccaagacttgctacctccaccggtagatggacatctgcaagtcatcattggaggcccgcacatagctggagattagggcaaagctcgggagaggtatgcctgaacagcacagcacgagcaagaagaagtgatcctggccgtagaagaaaggaagcctaaaatcccatgggcaggagggcctaccctaaccttcaatgatgaagatgctttcaaaattaggttttcgcacaataacccgttggttgtggaggtccagatagctatcaagatggtggctagaaccatgattgataatggatccccttccaacatcttattcaaaacatcctatgaaaagatggggctccagcccaaagatctaaccccctatctcctgcctgtatatggtttctccg

SEQ ID NO: 294052 - DNA, 511 bp, Cannabis indica
ggtatatatcaaagtctggggagtatggttagtacataaacaatcattaaatagtaaaattgaataaaattagacaaaagtcttaaaatccaacaatttcaatagtttaaggaccatttttaacgacattaaaagttaagggggcgtgattagatacatgtcaaatttcagaataaaaattataggctaattagcaatttttccccccgaactttgacatgtactaaatcgtgccccctgaacttttttggccgttagaaattcccctcgaactattgagattgttaagtttaaggacttttgtctaatttcattcaattttactgttcagtgattgtttatgtactaaaccatgctccccagactttgatatctatcaaatcacgcccctcaaactttgatatgtactaaatcacgccccatgaactttcatccatgttacaatttttttactaaaattagataaaagtccttaaatttaacaatctcaatagttcgaggggaattttta

SEQ ID NO: 294053 - DNA, 734 bp, Cannabis indica
aattatacctaattataacacatagaaaaaatataccaatctttctcttttcttccaaaaatacccttctcatttcaaacttcccacattccctctaactacattctctctcttctttccctctcccaaactcacgaacccacacccaaacccacgaacggacgacgcagaccaccaaagctccaccaaaacccacaaacccaaaccaccgttcgaacccgcggccacccaaacgaacgccccaacccagacgtcgaacccacgaacccagacgtcgaacccacggccatacgcaatctaacctagacgacccctcgaacccacagccacccgcacgacccagacgacccagatgaacccacggccatacgcagtcgaacccacgacgaccgaggagacccgcaaacccacccacgactggaaaaacctacacagacgtcgaacccaatacccaggtttgttctttattttttttaactttaaattcacaatctgcgaaaaacctgaaatgtatttgtttggatttataaattttagagtttggggaagaaactgagtttagggagatagattttggggtttttttgattttgtgcgacattgtgcgatatgtgtgcgattagtgatacaatttaaggtctatttcattgtgggattgtgtgtgcgattttttgtgcgattttttgtgcgattatgtgcgataaatgactactgtatctgcaattgttgaattt

SEQ ID NO: 294054 - DNA, 799 bp, Cannabis indica
ctttttataaaatggactgaaaaacagcatctaaagacccatattgtagtagtggtattatgtgtcgtgttgtttaaattgaagctcatgtgatttctcgatcgttatctaccaataaacatcacaaaaagattaacatcatatgtaaggtcatttttaatttgatatagtagagattaataaaatcaaaattgtcattataattttttattacttttaaaagtgatataatgggattacaatgtaatgatgattactgttgggtcccgttctttcaccttgttgggccgctacttcaccttgactcccattagtatgatattatctgctttgggcctaagcccctacgatttgtttttgggtaccttcccaaaaggcctcatactaatggagtaggtagaacacttatattcacggaaactcttgtctactcttccgatgtgggacttgggttgatacccaacaatcctcccctcaaaccgaggatcacatacttgtggtctcccctccagcgaaaccaccttatttcgccactatcgccaacggaactcgctgcctgaccatcaccgttgtcaagaagactttcgacacaggtcctaaaaccgatctccatcttgtaccgtcgtaatctcatcaacgggacatgccacctgactatctcaatatcagatatactttcgatacaaggcaccatatcgacgctacctcaccttgactcctattagtatgatattatcagctttgggcctaagccatcacgattttgtttttggacaccttcccaaaaggcctcatacta

SEQ ID NO: 294055 - DNA, 540 bp, Cannabis indica
ctattcaaattatttccaacaaaaattatttaaataatattcaaattattaaaaaaaaaagaaattagtatttctaaaaataaaattgattagttcaagatctcttctttttattttttattattttttttatgggagaccttgcacgagtgcctatttggccaattattttgaaatgtgcctctatcaaattatcaatgtcatcatctttatgttttatgtagtttctccttcctattttttttaattaaatgttcttttttctttctattttaaaatatatatctcttaataaataaataaataatttctactatatataagtataagatgaagctattcatttattttgctcactaaataagtttttatatttgtattggaaaaataacattacacttggccctcccaaaattaaggtctatagttctgtgctaatgagtatggtagcatattgatctaaataattatatggaatatttggatgtgtacgatggaattggtcttatgtttgttttttttctgttatacaataccatt

SEQ ID NO: 294056 - DNA, 505 bp, Cannabis indica
ttgggtttgggactgggttcaaggtccgggtgtgggttctggtcctcgtcagggttcgggtcttgggctgggtcccaaatccagacaccgactacaggttttgtccaagctctgggtcaagatctggatcccaatctcgggtccgagtctggttccatttctggtgccgcgccacgagctaagtcctaggttcaagttcgggtctttgtcgggtaataggtccatgtcctagttctgtttcccaggtccctatcctaattctaggtccaggtccgagttattgtgtgggtttgggtcccggtctaggtttgggttcaagtcttagtctcggttcgggttcaggtctctgtcttggtcttgatctgggcttgggtttggatttagatcctggtcctggtcctggtcctagtcctagttcggttctatttccatttgcgatttagagttcgagtttgggttcgagttcgggtcgaagttcgagtcctggtctgagtttgggttcggg

SEQ ID NO: 294057 - DNA, 515 bp, Cannabis indica
aactttcaacaaaacgaaaaagaggcagcaatgaagttcaacaatcaagagaagatgtatcacagttttctgagacagagaagcaaaatcacttggttatgtaaaggggatgagaacaatgccttttttcatgccttcctaaaaaaaagaaggatggaaaacagcattgtttcttacaccaatgaccaaggtgaggttatagacaatttcagagaggtagttgatcacttcataaagcacttccagaactacatgggatctagctcaagacccagtcaaggcttaagaaaagactgtatggagatggggaaccaccttaatagagaacaacaactgaaaatggtcaaaccctttactagcaaggagataaaaaaggcgctttttagtattccagattctaagtctcctggtccagatgggtatggagctggctttttcaagaagatgtggcctgagattggaactgaattcactaaagctattgagagcttcttcatgacaggtttcatgccgcg

SEQ ID NO: 294058 - DNA, 875 bp, Cannabis indica
aataccctacatcatgattaggacgagttgcgcgctgcagtaaatctcacgttcgacgaacaaaggcgtatgttcgccgaatggagagatagagagatggaggcattaagggctcaccatgcagagattgaaaatcgttgtcggcaggctaccgtgttgatacgaaaagcctaccaaactgtaggtcagcagccgccgaacgtcattcccatgggtgaaacagacgaagatccagcgatgaatgcttctcagaccacaaatggtcagccgcctaatccccgatcacaagttccactcgtgggccaagcagtaggcgggcagaccttgtctagtaattcatcgggagaagtcatacctgatggttccaaccagataaatggtgccattccgcccgtcaaccaagcgaatcaatcgctgaggcagccagacacttctctgttcgaaaggttgggcacaacccatgacctaagaaatgatccgaatagaagaaggggagtagacgatcagaatgttacgacaatctcgcagcccgaaacccgtactcgaattcccgctcagaaagatgctgatgtaattcaaattgaccagaatgccgagcaggtcagcccagccgtacaagctcagctagacgaactgaaaaatatgtttcacagctagacaaagaaacaatgatcttgagctggaccgagcatgcggaactcctttctcaccggaaatcaatctcctaccactgccccacaagttcaaaatgctgacgtggaagatgtacaccgggagggaagatcccctttcccatctcaaggaactcgaaatgcaaatggatttgcaaggggtacgaggagatgtatgctgcagaatctccctgccactctgtc

SEQ ID NO: 294059 - DNA, 765 bp, Cannabis indica
tcaattgtttttcatttatggaataagttgtgagaatttagttgatgatgacatgatgttacgattaaatatcaagcttatagaattttccacattctaagaatggaaagaaggaaaatgaacatattatatgataaaaaaattctaaccacaaaaaagatgacaattatgtcaacttattgctaatggtcaaaactagacaagagaatgtagttgtcagaatggtggcctcaaaaaaatcaaatggctttgaaaattcacaacaaaatattagggaatttctatagctggacattatgttgtttgagatttcttcatttttttagtaattttaagaattataacttaattttttatcagtgtgtatattggatcggattagggcaatttagtatacattatataattttattacaatatatgtgcagaatgtattttttttttcaatataatgatacattttatctattataaagaaaattatttttaatttaaagtatttgattatttaatttattatcactcattattatagttattgaatgatgatatattaataattattttatatttttatataattttaaaaatcaaccattattataaatattgaaagtttgtatttagattaaatgactatttaattcttccctataaaactattatcaaatacatactatatccaaatacaatatactcaaattttaaacatttatatttataaaaattataaaaagaatattagttttttttattatttttatt

SEQ ID NO: 294060 - DNA, 541 bp, Cannabis indica
gttccggccggtcacttttccggtgatatataaatatatatttttttatggtttttttgaaagggtaaaagtggaaaattctttagtggaatttttaggggtggaaaatgtggtccaatagtggtggacttttcaatttcatgatttggacttttttttttttttttagtaatttttagtttttttttatatataattattataggtaatccagtagtggatagtgatagtgatgtatctttcttttgaaaaggacatgtataaattcattttcacgtgtataaaagtatgttttatgatgctcttttactcatttttaaatttattagaatattagcggtaaaatatttgaattatttttcgatttgtgacatttaattttatttatatttttgctttggtacttaaaatttgttaagtgttttaaggtttttttttttttttgatttttttttagtgatgaatcagaacttgtattggcacaaaaacaagtgtttacagtctaatagcacccattaagggcctaaataatcatctatac

SEQ ID NO: 294061 - DNA, 822 bp, Cannabis indica
aactccgacccgaactcaaacccaaactcgaagtaagaatcgcaaatggaactagaatcgaactagcactaggaccaggtcaaggagctaaacccaaacctgaacccagatcaaaacccagacagggatctaaacccgaacagagactaggacttgaaccctaacctagatcgggaccaaaaattcacacaataacttggacctggatccagaatcaggatagtgacctgggaaacagaactaggactgggacatagtacccgacccgaacccgaacctagacttggaccgaaacccacacaataaccgggacctggaccaagaatcagtctgggaaacagaactaggaccgggacctagtacccgacccaaacccaaacttgaacctagaacccagctcatgacccgacactggaaatggaaccagactaggacccgaaattgggatctggatctggacctagggcttggacaaaaccgtagtcggtgtctggatttgggacccagccctggacccgaaccttgacaaggacccaaacccacactcggacctgaacccagtcccaaacccaaaagtggacctgaacctgtacactgtgacccaaaattggaaccaaaaccggaagtcgactgggactggaactaggacttggacttggaatcataactgaaattggaactagatcgaaaaccgtaaccggaccaggacccagactccaaatcagacctagacccgaattgggagccggacccggatctgaacctaaacccaggactaaggacccgaaccagaacctgaactcagactcaaacatggaacca

SEQ ID NO: 294062 - DNA, 572 bp, Cannabis indica
tatacttgcgtacacacttttcatagcaagtttttggcgccgttgccgaagattgaaactaaaaattgtgtattatcaactattttgcaatttattttctggtttaagattttaatcccattttggtgcgttgaattttttttaggtgtaaattagtgcatgaacgagcaagaagaagaccttgaacttgctcctatttgttagtgtcattattttgtgacagtttttgttctgttcaatgtctagtcgttttgtgtttttagtctgttatatctgcactagcgttctgttacgtgagtttcagttaagtattagttagtgccaggtggacttattttgtggatagataaatagtcagtttctgttagtaatggttttatccattaaatcgttcagacagttatttcggttgtgtgtggagatagagtcgtatcttgtttcttgttgttgtgattacaggttagatcttggagcttgaggatgttcatcaatggaggaatgatctgaatctggaattgctgagttcaaactgaagggagttcagtttcatcttcatcatcagatctgaaggg

SEQ ID NO: 294063 - DNA, 533 bp, Cannabis indica
gtaacttttttaaatttttatattaacatatcaaaatgctttattatataaatttgttattaatatatcatatcgtaacttttaaatataatataataaaagattttataataatttataatcttatatataatttgcaattgaaattggtatacataattaattcttattaatgttatggcaggttactataagtgtcttattctttcatatttaaatgtagcatgatagtatctaaataagtttattttattatgtgatttcgataattatttttttaaaaaatatatataaggaaactaaatcgtgtcttaagtaccacataattagttacttacaaaaatattattttagttaatattatgttagtcttattgtttaaaatattttaagttacatttacttgtagtaataacattttttattacctccaaaatttagttgcgaatataatgataaggtacaacaaaatataagtacttactgtataacttattaataaaattaatagatgtaatataatgtttaagata

SEQ ID NO: 294064 - DNA, 543 bp, Cannabis indica
attatgttcttggaaaaggcggccggcctcagtagcaagctgggaaaagatacaagtataagtaagaatctccgaaaaagaaaataataataaggagaaaagtaaagtataaaatacttaccagagtgagtgagtggctgagatcctggacttggaagatggagttcaaggatgcactgttgggtttatgccctaaataaaactcatttcaatataatcagatttacttattaatatagatcagaaataacatttaatgttgcatggttcacatgatttatttcatgattatatgtacataatgtataaattcatctgaaacccttttcacatacttgatcctgtttattgtgccgtcaacacattggaaagtaaacatgactatgtgaataaagtttcctagatttatcagacacaaggttttactgatatgataatctacaacaagagtttacttgcatttggagaagtgctatgttctttccagaacattggttaaagtaaagctcaggttggatgcatggagtatgcatcggaagggac

SEQ ID NO: 294065 - DNA, 576 bp, Cannabis indica
ggaacatttctcaaagtaccccctttagtccagtaccttctacatgctttgcaaaagtaccttggttgagttaaactgtagttgttgtaatagcagaattttgtgtttgttgaatcacatcttgggcattttagggcttgttctggatgaggcttacttgtttgtttcctctgatcttgatgttgactttgttgctttgaccccactaacatgtttcccagtgaatctgatgaactcatttcctgttcattcattcattaattaacttaattaatttcacatggaaattaattaaagagccaaccatgcatttattaatttgacagatatatatagatcgtgttaagtgaattttcattccttaaatatgttcaattaaagttacttgatcataatttatagaagaacaaaatcatatatatagatatatataactaattaatctctcccccataaaaagaaaaaatacagaaacagaaagaaaaagctagaattaaatagaacaaattaagaatcatatatacatatactaaataattacttctatatatatatatatacttaacaaaagaaaag

SEQ ID NO: 294066 - DNA, 769 bp, Cannabis indica
cctactttctctctttctaaaaatatgagactttgaatattattaattgtgcatatatatacatgtttcctccatatatattctggctaattatataaacccatgtgttctttaaaccgtaacatacattaagggaatatcattggtctaattagattttttatatatgaatccattgctttcatacatacacttgtagatatattaaagaatttcaatttgtaattttattttcacatactcatcagcaccattttgacatttaattgagtacctagctataggcagaaataattaaatatgataatctggttaaaagttcctagaaaatagctagttgattaagtgacatgatgtgttacttaccaccttttaccttttagagatggccctcaatgattaattaataatattttttaagaattattatattaaattatataatactacttatattatatgataacggaaaaagtgttaagcatttcaccttaattaaataagaaattaattgataaatataatgagaattgttatttgctccaataattagttagaggtttcacattttatttattaaaatcaaaaatttatagcatctcaaatgcgcaaataaatatattgaccttaattaaataatgcacctcttaattagtaaggtgccgcttaacattttccaaaattaatatacatactgtatctatacgtaattacgtgcattatttatttatttttgttgattatatatatatatatatataatgtacgt

SEQ ID NO: 294067 - DNA, 613 bp, Cannabis indica
gcttgttattacatcagtgtcgtattagcgtcatatatgttgttaatttaaaaaaatagtttaaaattttttaatttaattttacatcgttatgacaattgagtaagcagtcatgttattattttatttgccacgtgcaataaaatttgacagaatataatactgtgaatagtttatggactatttgtaacggacttaaaaatttaaaagcacaataatacatatatattatagtttagaagcaaaaatcctaaataacttttttactattgttactattatttttgaatgaaaatgtaagcttcattaacaactcaaataagccatgaaattcaaagagagttgaattctcaatataaatacaactactagaacctttcgcatgataatgagtagtgttgtaaatatgggccagactttttgacacgacacgaaaccggtacgagtctgagaggcacgggcacgatctgacacgaaaaaaactatgggcttgagcacgacacagtatgctacaaattagcacgacacgacacgaaaaaatgggcttaagcacgacacggcacgacaagcccgaaagcacaacaaacaagcacgaatataaaagctcaaaaaa

SEQ ID NO: 294068 - DNA, 1216 bp, Cannabis indica
ggtcctaggtcccatttctgagtttgggttcaggatcgagactggggtgcggttgtaggtccagacccttattttatgtccctagtttggttccatgtttgggtttgagttcaggttcaggttcgggtaccgagtccatgtttgcgttgggaatcgggtccggctcccaattcgggtctaggtcttatttggagtccgggtcctgctccgattattgttctggatctaggtccaatttcaaatatgattccaagtccaagtccttattttgtcccggtcaacttccggttttggttccaattttgggtcacaggttacgggtttgggtcccctttagggtttgggactgggttcaggtcttggtgtgggttagggtccttgtgagtgtttgtgtctaaggctgggtcccaaagctagacaccaactacgggtttggtcgaagccctgggtccagatccgaatcccaatcttgtgtcgaagtctagttccatttctggtgtggggtcacgagctaggtcctaggttcaagttcgggtctaggtcgggtaatatgtcacagtcctagttctgtttcccaggtcgctatcctgaatctgggtccaagtcccggttattgtgtgggttttggtcgcggtctaggttcgggttctagtttaggtctctttctgggttttgatctgggttcgggtttgggtttaggtcctggtcctgttcttagtcctagttcggtgctagttccaattgcgattctgagtttgagtttggggcggagttcgagtccttgtctgagtttgggttcgggtccggacataagtctaggtccagatcaggctccgggtgtgggttcgcgtcctgggtccttgtgtaggttgggtgcgagccccaagttccaatcccgatctgagtatggagtcagttttgggtctaagtttttgattctgatcctggtttgggttcgagtataggttcgggtctgggtctagctttcggtctgattctaggtgcgggtttgagttcgggtccgagtctgtgtctgggtttgtgtccaagtctggaccccgatctcggtctaggttggggtccagaccatgtcggggtcctgaagtaaagtttgggtctgggtcaagatctcggtctaaatctaggtctagcatttcgatcccagtctgggtcttggttcgagtccaggttcgtatctggatccctatctaggtcc

SEQ ID NO: 294069 - DNA, 627 bp, Cannabis indica
tgttcatgtaatcaaaggaattatttggtaaaaattagtaaggggagtcaaatttgatacgaggtgttttattgtgcatcaatgatgaaattttcctattttaacccattctgttttgatattttgacacgtgaaagtgtacatggaataatattttttttattaacgtacatggaataatttgaaaaggtcttctcatctccaacacactagtgaataatattaatggaatttactatagcataataaaactacataatgtgaatggaatttatatattttgtctagttgaatttacgaattataattaaaattgtacacatcgataaatagagttatcttctataaatatgttaatgttaaaagtaacacagaagagttaatatacaaggacaaaacaagctttaattttacttcacataattaatatatatttcaattatttttccataagtatatttacttacaaatatatatatatactagaagaaagttacgtgcaaggcacgtatatttagttttatgttatgtgttctataatttaattaagaaagattcaataaataatcatgtaatttaaaatgatttaaaaactaattttaattagtgtgtggggttatttgaaaa

SEQ ID NO: 294070 - DNA, 563 bp, Cannabis indica
aataaaaaaattaatcataaaaatttaattttttctaatattacccattcatgggtaaaattaaatttttttgagcttttatgcttaacttttctatttaattaaaaaaatatttcatttttacatcagataggctgagattattccatcgatcaaaaaaaataaaaaaaaaaaaattagcaaaaaaaaaaaactaaaaagaaaaaaaaatttaagagtttgacttaaatatttttatatgaacatatttttgatatagtataaaaagagacatcttttgatatttttttcttaattaagtagttaaattaagtatagaatttcaaatatctctttcattattcgtcattatatctaaatttgattgtttaatatttttaaaattaatatttatagttaaatttatttagttaccattcatgtgtaatacccattagaagtattctgtatatatattattaggggatattacattgtagatcgggtaaaatacttattaatagataataggaacagaaatttatagtttttgatttaatttaatgattcaaagttaacccttt

SEQ ID NO: 294071 - DNA, 1505 bp, Cannabis indica
ttctttgatttagaaaacagtggcgatggtggtaatggtggttgtgtggtggtgatgatgataacgagatgaataacacagaaaagaaaaagaaagaaaaaagagataggagaggcagttgggatggataagaagatgtagggtttttttttattctcttaagaagaagaagaagaagaaaaggaaaaaaaataaagaaaaaaataaaatgcaataattttttaaatattttttttaatttaaattttttaaatatttaaaattatttttaataattaatactgcgtggaccactaaaaatttgccacgtgtacacaagtgtgccacgtgtacacacgtgtacacgtaggcaggacactgtgacacttaactgaggttttttaacagaagtactgcaaagagaaaaacagaatgggagttcagtaggttttgcagtcaaaattttaatttcgtggttaagtgttaaaaaatttaaagttcaagtgatttagccgtcaatatccccctcatattttttttattatgaaagaaatcaacacatggtaaaatgacaatttttgatggtaaaagagatttattgatggaagcctaataccaataaattaatagtaatttcttttctcttttctctttttattttatattatatattgtttattaaattattggtaattaaaatcatttttcatcactttttttttttctttcaatcatacatgctattatcaattattatttatattttattgtacttttatatttttgttattggaattaccatagtctctaaatcaaagcatacaaatcatattataagaccttttatttaataatttttgaaaaaaaatcttttatttataaattttatagctagagttttattcttaatttcactctaatattaaattcatagtacccaatatatctttatatattaaaagtgcctatctaacggcaattcttggtttaacagaatatacttaaaaataaaagaatattctgttaaatttaacgattaggtttgatctcccgttaacaaataaacccaataattaaacccaaaaaattaaacaatcttttaaatattaataatctctttttaaattaaaaaaatcatcttagccacatatctctctaacaaacctatcttgggagaatattaaaaaaagaactaaatagaataatctactactccaataataaatttatttacaattttataattacactaatattatttttaatacattattaaataatatttcaaatataaatatttaatttttttcaaacaaaaaatttgtaatcccgttaacaaataaacccaataattaaacccaaaaaattgaacaatcttttaaatattaataatctctttttaaattaaaaaaatcatcttagccacatatctctctaacaaacctattgaacaatcttttaaatattaataatctctttttaaattaaaaaaaatacatcttagcctacatatctctctaacaaac

SEQ ID NO: 294072 - DNA, 526 bp, Cannabis indica
atcgacgacatccttgtgtactctcaatcagagaggagcatgagttacatcttcagatggttttgcaacggctttcgggaacacaaacttttatgccaaaattcaagatatgtgaattttttgctatctcaggtgtcttcttaggacacattgttagcaaagatggaatcaaggtgaaccccgggaaaatagaatccgcagggattggccaagaccgaagataatgacaaaaattagaagcttcttgggattagccggatattatcgtcggttcgtggaagggttttctaagattttgacacccttaaccgaacttacaaagaagaatcaacgtttgtttggtcatataagtgcgaagctagttttcaggagctgaaacagaggttgattacagctccagtgctagctttgccctcagacaaagagaaattcgtagtttattgcgatgaattcagacagggtctggggtgtgtgctaatgcaagccgatcgggttatcgcttatgcctcccgtcagttaaaggatt

SEQ ID NO: 294073 - DNA, 948 bp, Cannabis indica
agctatcatcagcaaatagcatatgtgaaattaacggtgccccattcgcaacctacaaaccttcaaagccctcaacttcaaacttctaatgagagaagtgaacccctcggcacaaatgagaaaaagataaggagacagaggatccccttgacgaatacccctacctggcacaaaagaagctgacacatgcccaccatgaacaattttgtaccacaagatccaaaaaacgagtggcgaaacccattttttccatcattgctctaagaaaaccccattcaactctatcataggctttgctaagatccaatttcaaagccatatatccctccttacccttacgctttctcttcagataatgcattacctcaaacgctatcataatgttatctgagattaaatgcacaggaataaaagcagattgagttgaagagataacatgtggtaaaacaactttaagacgattcgcaagcaccttcgaaataattttataaaggacattacacaaagatatatgccgcagatcactcatggaaacaagctgttttttcttcggtataacaagaaaatacattttcagcgactagattttctgtgaccaaatcaacttagtcactaatagttagattttgtgacaaatttttagtcgcaaataattttagtcatgagacaatgtttatttagaaccaaaaaaatcaatgaccaattttttagtcacagtttgttatatttagtgactaaaatagtatttagtcactaaaactgttgcgccaaattataatagtggcgagactaataatttttggtgactaaaattatttagtcattaaaaatttaaaatttgtgacgaaatagttagtcagtaaaaattaatgatcttttacaactaaaatattagtcttaaaatattttatttttacaattattaataatttatatgtaccaagtaat

SEQ ID NO: 294074 - DNA, 841 bp, Cannabis indica
tacaaaaacaacaattttctcaacaatatgaaattttggctaatttcacccattatggccttaaaaagttgaaaataagcaaatgacataccaaaattttgtttaaagtatatttcaatcaagaaaaacctttaggcatgctaaatacactcatttggacatgttcaaacatataaacacatatactagccaaatatgtaaaaattcacatattcactagttcaaaggtatgtccaaagttcaccaaaaatttgcataatgacctataatgtgaatttttcaccatgtatagttcaagaatgtcaaaactcaactaatcaaaacttttattcatagaaatagtatgtgacataccaattaagcatgtatgcataagagagtgaacaagaaggatcaaaagcaagtcaattagccaaacacttcaaatttcattttctttttatctaggcatcttaatctcatcaaaataagtagaatgaataagaatgatattaccgattcccaaatttgttaatttaggttgtgttcaagaattgacacgctctttttctatgctttttgagacttgttggtaatgtaggaaattggcattcttctttaagcatcaacacccaagagccaactttggttcctctttattgatacctacaaacaaacttatatctttctttttggtacccacatgactttgggtcctttgatgttagtctttaaaacctttggtatccaaatagccttaccaaaataggcattctttttcacatggcaataggatttagtatgaccatcttggttaaataagtgcaagttaagttcaaattactagatgatttgacaaaga

SEQ ID NO: 294075 - DNA, 965 bp, Cannabis indica
gattgtgcttcagtgttcattcatacatactactcttcaattttttaattttgaagcctaatatagttactaatttgagattatatcgtttttttttttttttgcttgaaagttagggattatatcttggtttcaagtttttttctatgtcgaaaccgatgtgttcaatatagtttttatttgattttctatatttttttttatttctgtgatgttgcttgtgcaagttcaacgactgttttttcgttgttcgttttgtgtgtgaaaatagtgtgtggtggtgcttaataaggtaaaaaattttattattaaattagtgtcaagaaattttttggatctcccgaaaacagcaagtgtgaacttaaaatttcaacaaaagaaaaaaaaaaaaaaacaagtgtgaacttgaaatgtttgacagagagattttttaacttctttaacatattgaaaggatttgtctttacatgtctcttgaacaaatatattgatattgtctttatttttcctcaaggaaagacaaacaaataaaaaaaaatattacaatctcaatactagtttcattaatctttatatgcctctcttgtggcacgacatgactgtttttctaaagaatcacattgcatattttcttgtccatagttttcgatattagtgtattgtctttacttagttttaattgaataaatatatttatattgtctttagttcacctaaaaacatagaaaaaaaacactgcaagtacaactaatagttatattaatctttatattgactctgcaattcccaaacagcaatcaccgaagagtaataatctctgattattaatctttattaatactcaatatatcatgtttgagaaaggctctatatagttaatagtagtttgattttttgtctttgaattgttattacatgaattattgtggttgttaatttgctataagtcaattaaaatcattcct

SEQ ID NO: 294076 - DNA, 647 bp, Cannabis indica
cctattgcaactagcgctacaatctaaattgaaacaaaaaatcgtacgaaaacccctattgcaattagtgtgcaaccactttagaaacccaaactgtaaatttgaaaaaaaaaaatttaaaaatagtatatgagataaatcccttttattttaagtgtgtaaaatacattgtttcaacattattttttatattgtatattatttcgaatttctcaaaattttacaaaatgtgttacataattataacgtacacgactggaaaaaaattggaataaaaaattcttctaaataccgaaacatattaaaatgtattgatgcatccattttaggagggtgatagaatcaccctttaactttttattaaaaaagaatttttaaaaataccattcttctatattttatttacaattttacggtctataaattttaattacaaaaatactcttgtaaaatttcaaaattataaaactacactttgtgcggcaaatagtaaaaaaaaaactaaaaaaccacataaaataaacccacgacaactataaatcaactataaaataactataaataaactataaaataattaaaaaaacagttcatactgaagaaatatttttataaataaaaaatttcaaaaagtaaaaaataaaaaa

SEQ ID NO: 294077 - DNA, 675 bp, Cannabis indica
ggggtccgatgggtccgacggggtgggttcgatgggtccgacgggttgggtccgatggtcccgatgcatgggtccgatggtccgatgggttgggtccgatggtcacgttgggttgggtccgatggtccgattggttgaggtctgattggaccgatagggtccgatggctaccatattgggccaatcggacccatcggacccgaggggttttttttttttctgtcgtacgcggtggagatcgtcgggtcataggcggtggtgagggggtgacggcgcggtggttgtgtgaggtggctggggttcgggcgaaggcggagtcgcttgtgtgaggcggctgggctgggatcgggcatgaaggaaaaatgggaccgagagagagtttgagtggaagagagagaaagggattgggatttttgacaaggctattttggggttttttttgaaaatttgtcctattttaaaaattacctacactaagtgttctccatgttggaagttatttttaccaggaacttagatctactcacaagtatgttgatttaacaacctaaatatgaaacttctaaaaacgataggaaattaaacacataagagtatcagaaatattacagtgattgcagcggaatatatgtctccacccactcaagatctctaacccttgattcctttctatag

SEQ ID NO: 294078 - DNA, 841 bp, Cannabis indica
ataaaaaattaattcagggtcctagttgtaccattttaaaaaatacatggtctattttgtcatttaacaaaatagatggtccaattagtaacttttgcaaaatacagggtctaaaatagtatttacccttgttattataaaatgaaaaaaaaatatatagcttgaaaatgtatgagtttatataaaaaaaaaaaaaaagagaggagatatatagtttaagaaaaaaaaaaactagacaaatataaacaaaaaaagaaaaaaaaaaacaaaaacaaaacaattagcactatgtatatacctatacaaaaaagaaattaataaaactaacggtaaattccacaattaaaaacatgagtgttagttgtaattattttttttcaatattttgtttgctagtgttaagttttttttaaaaaaaattgataaacgaggtagttggaagaagaagatgacgaaagttggtttttggagttttgaaggtgtatttcgaaagaataaatgctgaaaggtgatttaagctaataggtgtaaatggtattttagtaaataaaaactcattaaataaaatatcaatttatattttattccattaatagctttatatatatatactagcaaaaagttacgtgcgagacacgtatattaaattttatgctagtttttttttatgttatttgaaagtgatacaattaaaaattaaagaaaaaatattattaattattaggtgagattattattatgtgtatttaaatattatagtttatatttataatgttgtcaattaaaagtgaataccgaatgcaatatattagtgtttaagaaagcttgatggtttaaatat

SEQ ID NO: 294079 - DNA, 676 bp, Cannabis indica
atcacaataaacaacaaatttttcctttttttaaggaagagttagcactggagcggtaatcaagcgttgttttaactcaaaaaaacttttctcacaccgatcagtccaaacaaacttcaaattcttttgagtcaactccgttaagggtacaacgatctttgagaaaccctcaacaaatcgacgataatacccaactaagcccaaaaagcttctgacctcagtagccgatttttgtattggccaatcccgaatagcttcaatcctgagtgtccaaaatgcaagaaacaccatcagggtgaatgtcgggccaagacttgtttttagtgtggcatggtgggccacttcatcagagattgtcctcagactaagaaagaggagcctaagaagaatgttactcagaacccgggatgactttttaccatgactcaagctgatgctgatgctagtccgtcagtggtgacaggtcagttgtctataaatggttgttcttatactgtattgtttgattagggagctagccactcttatgtgtcaagtagagtaattgaaaatttcgataaaccatgtgatatttatgcttcggggtttggtacccttttaccttcgagagaccttatagtatccactaggtggattcggtccttgtccttctggatagacggttgtgaattaaccg

SEQ ID NO: 294080 - DNA, 504 bp, Cannabis indica
ctgctaaaaatcgaaccaatatttttcttatatttttccatggtccacttttgatctaggctttgttttagccacaaaaaggtcttcaaaaagtgagatatagccatggaaaaatatgtgaaatcttaaaaaattaatgttgttatgctgtttaaattaattcaagatatataaatttttcatggttcactttgacctagattttctaaaccacaaaaggtcttcaaaagtgagatacagccatggaagatatattaaatctcaaaagaaataaaaagttatcatgctgtcaaaaaaaaaaaaaaatctatcgatatgcattttgacaatcgatacatttaatagctcatgtatgtcattcaactagtataaaaaaataggtaactaaaaaaaacaactgttgaattatcagtcttgaaggaaattaacgcctccaaatatatatatatatatctttatatattaaaagtgtctatctaacggcaattcttggtttaacagaat

SEQ ID NO: 294081 - DNA, 517 bp, Cannabis indica
tgtaatagtacaatcctcgatcagtaatgaacgaggtatgctcctggtctggttcataaatcgggatttgattatatcccgagtatgcatccatgaaactcaagagttcgtgacctgcagtggcatcaacaagctggtcaatgctaggaaggggaaagctgtctttgggacaggctttgtttagatctgtaaagtcaacacatgtgcgccatgagccattaggctttggcacaagtacggggtttgctaaccagttggggtaaaacgactcccgtataagctgcaggcaaggaggcgtcgacttgggtccattttgcggcgcttttgtcggacacctcgcacctcgaggtcaatgttcaagcgatgacacatgacttgcggagatatcccgaccatatctgagtgtttccaagcaaaaacatcaagattttgctttaaaaaggtcgttaattgttctcgcagctgaaaatttaatttataaccaattttcaaaactttattattatctacaggatct

SEQ ID NO: 294082 - DNA, 616 bp, Cannabis indica
taaagaaattaacaaatttttttaaatctaacaataatttaaaaaataaaataatcaatttctaaatttaaaactcaaaatatcaaaaattaataataaactattaaaattaaatattattaatttgtaaaattgatatttaagttttaatatactaaaaataatattttatttttaaattagggtttaaaaattggaaaaatttgaaattgggtgaaaaatcccaaaaaatcagattttgggtgcaaagcacccttgttgtgcacacacaggctgcgtgcagcctcattcgcacgcacaggaggctgcttgcagcttttgtgtgccctggtgggtgctagctcaggtgggcgtttagacaatagggcaggcttcagacacgcatagacaagcaccttgtctaaatgcctacgtgcgcctgtgtgcatgtggtatcgagcgacgacaccatatgcacctgaaacttgaaacgaccatatctccttcgttttttataggaattgagttccgtaaaaacaaaaattgtttaattttcaacaaagaaaaaaaatatattttcagaataaaaataaattattttcaaggaaaagatttcataaatcacatacattcatca

SEQ ID NO: 294083 - DNA, 577 bp, Cannabis indica
cggcggagatggatgtaccgtctgtaatggctctgccatgtctgatggatgtgtgctgatggttgtgtcggctcagaaggctgcttctataacaaacttatcacggtcacaatttgatccatgataagattcttcatctctttgtgacttttcttgaagtcagccttcatctcagtctgggaagtgagaattgcaagttgttgcgcttctaccttgtccaatctcttagccaacaagaggcactcagactcattggctacagcaacggttggcggcacagaggcaggggttgggggcacagttgtagatgtggaggggtctgctgcagttttgggtgaggatggtggaataatatttgcactttccacatactccgccacccgtcttgcttgggtctcgaatgcagtcgaatcttgctccccagcttgtgtttcttcgacttcatccaagcccatttccactatggggacctcaccctcacaattggtcttccaataatcaacctcccaattccgaggatataaaatttgaagaacaaccatctgcaaaaagttaatatcacgtcaaatcgcaaata

SEQ ID NO: 294084 - DNA, 600 bp, Cannabis indica
atcaacataaataaaagaataacacattaattcgtttataatatcaagtattatcctatattatatataatcattttgaatatctctacaatatatattaaaaaaataattttacataaattcattttgaatacctgtgaagtattatcctctaatatcctatactataatcattaataatgttcaaaacaaaagtactaaatatacaaattaggtgagaaagaataagtcaacaaaaaaatagcaaaaacactacccccgccaatggaaaaaaaaaaccatacagtacttatataattaaacaaaatatatattaaaaatgagtttttttttttttgaaaaaaactaattaaaaataaaaaatttgaacaaaaaatagatattagcattaattatggtaccgttagtaacacttttattttttaattttttaatcacaaaataaaagtaaaaattttgtttttgaaaacaaaaataagttatgtaagctacttttgtttttcaattttaaaacagagaaaataaaagtgtgttctgtaaagttcattttcatttttattttttattttatttaagtttggtctaggtccggggtcaaat

SEQ ID NO: 294085 - DNA, 496 bp, Cannabis indica
aaacccgaacccagatgaaaacctagacatagagctaaacccgaaccgagactaggactcgaacccgaacctagaccagggcccaaacccacacaataactgagacatggacccctaatccggatagggacctgggaaacagaagtaggaccgagacctagtacccgaccagaacccgaacttgaacctaggacccagctcgtgacccagcacaagaaatagaaccacactgggacccgagattgggatcctgatctggacctagggcttggacaaaacccgtaatcggtgtcaaaatttgggacccagccctggacccgaacccacacctagacctgaacctagtcccaaaccgaaaagtggacccgaacccgtaccctgtgacccaaaattggaaccaaaaccggaagttgaccgggacttgaagtaggacttggacttcgaatcataaataaaattagacctagatccaaaaccgtaacccgaccaggacccg

SEQ ID NO: 294086 - DNA, 596 bp, Cannabis indica
tttttaaataatatattttttaaaataaataattcttaaaaaagagattaattatttttttaatttaaagttattggtaattaaatgaataaagttttttaaataaattagtttaaactataataagttattacttttttttatataaattaataaataacataaaaattaaaatatttttaaagagtaatttgttcatttttttaatttaagttgtaattataatttaatgaataaaatttttatttaaatgtgtctaattcataaaatattcataaaattttattaatgttgaaaagaatatctcaatgctttggtatacttataaatatataccatagctttgttatatttcataacactttacaaatcattcaaatttgtaacactttatttgtcgcctaaattgtagatggcgacaatcgataagtcttggaccaaaatcagaaatcgtggttgccatgaattttggaatggtctacaagcctttttagcaatggcatcagaacataaggattgtgatggaagaattcgatgtccttgtgtgagatgtataaatagtaggtttgaaaaaatagatagggttagagcacacg

SEQ ID NO: 294087 - DNA, 439 bp, Cannabis indica
agatctaagatcctggtaaaataatttctaagaacatcaacttgtactacccaaaggtataaccaagcataatatcaacatatacttagcactctagtcatactgatgtggtagcattggttcatacttcttaaatttccaaacacatataatcatgatatgcatgcttgtgtatataaactatcgctacaactgatgtgtcatcaatctggcaatataaacatgtacatatgtatgtgtgatatactagtcttacctcaattccaactttaggtgtaacattgaaccttagtggaaagaggtgttgatgattgaaggccctaagtcacatttaaaaaaaaaaagctgattagtattttctccagaacacttttggattctaaaaaaagaatctagggttttctatcgaactacatggtgaaaataccctaaaataaaa

SEQ ID NO: 294088 - DNA, 650 bp, Cannabis indica
acgatgatccgactgccatggcagaatatcgaagaaaagcttatcgccggcgttaatggagatcaacccaaagttcctagtgggcattcatggaggagatcacaaaaaacttttacatctttggtggctgttaatttcagatctccatcacttgattgtttgggtggagtgttgcctccaatgaagaacaactcactttattttgctcttttaagaaggagaagttttttggggaagaagactcccgtatttttgaaaaaaaaaactttaatttttctaatttggtttattttctcttatagtaataaaaatgtaaaatttgaccctaataaggctatatatgaaaaaatccctattataaataattactactatatcatgtataatttaatatactcacattttaatattaaataaattaaataaccactatttagaatttaataactattttttacccatttatttgttgtatttacttcccatttttacatattgaatttatttccttattcaaaactatattttaaaataaaaatttacacaaaatattattttgttaaaaaatattacacttttacagttcaaatattttctttctatatttttaccgtaccgtagtctataaaaacaacacgaaaacaataaaa

SEQ ID NO: 294089 - DNA, 659 bp, Cannabis indica
gataggaaattgtttttaatcttgttttatttaaattaatacatgtttaattgatttatttttaaaaatacaaaattaaacttcattcgacacttgttcaaattttcatcttttttaaattttagtttttgtttcatgaataaaattaaataataaataatttaaacttatatttaatgaactaaaacaaagtaaaaggaatttaattaaaaaaatgactaaattatgtaaaacaaatagttatcataaacattttcaaaatcaaggatcaaatgtgtgatttaactaaaatgcagggatcaaaataataggatagagtaataatatgtgcagacaaaatttaaaccaaaacattacacacctatggaatttggtgaggattcattttttccaatttggttagggtaaaggtttttgtccaatatgcaaattgacaaaaaaaagtgttttggttaataaaaaaaaaagttaggacgtaattaattaaaactacaatttatttttttgtttttccctaatttatttttgtttcttcatttgcatgaaaacaagattttctaaattgtacagcattatgatacacaattttatattgcaacgttcactatatttgaaaatatataaggtggtcataggcatagcctagtggtttcacactt

SEQ ID NO: 294090 - DNA, 521 bp, Cannabis indica
actaggattaccgacacctgatcaggagcacccggggattcagaatctctgctattgctggacaacaggtaagacagtgattagcacgtagagtatgcgcagtggcgcttatattgaaaatgatatgtatgattgtttagtaaccgggattagggttattaccctaatatgagcggttgatggcctagggttattaccctagtgatatatgtgtataaatgccatgccatgttaaatgtaatgagatttagggattatgcactcaaggcataatcaggttggactcggtaaccataaccgagatgaaccattctaaggccttattgtatttagacgtgtgagagcaacacgtaggtctacgccacgtagatataaatagatgtgtgagcgcaacacataggtctacgccatgtagacataaataggcatgtgagtgtaacatgcaggtctgtgacacacagacatatatgaatggcattattgtttaaatagtataatgagcatattaatattgttatgtt

SEQ ID NO: 294091 - DNA, 793 bp, Cannabis indica
aattagttaatgtttttactgaataattttttagttaaggtatatattaattaggtataaggtagaatagtcaatagcaaacaaaactcatccaacctcttcacactctcttcttgttcggctaaaccaaggaaccaaggaaaaccaagattttcctcaccaatttcaaaccaagcagtagggatttcagcaaaggaattcaagaatttcgttagccaaggttgaggtaaatttcttctcactttttttctcttcaatttttaagtgaaaaagttaggtttgattatgtaattttaggctgaaggttctgttgagttaggttattaatagaattgagttctagggattaatttatgtttgtttgagcttgttttgggaagattgtttgttgttggcaaggtttcagctaaatttgagttttaagctcaaacttagctcaacaatggcagattttgattcagagctttgtggatgcttttatttgttgaaatatgattattgatgttctcaaaatttttgggaaggttttggattcgatttgaggtagttttgggattttggggaaaacctgctgtaaaaatagcaggttgttcttgtaaaatagcctaccgtttttccaggcagaaaacccaaaaaatggcctgtcatttgctcagaaatagcctaccggtttttggggtacttttccttttagtgtttattttatgtgtagggtttagtcacactagttatcgataaggaatcgtagtttcaagtttaagtcccaaagtgatttagcggatcacttaccagt

SEQ ID NO: 294092 - DNA, 758 bp, Cannabis indica
ctcattggccttggcagcagcctcccggcgctcagcagcctcctggtaaaagctgcctctccgcagtaaggtcctgaagaaccttcccaacttcgttcatgtccccaaaatcagacagaacgaagccatggttgattatgttcttggagaggcggccagcttcagcagcaagctaaacaacaatgcaagtgtaagaaagaatctccaaaaaagaataaggggaaaaacaaaatcacgaagcacttaccacagtgagggagtggctgagatcctggacctggaagatggagttcagggaggcacaagtagcgaaccgcttaggcgcgcaccgggtaagctgagacgcaaactcgccagtcatctccgcggcgaagggagccaaggtgggcccaaggaagcgacggaaccagtccgatagggggtccaaatttaggtcccacggatcctggtactccgggttgttgatggtgtcttgcacctcaacccgcagaaccctcctaagggcttccacctcagcaaacccccgggagtattcatccatggcatagttatgcttagctatccggagctcctgcctcgcctcgtctccaggaaccggagtcagcacaatgttgggaggggcagtatgctcttccatgggagagaccccaccatcaagaccgtgggccggagtatcagctctccgaggccgcttgggctcttcctgggcaatcattttgcccttacgcttgcgaatcagagcaatttcttgctcttct

SEQ ID NO: 294093 - DNA, 620 bp, Cannabis indica
tctctcaatctctctttgattctctatcaatctctctcaatttctaaccccctctctcaatccctctcaatccctctctttttctcttcaaaaaaaccaccaccaccacctccaacaccaccaccaccggcggccaccaccaccatcgacggcggtcgagctacgccagccaccaccgcagaccaccaagtcccacttcctccaatttatttaaggtatttttaatttttttaatgtttatatgtatagatttgtatatgtatgtgtgtattagtatatgaatgtgtatatgtatgtatttctgtatgtatgtgtatgtatatttatgtgggtataaatgtatgtatgtgtataaatacatgtatgtatgtatatgtatgtgtatgtgagattatgtatatatatgtgtatgtatgtgtatgtgggtgtgtatatatatatatgtgtgtatatgtatgtatgtatgtgtgtatctatttatgtgtatgtgaatgtgtatgtgggtgtgggtgtgtatacataagtatgcatgtatttgtatgtgtatattggtgtatgtatatatatatgtatgtatgtaaataagtatgcatatatatgtgtgtgtatgtatgtaaata

SEQ ID NO: 294094 - DNA, 576 bp, Cannabis indica
gaagtacattttgtgcaacaacccttcctatctgatagaaaaggatcctatgatcctgaaccaatcgacccaatgctttatttctgtcctagttgatcctgattcgacattagaagtatattgatttttcagcaataaccgaatacttttgtctgtaactacgaaatatttgattccatccataaattttattccctatgagttctagtctcaataagactgttaggtcttactgttcatatgttatgatatagaatataccacaccaattcgttatgtatggatgatgagattccattgacacagagccaattccaatagacttattggagggtcccattggcgtgcatccaataggaattgaacctacgaatttgccaactataagttgggcgctttaaccatttagccatggattcttagcggggatcctcgtacatggtgaataacaaaattccaattgaaatgaaatctttagcgtaaatcaatgcaatttaggaggacgtaatcttaatgaaaggacatcaattcaaatcctggattttcaaatttagagagatattgaaagagatcaag

SEQ ID NO: 294095 - DNA, 1016 bp, Cannabis indica
gaagctagcaaatgaaaaatctatttgaggtgcttgatgaaaacagaacacgcaacacccataaaacttttgtgcacactaccacacaacaaaaatatgggtccaaacctatcaagaaacagtatatatatccaattgggaaccaatgataactagatctacttaagtttttcaaggatataatagtgtctcctcctatctacagagtgcagcaaatgtggacaaaatagaaataatagaaagacgtgcaagaagatggcaaaagaagatttaaaacctcactacatcaactatcaaactactacaataaaatatttagttgttgggataaaattttattagttatttcatatttcatatagttctttaattttttttatattgttattgatacaaagatggttaggtcaatggtatattgagattaattaaatatagtgattacatacaaagaacatttcaatattttcgagatgatattgtctataagtttcttaacattatatggtcatttaagaagtgtgtgaaaaaattggtattttaaaagaaatataatacgtatataacttaatctttttaaagatattggatcaatatcaattatatgctaatgtttaacaatgtttagtttaaaaatattgctatgagattgttttatgttatttcttgtttaaaatcttgtatgagataacatggttattgttggccttgaaaagtgattagccgacagtgagatcatatggatttgatactttccacgtgttacacaaatagaataaaaaagtaaagagcacatagatttgttatagaggttcagccttcttttataatgggtaatgatctacttcccttttagttgtattaatactgagggttaatactattcagattgctataggagggatcttatatagcacccttaagggtacaaagtatgaatcaggattggtaaatctcaagtgttgagagggcttatatgggtgtgagagagagagaatgaagaagagaagagttat

SEQ ID NO: 294096 - DNA, 625 bp, Cannabis indica
aaaaaatatatattaaaaattatttttaaaaattattttaaacttcattttcttaaatattagggtgtaattataattttgttgagtgtaaatggaactccacttacaaattttagttataatattataatcaaaactttaatgaatataactccactaaatgtacgtctttcacaaaatattaaaaataaattatccgtcttaaaaaaccaatcacaaaaaattaatgcatataatatataataatatatcttttttgttttccttcctcttcatttttttcaattttaattgtttatattttactaattttcatttctatatatacacattaaattataaattaatacctaatcatgtcacgaatttgagaatattatagacacgagtattttttcttatgtactgatattgataataacatagatatattttctaaaaaaaataaaaaaaaaaaaagattatatgtaaatatgtgcacatgtaattttgtaataattatatattcaacttgctactaaaaataatacaacaataatataattttacatacatattatattgcaatactaattatgtttatatagatagtatactcatgtgaggtgtggtatgaggtgtttaa

SEQ ID NO: 294097 - DNA, 591 bp, Cannabis indica
cttttgtagtcttctattaatcataagggaataaaaagagcctttcaaacaaatcatgacccatcaaacaaatctagatggaaaactcagactattaagcagttcttctaaaaatacccaatcaaccatatcatacgttttactgaggtcaatttttaccgcacatataggagaaatgcttttcctcccaaaattcttgatcacatcttggaggataagaatgttatgggaaattgatctttgcttaataaacactccctgattcaagctcacatgagaaggatagactttttccaatcttttacacatgcttagtagtacatttataaataattgtgcaacaagctacaggcttatagccaatagctttgcttgacatgtcaactttagggagtagagtaatagctatctcattaaattgatgaggaatagtacctgtataaaaaaaaatgtagaatagctctactcactttccctctaatttcaagccacaacaccttaaaaaaactctgagttataactgtctggtctagggcttttggaactaaggatgttgagcatggctgattcgatctcctttactgtaaaaag

SEQ ID NO: 294098 - DNA, 653 bp, Cannabis indica
ataataatctttttaatataaaaaaaaattaataaatgaaaattttattgtaatatgtatacttaaaaaataaatataaaagcaaaaaaaaaaatattttgatgtacggtcaatttgagtcattgttgcagcaacctatggtgtacggtcaatttgggtcattgttgcagcaacaacctgtgtatggtcaaatgggaggatctccacaacagcctatgtatggaggcttttttagtgctcagagtcagcaacaacaacaacaaccaattttggttcgcccgcaccctcgacaatatgtggagatcttacctacgtcgcagactggacaaccttattaccctgccccgcctgctcaatcccgtgagaatattgatggttcaagacttagctcgaatgcagatgaatttttagagtttactgatttgaacaatgatagttaagaggttttaatataacaagtcttatgtttttaaagtttatttaaagactaatttcctaattttatttaagataatataatttttattgtaatagacaaattaattttaatacttaatttcttaattttaatgtttaatgcttcaattttctaaattttggatattttatttctaattaatatatttatttatgaaataattattataaataaa

SEQ ID NO: 294099 - DNA, 550 bp, Cannabis indica
cataggtatgccctcccgtaactatagttgggttaggttcaagatacaaaacaataataaaataattattcaaaaaataaatatctcttcacttatcatttttttactatattttcggagcagctctaacagcactcgtccctcgtatttagcagactcggacggtcatgggtacctgaggggagctgattgggtcggttcgtgcccatcaagtccttgagataatttgacagctgaggagccccttccaccttagcacctgacaattgcaccttggcacctgacggagttgggagcttagtgcgcccaaaatgctcctccttggccaatgtgctcctccatggccaatgatctcctccttggcccatgagctcctctttggcaaatgagctcctccttggtccatgagctcctctttggcccatgagcttctctttggcaaatgagctcctccttggtccatgagctcctctttgccaataagctcctccatggcccatgagctcttctttggcaaatgagctcctctttggccaataagctcctccat

SEQ ID NO: 294100 - DNA, 554 bp, Cannabis indica
caattctaataagattcattactttaaatattttaaacaaaacgtctacttttcaaagtgttcaaaatgtttaatattttcaacattgctgctgtttcttgattaggttataactttaatacaatgcttaaatgtggaagagaatcgtaacaagtcttttgtaatagatggttctgatactttattgcgatttttcaaaaaagcaatggagttggttggacaatttttgtataacgagacgaataagaaggaaaggaagaagacaatattttatttgaatgatgaaatcgaagatgaattagtttagcatatcatcaatgaagttcttcgtttcgaggtaagcttttttagacctgaattcatccctatagagatcaaaaactttattaaactgtttcattcaaaggtagaggatccggaaagtaaggtttccaaagaaaaattgaaaagaatccataataagataaatgagcaatggagtaattgtattgatcaatatttggatcaagaaagtaatgtatggtgatagctgtgattatgttttgatgagtgga

SEQ ID NO: 294101 - DNA, 703 bp, Cannabis indica
aaaaggatgcacggatctggtgggaagtagtaagacagagtcgcaacataacaactatgacctggttggactttgttgatgtgttcaacaggaagtactacagtgccgccatactggctgcaaaagaagatgagtttatgaatctgaggcagaacaatctcactgtcacggagtatgctaggcaatttgaccgtctggcaaagtttgcacaagagatcgtaccaaccgaggcccttcgggtcaaaaggttcttgaaggggatgaaccccatgattaaaaaagatgtgaaaatcatggtggggaccaacacagtttatgctgaggtgttagaaaagctcttgaagctgagttgctcgaaaatgatataaagaaggagaatgctgctaagtgggaagcccgaagaaacaatggaggaaatcaagagaataagagaaaacacgagggaaatcacagtaatgatcgtgattaaaaggggaaagcagtggtcaaaaataacaacaatggggtgaaaaggataagccatgtgacctgcttagatgtggtattgtgacggaattacctcgggagaaaccatgttatcaacaagaagaatgcgagatgtacctatcataatcgaaagcaaagaactacatgggcgacctaatagagctggaaatgaaggaatatgatgttatacttgggatgaattggctatctagtcacg

SEQ ID NO: 294102 - DNA, 611 bp, Cannabis indica
atcaatgttcaaattcccataatactgtttagtttccacatatagtactagaacaattccagccctcagaattagaatataaaaaaaaaaatactataagaaaaaccgaagtcttacctcataataattaacaacagagattaattccacgattgaagcataactcagtttctaataaaacgtgaagatttgcagataaaaaaaatattcatatatgtattaaaatatggagttattcttacgaaactgacaactttctcagccacaaaatcttccaactctgtttttccttatcacataataaataaataatagaagacatttgataacatttctatgttttaattataaaaataaaagtaaaatttatgttattaaatataaaaatatgttttataaatatttattttttatttatttaaatcagtccacatttgagtttagggcttgagatatggtaagtctaggatttgaatcgtagtccaagtccttagattaaggttagagttgcagcttaaaatattaattaaggaaaaaaaattaattaaaaaattttaaaagtaattttttttttgttttcaaaattttaaaattttaattttacagaatat

SEQ ID NO: 294103 - DNA, 362 bp, Cannabis indica
caaagaatcaatggctggaggtatttctatctttaagttttatcgtgtatatattcgtttattccgcattttatatacacattcatatattttatattattcatataaaatatctaacagttggtattagagcatatcatatatctctgtcttgattatgcatatgttcgttttcaaaattttacgtgcagatacatgtatatatacatcatcagattgaagggaaatcttgtttttaattattttgatacatattattgttagaattgatttttattcatcaattctaatattttctttgcatcaaaaattattatatatatacaaaattatcatttttagagttggtatatatgatacat

SEQ ID NO: 294104 - DNA, 545 bp, Cannabis indica
atatttttcaattcgtcaagttgggcatgtacggctgggctgacctgctcggtattctggtcgatttggattacgtcagcgtctttctgagcggggatttgagtatggactccaggctgcacgatcgctgtagcattctgctcatctattccccttcttctgtttagatcgttccttaggtcatgggttgctccgaacctttcgaacacagaagagcctggttgccttagcgattaattcgcttggttgacaggtggaatagcgccattagtctggttggaactgtcagatatgactcctcctgatgaattaccagacaaggtctgaccattagtagtctgggaagtattcatcgttgggtcatcttccgtttctcccaggggaatgacattccgcgaatgctgacctacagtttggtaggctcttcgtatcagcacggtggcttaccgactacgatcttcgatctctgcatggtaagcccttaatgcctccatctctttatctctccattcagcgaacatacgcctttgttcgtcaaatgcgag

SEQ ID NO: 294105 - DNA, 640 bp, Cannabis indica
ggttttaggaaaaaatgacctattctaccaatatttttttttttcgacgcggtgatcaaaatcacacatgattaataacgtgacaatccataatcggcagctgcatctcctcgaaccaggatagctcatcgtctaaccgaaggactgctttgccaaactatgagttgcagaaattcttatcgcaagccacataggacaaaactgcccccggaaatttagacaataaagctataacatcctcaaacagcactcccagctcattaaaacacccttcctttattgatagctgaaaaaacaaacaacaccaagcaacaacaggtattagaagagacaatccttgaattaaacttaccgacaaagtctctttagtcatagggcaccctccacaaaattgaccttcaattcaagaggcatccgatgtaaacaaccacctggactaaaactacctacaaaataaataaatatagaaatgtggattagcacactatacaatgataatgttgtgaatttttaaattgaggataaaacataattattattataacaaaataaaacttatctttgaagaatttttccactcaaaaaatcacaatgttatgtccaattattagagctaagtatttcgagaggtagaactata

SEQ ID NO: 294106 - DNA, 322 bp, Cannabis indica
atattaattttggggttaagatttcgtatatatatgtgtgtgtttgtttatttgttggatttggatttgtttgaattggtttgagctttgttttgttgttttttttttttttatgatttggatggtggtggtggtagtagatgactaaagaagatgaagaaaaagaagatggtggtggtggtggtaactgagattttgtatataatatatatatatatatatatgcatgcgtgtgagtgtgtgtttgtgtttttttttttttttgaataggagattgactgagagaaagagaggagatggagagatggagatgacgaacagt

SEQ ID NO: 294107 - DNA, 646 bp, Cannabis indica
gactccaggtttgcctggtgagcttcctctaaggacttcaccttggcaaccatttcatccaaggcttccctagcctcccgaagctcacgcctggccttagcagcagcttcgacctccgccctcagctcctcttggtgcctggcctccagcctatctctccgaagggcctcctcccggatcatcgcctccgcttgtgcctccctccgcttggcctcttcctcactggccttggcaagggcctcccggcgctcggcatcctcctgataaagccgcctttcagcagtcaggtcctgaaggatcttcttgacttcgtccatgcccccaaaatcggacaggacgaagccatgattaattatgttcttggaaaggcggccggcctcagcagcaagctgggaaaagatacaagtatgagtaagaatctctaagggaaaaataaagagaaaagtaaactacaaaatacttaccacggtgagggagtggctgagatcctggacttggaagatggagttcaaggatgcacaagcagcgaaccgcctgggtgcacaccgagtaagctgggacgcaaactcgccggtcatctccgcggcgaagagagctagtgtgggcccgaggaacgaccgaccaatccgacaagggatccaaattt

SEQ ID NO: 294108 - DNA, 594 bp, Cannabis indica
aagttgttatgattgataaattacccccttcgtggaaagattttaaaaatactctcaggcataaaacaaaagagttttcgttggaaagtctgatcactcgtcttcgaattgaggaggaagctcgaaaacaagaccaaaaggaagaggtgcttgttgttggaaacaacaacaacactaataaaagatccactgctgttctgaaacccaatgggaaaaactttaagaatcagaatcgcaaagcgaatccaaaccgcaacaatcaacctcgaaccaataacaacaatcagaattggaaccatcaaaggaaccataataacaggcagcaaccaccccctaatagaaatgactctggtttgttcatgtgttacaactgtaacaagccaggtcatatggcacgaaagtgtaagaacaggcctagttctgctccgcaggctaacctgacagaagagctgccttttacagctatgatttcagagatcaaccttattggtggatctgaagggtggtgggtagatactggcgcttctcgccatgtctgctatgatagaaatatgtttaaaacatatgttgctgctactgaggatcagaaagtgt

SEQ ID NO: 294109 - DNA, 563 bp, Cannabis indica
aataaagtcttacgacacaaccccgatctatacctactaggctatgactagtaaagtctagtgacgactattctatgaggaatcacatcagtcaaaagggattaaggaccactttcataaaatccctacagcacctagggattagaccatgcattacccatgatatattcattgggaatgtacaactttactgatagttacagaaatgcatgtaccttaattctagggatcaccccacaaaaacactataaataccccccaaagctcattaaagaggggtcgagaattctgggttgcacaagtgctagaagagtaaaaactcaccaagaacattctctgtattaaatactatcataaatacacagactcgtggactaaggctcattaacaccccaaccacgtaaaaaatctccttcttaatttcttgcagctctctaaattattattattttattggttgccgaaaacctcggtcaacatttttggtcctttcattgagagctgaagaaagcgtctgtaagtaaacactgcgttacacaacacaacaatggtggagactcgaa

SEQ ID NO: 294110 - DNA, 620 bp, Cannabis indica
ctaacgtcataatcaatccacgactacaacaagcaacaacaatgaaaaaatggtaaattctcaaataaactaaattcattatattatcgaataaaccactaataaaaaattacaacatataattacttataacaatatattattataacatttctcagggcagagaagaataaattaaaaataaaaaatataattgcaaaaagttgtacatatccatcagcctcttcatcatcagttggaattagagaaattgtaaagatcggaaatatccaatatttaatgacagcattacaaccaacagaggtaaaatttactttccatatattaataattatatctaaaaatattgctaactattttatataatctaattatttagattgcaaaattctggatacaaggaaaagttgttattacaaatttatcacaattctactacatgtcatgtcctggatgtaacaaaggagccaaaaaaactacaatgaaagatttctttgtttatgtggatatgaatcaacagctacaccacggtacctatctaatctaataaatataaatatcaaacatatatttaaaatagaatattaacatatatataaattgtactatatttgcagtgc

SEQ ID NO: 294111 - DNA, 878 bp, Cannabis indica
attaagttttgttttttttttaattataatatggttttgaattgcatgatattattttaatttatcgtcatttataaaatttcatgatttagttaaaaaaaaagatgtaattcttatttataaaaataactaaaaaaaaaaaaacctaaacatggtcatcaagagtaataataaaattgttagacactaattgttggataaattgattattaatcatcaaaaattaagtatatatataacgtatattaaacttcaatttaaattcaaaaaaatatttataatacttaacatggacaaaatcataatttattaaaatatctaattatgataagtaaattatcacataacaattaacaaatgtccaatcaaactaactattaatccaagtatttataaaatacattaatatttgatcaacacaactattaatccaaatatttataaattacattaatatcccattaacccagctattaatccgaatatttataaaatacattaatatccaactattaattcgaatatttataaaataaatttcttagtagacaaaatttagccactatattacatgtgattgctagctgtacttagatgaaagattaataaaaaaagtgtgggtcgacattggtctaaaaattttgctaaaaagagacataaaaaaaagtcacgggttaatataaaaaaaaagtaatatatttaattatttattttgtgtataaaaaaataaaaaaaaaaattcattataataaattatatagcactaataattaataaccaatcctcatgaaatgaagtaggtctacgtactttattttgttttggtctattatttgtcttttagttatatctctctctctttttttttttattattat

SEQ ID NO: 294112 - DNA, 937 bp, Cannabis indica
gagtacgaaaagcagttttgggaatatcctcttcccgaatcctcaactggtgataaccagatcgaaggtcaattttggagaagatggtctttccctgtaactgatcaaacaaatcatctatccttggcaaaggatatttgttctttattgtcaacttgttcaattcacgataatcaatgcacatacgtaacgatccatccttcttcttgacaaacaaaactggtgcaccccaaggagaggtactcggcctcgtgaatcgtagatcaagtaggttctgtaattggactttcaattctttcaattctaccggtgccattctatatggagccttagaaactggctcagccccaggtactaattcaatttcgaagtcaatctctctttttggtggtaatcccggtaactcttccgggaatacatctggaaattcacatactactcgaaccttttccgacccctcaggtgtatcttttgtggtatccaacacactagccaggtatcccatacatccttctcgtaataattccctggtcctaagtgccgatatcaaaggaatccgagatccctgcacctttcccataaaaacaaatggaatctcaccctctggttcaaaagtcaccatttttctcttacaatctatagtagcattgtacttagtcaaccaatccattcccaggattgcatcaaaatcttctaagtctaattcaatcagatccactgacaattctctcccttctactaacactgggagagaccttacccacctcctggagattaccacttctccagtaggtaacaaggtaccaaatccactagacatgatatcacatggcctactcaatttctcaatgattctactagaaatatatgaatgtgtggcaccagaatcaatcaaaatagtaaacataataccaccaatagatatctcacctgtaac

SEQ ID NO: 294113 - DNA, 1524 bp, Cannabis indica
aatcctctccctcggagtgtggtagggtcttgcgttcccgaaacagatgttgggattggtgtgaatgaggaggttccggccaatttagaggttccgaccaattttgatgttccgaccaatgtagggcaagaacaagaagcgacaggatttcatcagtttgaagagttcgatacacccttctacaataacgatcctattgtagatttgaatatggacgatgaacatgatttagcagtcgatgaacccgtagcgggaccattgttgaggttagagtgtgtaccgagtaaccaaggtacacagcgagaacgacaacctcgtagtgaaaatcgcactacacctggaactagcagtagtcgaccaggcagaactgaagaacatgctcgtcatgcaacgttctcaacgttctcctcttttgaagtttgtaccaagttcaaagctcccatgtggacaaaggaagatataatggaaaatcatgagctaactacttgtttacaaagtaaggaagcaggggtgatagagcttggtaatttttatgaaaacaaggaagaactgagacaagttgtgggtaggtttgcccttaataacaatttcgagtggatggtgaagaagtcatcccctgatgtgttgtacgttacatgcaaggctccagattgtaaatggagattgagggggaggaagaagatgcattctgacaactttgaggtcactgtatttcacaatgaacacacatgtaacttgaatgcgagacgttcagatcaccgtcaagcagcaccatgggtagttggccaccttattaaggggaagtacacccaagacggaactaagtacaaggctaaagacatacagagggacatgtttgacaactacggtatcagtatgagttatgtgaaggcgtggaggtgcagggagatgggacttacgtatgctaggggtacgcctgagttttcatacatgaagcttcctgggtacttgtacatgctggaacagaagaatccaggtaccattactgacttgtacttagaggatgagcggttcaagtactgttttatatcactcggtgcatgtagaaggggcttttctttttgtcgtcctgttttgagtatcgatggcaccttcttgaagacgaagtacggcggtataatgttagttgctgtggcatacgatgcgaacaaccaattgttgccggttgcttatggtatcgttgacagtgagaataacgactcctggacgtatttcttacagaagttgagggtagcaattggcgtggttgagaacttagtgtttgtgtcagataggcatcaaagcattgatcatgctgttgaactcgtttttcccgaagcagtccactgtgcatgctatcaccacattgttatgaacgtgaacgccaaattcaagactgatgcttttcacaaccaaatatataatgttgcttacgcatggtcgaagactgaatgcgatagagagttcgagaagcttagaaagatgaatccggccattgctgcatatgtggagagtatagggttt

SEQ ID NO: 294114 - DNA, 498 bp, Cannabis indica
aaattttggctcaaaactatggtttttcaagagaaattgttgaaatttgttgctgttgtattgttgatgattgctgtagtttttcagaggttatattatgcatgtttaactaggtttgaactgatttggatgaatgttagttagatttaaccaagtttgagttttgaactcaaagctttgagctttaatggcatttttagtatttgtgtgttctgggctgttttgatgatttggtattgttctttggggtatttagaacaggtctggaaggtttggtttaaattgggtttgaattgaatgagttatgaatttttgaaagcttcctgcgaggaaccggaattccggttgtgcatccggaattccggatggggttctgaaattcccagaaccggaattccgtttgggagattttgaggaaccctagatttttctcgtttttatgttatttggggtattgcgatgctttttatcgatagggaaacttttagtttctagttt

SEQ ID NO: 294115 - DNA, 665 bp, Cannabis indica
agagagaacatcaaagtcactttgaaagccttcaccaacacatttgtggaatttgatgtgtctttgcattcttgattcctcattgcttcaagatgcttagtcaactcttcacaatttcgcctaacatgtccctttttgtgacaatagtagcactccacttctctcgaaaagcgtgaatgagtgtgattgtctcttttgtcattatatcttcctctcgatgtactcctaccacgacttgattctgatcttgtcacaagatcttgatcagtatgagacacaccacttggttgcttgatactatctgtctccaaaagagcagttgacacctacagttaaagcggtctttccaaccaaaagtgtaatcactaatgtctcatatgattttggtaatgatgccaacaaaataatagcttgatcatcttcatcaattttgacctctacacttaacaattgcgttatgcacttattaaatttatttatatggtccctaacatcttgtccttcaaccattcttaactcatataactgcttctttaaatataatctatttgttagagattttgacatataaagtttttctaactttttccataactcagaaggacatgtttcattcaatacactatactttaattcaagagccaaacttaaacgaatagtgctta

SEQ ID NO: 294116 - DNA, 772 bp, Cannabis indica
atattttggagaagataagcagaagaggagcttgcgttgatagccatggcagaggaggtctggggtgttctttcagtgccacgtggaatggtacgaaagcagtgagtgagagggagagagttgttgtcatgtttttggtattgtctgaaaatgtagaaatctctaatctgaggctcaaacaaattgtgtccaccaatcacattatagatagctttatctctatcgctcaattaaaccgaaacgagtgaactcgagtggagcccaatttcttaggcccaaatttacgttatggagtaagcccaacgtgcatagtccactttatgttttaagcattaacatttttacactagatactaaatttggccttttttttttacattttattccagttagcttttttaaacttttttatattttatgtttttcatttttatatttaaaaaagttctttaattacaaatttacctttttgatgatgtcattcttcttcctcctccattttctttctctgttacatgttatttctctctttctctcacttctttttttttttttttcattttttgttcattattatttctatgttcatcatctacgattagatttttaaaatcgtcaaacttctgtcctaacccactcatttccaactttatttttcagtcacgaatccctctcttccataacctccctcttctttttttttcttcatttctcaattatttttattttgttgtgtataaatggaactactaggtcaggtttgatgtcctct

SEQ ID NO: 294117 - DNA, 511 bp, Cannabis indica
aaacttctgcgatataaccttccatcgtatatgccatatcgtgcagctcgctgtcgcagttttcttgcttccatcttgccatcagggaagatgcccttttcaagatatgcgactattggagtcatccaggggacttcttgagtggtatctatttccatgatcgcttcttgatttatctttgggtgagccaatacatctaccagaattacatcgagcaattcggcttctctggttgaggccaaacgggccaatgcgtctgcgtgtgaatttcgagcacgcggtactcgagacacgcttactcttttgaatttctgcatcagttcgcatacaatggctaaacacttaaccaacctcccgcctctggccagatactctccattcacctggcacactacgatttgggaatcgctaaaagcctataaatactcgattttcatctcgagagcgagcttcaatccttaaaattactgggactgattagtaagatcccaccaccagaaccttcgctatt

SEQ ID NO: 294118 - DNA, 403 bp, Cannabis indica
acgtgccgaggctaacgtaaatattagttttatttaaagcttttgtgttttttgttttttagatgttgataactaaatgtataattatatgaacgatgtgttttataaaagtaaattgtatatcattgtatttggtaagtaaaacataattgtatatataaaattataatatgtacattgttatctaaagtattatttaaccagtaaaattaaaatattactacaggcataattataacacattgttacaccaaaaattaaacaacattttgcattgattggttatttttttctatagcattaaaataagcatattgcatactatggtgccgtttggtaatacttttgttttttaattttttaatcacaaaatgaaagtattttttttttaaaaaaaaaaata

SEQ ID NO: 294119 - DNA, 597 bp, Cannabis indica
atcataatagccagtagacctcagcagatgtggaaacaacagtccaaggtagcatgatggcatcaaactgtgcgtcggtggtgcatgataaatcattatcgtacacccgaatctgccacatatcaatatctactcaacagcaacccaatgtttttgatgatcgaagtacaggacgaagtatatgaagttcaaatccttccaacatggcatgtaacggctctccatacccagatagtactggttcaccgcatctggccattcgaacgtacttctgtcaccagtctggcagctccaaatgcctatgaggaattgtggaagtgttgtgtccaaaatcacacctggctgagggtacaactctggaaaatgatggcgtctcctcctcatcaagtgtgatatggcatctatgtgctgcataaaaaaaagagaagattaatcaatgtcgtaaataaagtcgcgaaacgtcgcgaacaatgtcgttagataaatttgcctaatgtcgcgacaatgtcgtgacaatgtcgcgacatgtcgttaaacagaagtaaaaaaaaagtcgaccatgtcgcgagaatgtcgtgacaatgtcgcgacatgtcg

SEQ ID NO: 294120 - DNA, 855 bp, Cannabis indica
taagactcttaggaccgataacggtctagagttctgcaacgatttgtttaacatgtattgcaggaataatggcattcaaaggcataggactgtaagattaaacccgccacaaaacggagtagctgagaggatgaacaagactattttaaataaagccaagtgcatgctattccaagcagggttagctacgggattttggggagaagcagtactcacagcagcttatttgataaaccgaagtccatcaagtgctgtggagttaaagacccctgaagagagatggtccggcaaaccaccagatttatcccacttaaaagtttttgggtgtgcagcatatgcacaccaaggagatggaaagttagagcctagagttctaaagtgtgtatttttgggatattcagaaggaacaaaagggtatagactttgggtaagagaaaaaggttttaaaactattaatagtagagatgcaatatttgatgaaaatatttttccatgcattgctactaacccaaatgttttaggttcttgccctagtactaaccatgcaggtaactcaatcaacgttgatctaagacctactactccaagtgatgaacaaggagagaacactgttcaggtggaacagggagaagacactgttcaggtggaacagggagaaaacactgttcaggtggaacagggagaagaacactgttcaggtggaacagggagagaacactgttcaagtggaacagggagaaaatactgttcaggtggaacagggagaaaacatcgttcatgtggaacaaggaaacctaagggaaagtcaagcagaggagttggaagactaccagttgactagagacaaagttaaaa

SEQ ID NO: 294121 - DNA, 548 bp, Cannabis indica
tataaaactaatcagtacatctcaattaatcctaaattctgacggtgcttttcaaatgacgtcactgccaacactgtggtgaatggatcaactaagttgtcttctgtgtccaccttctccaccagtacatcccctcttgccacatattctctgatgatatgatttcatttctatatgtttgcttctcttgtggcttcgaggttccttactgttggctattgctccattattatcacaaagcaaaactagaggtttttccattccaggcacgactccgagacttgtgaagaacttcctcagccagactagttctttggcagcctctgcagcagctatgtattctgcctccatggtagaatctgaaatcgcggtttgtttagccttctccaaaccactcctccacccccaagggtaaacaccatcccggatgtagattttctgtcatcaagacatgcctggaaatctgagtcggtatagcctatgcgatttaaagcaccaccattgtagactaagacataatgtcttgtactcttcaagtattttagaat

SEQ ID NO: 294122 - DNA, 744 bp, Cannabis indica
ctgcttacactttcacacacttatgcttgacacagtttgtggtaaaaaaatttctatcctcgaaaatggtgttataaagctgttacatactgtttgatttgctttaatattcttggtgactgagtcaatttttcctgtgtaaccggtatgacctcattctactacttcattagcttgataaaataatttctgactattcttatgagtttgattttttcatcagggacaaagacaagcggacattgtgaattctagttacaaaaatatcaaggttattttatttttctgtcttttaataaaaaaaaataaaaaatttgtgaccgagtttgtcaattgagctttcttaaaaattcttgttatttttcttgttatgtttcattatattcttagacactattttttgctcttaagtggtgattagtgctttatgtgtctctttgtgttctcttgttcattatttgcaatatattttttttttttggggcattttttttgaaaaaaatttaaagaaaaaaggggggccatgtttttttcgaatctttgtaaatattttttcttttattttttcattttatggaaacatattttaattgtattctctattgtctgtttcctttatttttggagatttggtcttattttggtgtttttaggaaacttgtccttaaataattaattatttttggtttcctttttggtggaaatttcggatttggtagggtatttaaattcttagattttgtg

SEQ ID NO: 294123 - DNA, 552 bp, Cannabis indica
attacctttaatttaccaattacaattttctacttgacctttcctaacgtataccttaaaacctacaacattttatttttagtttaattacttgattcatatttttcgtatacacctactagatattgactcttaacaatttaattctagcttcgcccctaccctatctcctaaaaacaaataatacaccacaccccatacttctatagttgtatcccatagtaacaatatatacataataaacaaaaatagttgagtactttgatgtgccatattttttgatttgttgattgtttgaaaaaattgtttattcgatcatattattattttcgtgactattgttggtaaacaccaatttaacattttttaagcggtgatattttataattggttagtatatttcttaaaacaatatatattaaattataaaacattattattgagcattaataatgtataacatcttctatgtaagtgttactttactattaattagtattattttctaaaagttattacattaaattatatgagatctgatatttaattgta

SEQ ID NO: 294124 - DNA, 540 bp, Cannabis indica
ttgtacttgaagaagcagctttgttagaagcttcatgcttaatccttttcctctgattaaagtttgcaaaaccaggaggtggcattgcaatcagattccgttcatgagctcgtaattctgcttcgagcttatccatgtcggaagagttaaaattgttgatcatgtaagatacaacaaatccattatactctggaggaagactattaagtatgaattgaacccattgttcctttgataattcaattccaagtagatttgctttttggaacttcagattcatcatcaataggtgcgagtttatgcaactaccagggtgcattttcacactatagagttcatttgctaagacattgactaggagtgggtcggggtgtgggttattcatattggcactacaaatatcaataaacagaagtaaggttttggttcaataaattcatacacaagttcagaaaataacaagtaatcacatatgtttataaaaataccaaaattctaacatattttattttccaaggttttcaacaaactgatacagtg

SEQ ID NO: 294125 - DNA, 640 bp, Cannabis indica
ctcgaatcttattattataattatgaaccttgaataatgaagtgtgacaattcatgtaattaacaacacatatagcaacgtttatggtctaactaattaactctgctactcatcgcgattcacgagtagttgtgagatatatacaacacgtaactacactaccataactagcacatctacgtgttttattgtattcttttcattcttttcattctttgtacatcataacaaacaatatttagtcctaccacatttagtgttaagagtaattgacgacaaaattacatggattataagatttgtgatatttaatttctataaatttattttttaaccttaaatatcaatgtatactgctctacagtaaaatctttcaaactcttcattttttttttacacttttattaaaatattgtctgttaagtatatctacaaatcgtataattcatatagatttaccgctaatattttttttaattactgccctacttgaattagaatatttataaattacatggatataatcacctatatatattatatgaaattaattaattattataatcacttattttatttttttatatgaccatttatttaggaattggtaaaagacaaaaaaaaaaatataactaaaaaa

SEQ ID NO: 294126 - DNA, 584 bp, Cannabis indica
aataagctaaccggaggcctggtacaagtctcattaaccattcactaaatgagacttgaggggtaaatgttgcctcaaatttttcccaaaatacgtggcagtggccgagggtgacacgtggatctaaatcaattaagtcttgagcaggtaagtgcatctcatggagtgagcctcctggagacacgtctttactctctaggaggctagaattgtaaaggcatctccaggaaagaaagagattgtttgaacagtcactttgcatttaatgtcgcatggggggaaacatatcagaacctgcataaaaggatttgacagatggcgtaagcccattttacggcgattacacaacaatcgacgagtctagtgacggctacattatgaggactcacatcaataaaggaaggataaaagattatatccacctaacccctaagatacctacagtatgggtgatgtatttcctattttgtatctgttaggaatttgtgcccctaagaggctaacataaaaagacaagtgatccctttctagggatcccctccaaaaaatactataaataccccatagagagaatggaaaagggg

SEQ ID NO: 294127 - DNA, 594 bp, Cannabis indica
attgctgtgaatgtatatgtattgtctattagtttttttggaaggatggattgtcacattttttatttctttgagttaagcatataatattatatactttttacttttaaattacaagcttattaatgtaattcattcaatattttaattcacttacaaatataaaatattaatagtaaaattaagaaaaaaacaaaattatttttatgttcttaattttcataaaactaataagtaattttaaagtttaaaatatataaatagggcaagattatggtaggacctaacaaaagtttcctaccggtagggaacttttttggatcattgattttagatcatgtggttattaagatagaaggtatatactcttacaataggactgcttgtatacaattaaaactttttacatattataataatatttaattatatatgtattttaaaaataaaataatattaataattaaaatttattaattttaatttgaattattattttttttaagttaactctaatgtaaatcttgacaatctgcaccaatattattgttgttctaatttttttctcactcgatatattaaactagtgtattt

SEQ ID NO: 294128 - DNA, 569 bp, Cannabis indica
actataaatacccaataatttatttggattaagggttgaattttcttgtaatacttgctcaagcaaaaatagagaacttacactcatatattgtattcccaaggcttttctatctaaaaatacataataacatcgactcgttgactaaagtttgttaacactctaaccacgtaaaaactctttgggtttgttctatttatttctaatagttatttatttcttcaattttaatttagttttagatttcattagtttagttgtaaatatgatgatataatgctttgttgagcaatacaattgatcttatttataaaaaaaaaaaaaaaaaactactaacaataaacagtctttgatattatattataataaaattatttttgactaaatataatatttatatatctattataatttaaaataaaattattaatttaacataaatatatgtatatgtatttttaaaatatattatttactttttaaatacgggactttaaaaatataaaactaatcaaaattttaaaattatttttatttataattgatttaaattaagacttaattttttt

SEQ ID NO: 294129 - DNA, 971 bp, Cannabis indica
agctcgcccaggtacccatcctggtcgagagtaaggaggtgtgcctccgaaatcttggacgtcggacttacccacttggcgcccaaggcaccctgcctcctatgaggaaccacctcagcaagctcctcactgacgtagtctacgccctcaactaggacgtccccatcagcatccactggctgcccagcctcattgtaatccctaaagtcagggggtccaacctcttcctctccctccgcagcgggaggactgcccggacgcacctcatccagctcctcaacctcctggatctcagcgtcccccacacggtctccatcgggaccaccaaatcctgttcggcgtcgggcagagtggcgagccgagccacttgaggattagaagcgttggccagacgcgtgattttcttcgtacaagccatcatcctatggctgagtacggggtcagaagaatttcctttgctagaaggaggactagcacgaagacgaggatgaacttcgtacagaagttgaagcaaatcctggtcgatctgatgcccgagttcccaagactcacctgggttcatctacaaaagacaacacacaagatgagtgttggacggagtatcaaacgagaaacaaggaaatatgccgaccaagagtactcaacagattaaagaacgactatgttcgaagaaaagtcaaaactcaagaagtcagaaagttttcttgagttagggcaaaaaagttcatgaagcttggaataagcaagatggaagacagacacaatgcagttcaaaaataagctctacggctgaaagccaacataaggacatggaaaagaagagtcgcagaagtttctaaccctaaggtttcttaagcattctttctacagcttagttacattcaaagtgtaaacatacaaaggaaagcataaaggaaatcagaaacttactcacagattcgaatgtccaagttcaagcaagccagcaatcg

SEQ ID NO: 294130 - DNA, 605 bp, Cannabis indica
attaaatatagaattgtaactaattagattcttcttcagcttaatttttaatatttcattaaatattcctatttaagttttaaattggttatttctaactaatttttttaacaacttaaatttgaatattttttttttgaattttaatttaagttgaaaattagttatttttaactaattatggatcaacttgaatttgatattttttcaaaaaattaagttgaagaattctaggaatttgttattgagagattcttgagatattttttaagttgaaaatttgttaaattttggatcaacttaaaatggaatatctttttcaaattaagtggttacaacttaatttgttatttaattaatttttttttaaaaaaaaactatttaagttgaaaattttattattttggaacaactaaaattagatatttttcaattatatattttattatatgttacatatttttgaaattttatatattttattataaaattatttttcgaaaattaaatattgaaaattaaattagagttgaaaattaattttttaattaatttgtatcaactttaatttaattaattttcattattaaaatatatggattaaa

SEQ ID NO: 294131 - DNA, 599 bp, Cannabis indica
ttccagtcacccatgttcgataccatcccctcaacaccgtttatttcagaagtcgcccatttgctaaagcagtagaagccgttatggaggcccacgctctttatatcgtagaagtaactaaactcttctactgacggagccctatgggcatactccatgtacatcgcatagaaagccaatacagtgcgataactgttgggtgtcagctgaaagggcgatacgtcatatcgcctaagaatggctgcgacgaagggatgaaaggggaccgatacaccacatcgaaggatgggtattgagattaccacatcctctgtagggatgatcgcagggttggtgaatggaaggtgcgctctctgagatggtttaggacgttgaaacgcaagtcgcaacaaattcaacctcacaaaggtggtgaagtctgatttggcaaccctcgagactaaatcctcgcacgcgaagggctcgttcaattgggagtcgtcgaccgaatctgtcccactcccttccgcttcctcctcttccccacctgactcgcggactggagtcgtccattcctcctccacctcctcgacctcgatgtcgggagcatgcctcgtatg

SEQ ID NO: 294132 - DNA, 609 bp, Cannabis indica
ctctaaaattatttccctaaatctatacctattaaaattgcccatatatgactctatttgatttttccccataatactcctcccatttgaaaaacaaaatacccaatcaaaaatcaaaaattctctctctccctctcggtgaccacgcaacaccacgccgccctaccacgcccggccaccgacgaccacccaccaccaccgacaacagcctccgaccaccgtccgaccacgcacaacccagcccagccccccctctctcccaatcggacccaaacccttctctcttcctctctttcaaactgaaaaaaaataaaaaataaaataacccagggtccgatgggtccgatggttcggacccatggtccgaccatcggacccctgggttctttttttttcagtttgaaagagaggaagagagagggggctgggtccgattgggagagagggggctgagctgggttgtgcgtggtcggacggtggtcggaggctgctgtcggtggtggtgggtggtcgtcggtggccgggcgtggtagggcggcgtggtgttgcgtggtcaccgagagggagagagattgattttgggatttatttttcaaatgagaggggtat

SEQ ID NO: 294133 - DNA, 496 bp, Cannabis indica
gttcgggtccagattttagtgtatgtccagatcaggctctgggtgtgggttagcgtcctgtgtcttggtctaggttgggtccgagtcccaagttccaatcccgatcgaagtttggattcagttcttggtctgggtctgggttagagtttgggtccgggttcgggtctagctttgggtctgattctaggtgtgggtttgagttcaggtccgactccgtgtcttgttttgtgtcaaggtctggacccctatctgggtctatattcgggtctacgtccaagttcgggtaccgagtgcgggtccaagtttgggtctttgtccgagtccaggttcgtatccggatccctatctaggtccaagtttatgttttggggtcgggtcccagatttaggtccaggtccgagtctcagttccggtctgggtacatggccgtgtttgggcccgatttccagtctcagtttgggtctgaggctaggtctgtgtttggtgctaggtctgg

SEQ ID NO: 294134 - DNA, 764 bp, Cannabis indica
aataaggaattaataagttagggaatttacttggtaaattcggttcgacttattggaagctcggttatataggcccatggtccccatactagttgagaccatactgcttgtaagactcagttaattgattttaattaatcaattataattctaaagttagactatgtctactttatgaattttcactaagcaagggcgaaattgtaaagaaaagagattctaggtttatttattaattaagagactttatatgtctaaattaataaatatattaaatgacaatattatttaataattaatttttagttattaaataattagaattggcatttaaatggttaaattggaaaattggcatttttgagaaaatgggattgaaaaatgacaaaatgggaaaattgcaaagtgaggcccattatccttatcatggccggccactatgcaaggattttaccatttatatttttcattattttaatgccatacaattctaacctaaacctagatggcattctataaatagaaagtgatggcttcaggaaactatgactttgcatatttttcctttcgagaaaaaagctagacgccacctctctcttttcttctcttcaatttcgaaatagccttgagtgatagagtagtgcccacacacatcaagtgatatctcaatcatagtgtgtaagactgtggagaatccgcatcaaagaaaggagagaaagagatcctggttcagatcttggtgatgctctgctacagaaaagaat

SEQ ID NO: 294135 - DNA, 726 bp, Cannabis indica
ggtatgacttctcatgataaattactagacaaggtctgcccacctacttcttggcccacaggcgaaacctgtgaccagagatttggcggctgaccatttatagtctgggaagtattcatcactggatcttcgtctgtttcacccagggggatgacactcgggggttgttgcccgacagtttggtaggctttttcgtattagcacagtagattgctgactacaattttcaatctctctatgatgagcccttaacgcttccatctctttgtccctccattcaacaaacatgcgctttgttcctcgaacgcgagatttaccgcagcacgcagtttctcctgatcatgatgtagggtgttagtatgaccttgcatgagtccaagagcagcgcggaggttttggatctcagtatcatccccaatggtcactcgaaagttggtggcaggtggaacggttgtgttatgaatgccttggctgggtgctgaactggtattcccagtctcttgcacactaggcgtgatttcatccacaggagttgtcacaccataacttgcgtctgatggctgttcaggattaatagctggcggaacccttgtgtttcctgggttcttcaatgcaggatccaccgcctgtggatttgccggatcaaccatacccctacgagtttgtaccaccatcgtacttgtggttaaatttaaaatgaagagcgattcttgattctgctctcaa

SEQ ID NO: 294136 - DNA, 517 bp, Cannabis indica
tcaagctctttttagcaaaatttagtgttcacaagttgttggtatgatttctacatctttcctttatgtttccttgaatttttgaagagaaatggtaggttgcatgcttagttttgagttgcttgttgctgctgtgtttatatgttgtattcagaggtttaaagcatgcttaattgagtggaatgaaactgttttgatgcatgttgagttggttttatcaatatatggaattttggttcaaaagctatggttttcaaagaaaaaatgtgaaaatagttgctgtgagtgttgcatgagcttgagaatcgttccggcagttttagtatgcatgattatgtagtttaaatctagttttgaggcttgtaggtgagatttaaccaagtttgagttttgaactcaaagcttggagctttaatggtgatttttgattctgtgttttctgggctgtgttgatggtttagaaatgttctttcgggtatttagaactgtaggttttatgccctaaataaaactcttt

SEQ ID NO: 294137 - DNA, 559 bp, Cannabis indica
aaaaagtgaaaaaaaaaaaaaaacaatgataatatagagaggtgagatgacactttatttttcaaatatcttatttttcataatttttgataatttcaatttttaatttcacataaataatataattaaataattgatttgtcttaaaataataataataatttaattaagtaaaaagtaaagttacatgatcattcaacttataatatttatttaaaaataaatgcaacaataatatgataataattttcccacaacaaaaaaaactaattaaagaggtggcggtatattcttcttttgctaatctctctatttatgtagtaattttaatatttattacaaattatgaataatgctaattaattaattaagtagttgtatgtctattattaaaaaaattaagtaataattaatattaataattgtaacttattattgaaagtttaaataatgttttatatatttttttatttaatttatcagtgaaaaattatgtgtgttattagtgactattaattttgttttaaaatatagtgatcgtcgatttttaagaaaaaat

SEQ ID NO: 294138 - DNA, 514 bp, Cannabis indica
aactatcatttgtttttattgagtttaattgcaactgcaacttagtagaggaaacaatattttggagattcgaatgggctgcgacaagtttgaaagctccgggtcatgcatggatacatagctctaagaagtatctgattcaaagactgtgatttccacaatacatgatgattcaatcaaataaatcacaaaattatattacacctagaactaacagagtaagcaaatgacaagttaaagaagtaccaatttcttgagagcagttcatgagctctttctctaaagtttgaatatgcttcttgtcctctgtacggcctgttgataatgatgtcacatgattttctagtcgctgcataaaaattgaactcagaaactcaaacagtaaaggacaggaaatgcataagaatcaataatgtaaaccattacactaaacttgttaatgcggcatcatgaactgaacttaccctgattaattcaaagctttgtgattgcgactctttcaacatgtctttct

SEQ ID NO: 294139 - DNA, 707 bp, Cannabis indica
caactagccaaaagaagtccaaagcctcacaggtaaagtcaccgctctaaatcgctttatatcacgatcttctgataaatgcaaagagttttttcagattttaaaaggcaataagaagttccaatggaccaaaaaatgcaaggaggcttttcaagccttaaaaacacatttggggcaacccccaatcctatcaaagcccatgaccggcgaggtcctatccatttacctagcagtgtcagaatatgcaattagttcagtactaatacgcgaagatcaaggacgaaaatacccggtgtactatgtaagtaaacgcttgctggatgccgagacccgctatcctcaaatggaaaaattggcattcaccctggtaatatcgtcaagaaagttgtgaccttatttttcaggctcacagtattgaagttttaacaaactaccctttgaggcaagtcctagcaaaaccagagacgtcgggaagattgttgaaatgggcagtagagttaagccaattcgacatcaggtataaaccgaggactgcaatcaaggggcaagccttggcagattttatcctcgagttcccaagcaccgaagtggcactcatagacgacaaggttgacactgctatacccaatggagaaggatggacgttgtacgtcgatggggcttcaaatagcgaaggttctggtggcggaatcctactaatcagtccc

SEQ ID NO: 294140 - DNA, 605 bp, Cannabis indica
tttgtgtttttgtgtttttctttctatgtttgttctggatttttctattatcaggttatctccgctctcaccccgggcatattatcacattcaggtgtactcttttccctatctttttcatttcatattttttgtgacattgaggacactatctaattttgagttgggggtggtgagctctggtgagcgttcatttggaaaattataattgtcttgttgaatttttaagtcaatttttttttcaaaattatccaagcatgattgtaaaattacagtttgagtcaatatttgctatattttgttaccaagttgtgattttcagagtttccaaacatgtggtaaaatggttgtaaacacatatagttaagaaaaaatttgagtgtaaagtttttcatttttggtgagttgtgagagttgagaaaacaactttttgaacttttattgatcatttgagttggtaaagtcaaacttttggaatttcaaacattacatttactagagggattaattttatgtcaaaagagcctttgtgtttatttctttgtaactttattgtatttctttatatctttatttttatatgttgtctcttgtcaaaaaaaaaa

SEQ ID NO: 294141 - DNA, 574 bp, Cannabis indica
acaaacttagtgtggtttctcaatccacactcagtttgaggggggctgttgaagaataggattagttgtgtctgttataatcagtttttctgttacagttgttagtttgctttctgttatttcttaactaattctgtaactaattcctttactgttttcagttgtatatatatgtacatactcagtaatgtttcaacctaatgagaaggactcttcttcattcaagtcatctttgttttcttctcatttctctctgttctttactttcaaacactctcacattacttaactatataacaaggttaattaagatttttctttctcgaattagttttaaaacttttaaaaatcctatcaaagtattaacagggccggtataagcagactactccgtagtacttagggctcatactttttagagcctaaaaataaaaaatgaaaaaatttcatcagatttttatttaagtaaaataaaattttaataatatatttaaaggatgaaaaaattaattagaagtggtctaatgtgattatttggaacaaatatagtagtgttagatttatgagtcatgat

SEQ ID NO: 294142 - DNA, 720 bp, Cannabis indica
cgtcgttggggtttgactttgactaaatccaaaaggtcctctagtttgggctcattcggcccaattatcaaaaatattgagaaacttacaaaatactagaatttaggttagcttttacaaaaatactgccacacaagaattttttttcaaaaacaatgaatttttataaaataacagtgaaacacaaaacataacaactaaaaacaacagtggaacaactaaaaaataaactgtagaagaacagtgaaaacttaacaacagtatacagtataaaacttacacagtatttttgaaaaaaattctgtcccatagtaaaaagtaaaaaattagaaatttcagtatgtggtgtaaataatcctttattaatcgtgttgaaaactataacccaaacccaacttatttatactcgtataacttatttttatctatttgagttaactgcggcatactcttaatacttttattttattagcaattaatcataaaacttaatttttgacaataaatccttgcattttgttagcatttagtcatttctatgtatttttagcaattaactgacacattaactgtccatgtgtacataaaatttgtacacgtgacacaattaatatttgcattgttctaatgatattgtgcgattgtgtgtattcatgtggataatattctatgtacacacacaaccattagcagttaactgccaaaaataaatgaaaatgg

SEQ ID NO: 294143 - DNA, 533 bp, Cannabis indica
ctctctctctctcacgcccactactatactcatacttgagatttgtcaactttgattccttcattgtaacttttacagagctattccaaataggggtgagcaacggtcggtttggtcgattttttacacaaaaaaaaaatccaaaattcggttttcagttttcatggttataatccgaaaaccgaccgaccattatacaaatgtaaaaaaaatcaaccgttttaatccacggtttggtcggtttaaaccgaccaaattgaacttcatttttttaaaataagttttaaattttttataattatttgaaaactaaaaaattagagtattgtatcaaatatcatataatttaagaataaaactttcttagttaaataaataatgtaaaataaactttttaaatttgttcaaattatttgtgctactaatatggtaatgagtttattaaaaaacttgtattattttatgaatgtgtatataatatgtaaatgcatcaaactataataaaataaaacaatgaataattgagactttaa

SEQ ID NO: 294144 - DNA, 531 bp, Cannabis indica
gactttgtggtggaatgcacaggaaaaactcaaagcatcccagaaggcgatctcgagtcaacaccacagccgagcaacacttaaaactagctgacctagaaggtgcatgtggatgggtcggccacagatcagctaatccggcgcaggaattgcccttgtcacatttggggggcaacacttgcatgcaaccatcaaattcggattcaaagcctccaacaacgaggctgaatacgaagccctaatcgctagactcaaactagcgaaggagataaaggccgaacacatcgagatctgcagtgactcacagctagtggtaaatcatgtatttggcgaatacgagggtcggggagaaaaaacgatagcttatctgagcaaaatacatgatgtgcttgcacaattcaagggctatagcctcaagcaaatttcaagagaagaaaatacaatggcagatgcgctagcccgactggcgagcaacaatataagtgacaaggcgaacctggtcccgatccagtttcttgaagagcctagcat

SEQ ID NO: 294145 - DNA, 890 bp, Cannabis indica
agtgacactggtatgcccggatgcacctagcatgggagttgctcttttctgcccccgccttaagtcttggcaacgggccgactcctctcaagtggcgtgaccgctcacccaatacctgtgtcataatatgcgtatctgcaggaaattgggtggggtcgacattgtactggcggggggcatcagctggcgttggttgagtgtcacgaatctcaaccattttggcctgcaaaaaatttcataatgaaactgttagagtgaaagaaatttaaattataaaactaatttattaaaaatataaagttacttacatgcagttgttgtgtgtgctcgtcgccacttattgttcttgcagtggaactttgcaaatgtatccacagcactgggaagctcccccgtctgcggatcagcctattttttttacaaaattggaattagaacaatattattaaaaatttccaattgaaccatatttttatcatatattgaaaatttcataccccgctgacaatggtcgaaactatggtcttagatccccatccaccttgaaccttcatgttacctcggtttttcgcattttgctcagctcttgcctgtaatttaacgtatagttattgttagcaaattgagaaaaaaaatattaagtaaataagaaaaaatattaaaactttcaattaatacctgttgtttcgggtctttccagtatgcgataacctctgcccacacctccggtgtcaccatatctggacgtgatctcctgttcgcttcttcctccccatatttttcaatattctccttccatgccttcttcgtgtctgatctccagtcacgtaatccttttgacatagatttggtgacgtaatccacgaacataggattattagttggcaact

SEQ ID NO: 294146 - DNA, 557 bp, Cannabis indica
atatcaatggtagtaatggtggtggtaatagtggttgtgtggtggtaatgatgataatgagatgaataatagagaaaagaaaaagagaatgggaggctgttggaatggataagaagattagggtttttttttgttctcttcagtgaagaagaagaagaagaaaaaaggaaaaaaataaaatataattatttttaattatttttaatttttttttttaaatatttaatttttttcaacaattaatattacgtggaccaataaaatttgacacgtgcacacaagtgtacacgtaggcaggccactgtggcacttaactaagattttttaacagaagtgtaaagagcaaaacagaatgagggttcagtaagttttgctgtcaaatttttacttttgtggtcaagtgttaaaaatttaaagtttaagtggtttagccccaatatctcatatatatcctatgtagtataggataagtctatagtacatgtttgagagtcccacattgctaatatgtggaatgataatagaatatataagaagaatgggctactcctcccatt

SEQ ID NO: 294147 - DNA, 557 bp, Cannabis indica
agatccttagtcagctcagctatcttcttctgggcggtaaagagcttcatgttggcttcacctaactccatccgaacagctccaagttctaacctggcatcgttagcatccttcttggccaagtccacctccaccctcatggtgttggacagagccgtgttcctagaagtagcagacttagcccgggagtaagtgtagcccaacttcagaccagcctgcacagagaaaaaactttagcaaagagctaagtaaagaaaattaaaggaaagtgtcaagaaagacttaccctggtgaattccttcaagactccgcccatcagcagctccaaagaagagtcattgtcagcaccagccagttgctcactaacctcaggaaccagctggttcatatagtgggcaagcatctctttgcccttcttggcctctggaagcaccgaaaaaggtggagtaggggcccgcacctatttgggttcacttttgaccagctcagacccacacttcggtagttcagacctgtccgagcttcctccccttagacttaacatcttttggggtaga

SEQ ID NO: 294148 - DNA, 583 bp, Cannabis indica
cagccgcctgaaccggattgagatggggcaaccggtttttgatccactcgtagagatgtcccaatcggatcaagttttcgatctcatccttgagatttttgcattcattggtgctgtgcccaatgtcattgtggtactcgcatctcttattggggtccctccgggagctgtccttgtacagaggaggcggtctccagtagtgcgtattttgcctggtagcaaaatatacacgttcttagcagtccattaactccgtgtattgggtatattgggcagtatacccccttttctgccacttatcctccgtccgattgctgcctttagaggaccttttgctccgagagccttgagaaggaccggcgagacttgcggccggagcggagtgcgacggggttgtccatttatccctgagggatttccaaagtgggaagatgcgggggccaaggcctggccttgactatatccaggagtagcggaaaattgtacgccgctcatcggtggagcggctgctggcaaagtgcctgggagctgagctccgggtacataccccgctatcccggtgggatagtatcccccgtaggcc

SEQ ID NO: 294149 - DNA, 548 bp, Cannabis indica
acataaaatcaacaagaaaacaacataaaagtaacatgaaaataacaacaaaaaaaaaacaataaaaaataacatacatataacaaaaaattaacaacaaatgaacaaaatttcaacataaaaagaccgtattttatgtaaataaaatcaaaaaaatcgtaaaaatgtttaaaattccgtaaaaccgtatttttgttgtttttttgttatttttgtgcatttgtgaaattaacccatttattttttatccgattttagtattatggcctcaaatgaccattcaatttataattatatgggctttctttttgagtgactcttccccactaccgcaagaagatccgattcttcttttaagatttttctttttctttagggggcgtttggtacgaggtgttcaaaataatttgattaaagggaatattatgaaggagaatatgattatagggaaatgtgtaaactgtgtttggttgtgtagggtaatatgtaatcatattcctgttaattaaattaaactgtttggttgagtacaggaatcttatatatta

SEQ ID NO: 294150 - DNA, 571 bp, Cannabis indica
tctgcttgatttattttgagtttcatacatatacatacatttacggggttcttcatttataatataatatatattttatatatatactttcatattatataatcccgattatatatattcatactcaatttatatatatatacattcatattcatatacatcttcatatatataatatatatatgtatatgatcggttcttaatttatatatatattcatattcatataattccgatcatatatatacatttaattcaatctacgtatatacatatacatatatatatatattcatattttaattttatttatatatattatatatatacgtaagtattgttgtatatatacgtatatatattttatatatgtttatattgcataaaattgtatgtaatactcttttccatacattaatgatgattttatgcaatatatattgtatacgagtatatatatacatgaaagttttatgcttcggtccgttatcatttttggtatttattttgaattctatatgcattactatattcataagatattatagatcgattttgtgcatcaaaataa

SEQ ID NO: 294151 - DNA, 547 bp, Cannabis indica
tcgggagctccagtatttgggactgggaccacaggcttcggcctacgggtcctctgctcctgcggagcttccaggcacagggtcctcccagcggctgcctgggccttgatataagccagctcctattccctcttgaagaggtacttctggtacttgtcctccgccatggcaatgatgtcgtcccggaacaccttctctacggccggagccctcacattcgggcagatgactttggagagattgaagtcatccaccgactggtgccccaagatcaacttggccttccgacagtgctctgtcgtgccaactccccgacatccagggccttcttgtcgtacgtggcaaaggtcttggcccgttgaagaaatatttgagtaggctcggtccgcatatagggaggaaacctaacccactccgtgagaagctccgcgcgatccatggcctggaaatcggaggagaacaagaagcggtgacgatactccttcacatgcttccgctggtgtaggggaccgggccttcattcaacagatgggcccgaaggccagtc

SEQ ID NO: 294152 - DNA, 888 bp, Cannabis indica
gtatttgatttataatatttttaacgcagtattttgtttaaacattttagagacctaacaatattgatttcacacaagaaaaaataaagatatcaaaactgaaaatatgaacacatttagtttttttacgtgtttttgcagtttaaaatctgcatagtccacaagtcaatcttattcagattttctaatgttttttttaggaactctctcatattgagtttttttcgtcccttttttgatcttgtctgccactatttataattacatagtggacagttaattacaaagttgaccgaaatgtgtttacaacaatcatccctaaaatcatgggatttgattacatatcacgtagtgtaaatgcggtttacaattttaaaatcgtatgactgttattttcccgcttttattgggtcaaaacaatcgtgtattaaacacgtctttaattgttttatctggagatgtctcgacagaaacctggttctagtgatccccatagcgagctggggtcattcttccttccaaggtcgacaatgtatatctggtatcgatcgcggttcttatttacaaagaatcattttgactcgctggggttgtaagcctcattactgttagctggatgaagctataggatgtcttccgatagcgagacggtcaccttgcttacttgttcttgagccgatccaaattttacacttagtttgttcattgtatgctaaggactttcatgattgatacgtgtcgctttctttggtgcctcgctattcacatttagcaacatatagtttctcgctaatataataagtgccagtgtgtacatcgattccttgcctaagaccttacagccagcaggttataaatatactctgatacttatgtaattaatgagtt

SEQ ID NO: 294153 - DNA, 685 bp, Cannabis indica
agacctcgagatacagagattgaggcagcagggtgctcctgcagtgcctgtgccagtagttccagtggcacccgcccctgctgctcaggccgaaatagttgtggcggccaacagaatggaacctttgtatgaacggttccggaagcaagcacctccggtctttctgggaggtccagatgtgatgaaggccgagcagtggctgacggtgatcaccaaaattctgaattttatgggtgtcaccgggaatgacagagtggtgtgtgccactttccagttccaggaagacgctcttgtctggtgggacatggtgtctcagatccatgacgtcactaccatgacctgggaaaggttccaggaactcttcaacgccaagtattataacgaggcggtcagaagcgccaagaggaaagagttcgctcacctgacccagcgagagaatatgagcgtgacagagtatactactcagttcgaccggttggcgaggttagcctcgggaatagtgccaaccgacttcagcaagaaagagaagtacctggacgggttaaatgcgaagattaaacatgatttgatgatcaccactgacgacaagaccacctatgctgagatggtggagaaggcactgcgagctgagggcgcagtggggtgtatgtcggagtcagctagtactccggcgagtggcggggct

SEQ ID NO: 294154 - DNA, 709 bp, Cannabis indica
cttggaaatgttttttctcttgtccgtgctctggctggaggatacttccttcttagccttggccactgcaaggttataacattccctagcaatctgctggtttcctctcagacaccctaccccattctttgttggaaattttaggcatgaatggaatatcgacgtaacagcctttaagtcatacaaggttagctggcttagcatgatgttgaaggctgatgaaacgtccaataccagaaattatgccattatagttatgctcgtcggagcttgcccaacagtcgaggggtaggtcgaagttttccctagaggtgcgactccttgatcggagaaagcatacacaggcaggagacagggggttagatctttgagttggagccccatcttttcatatgcagtcttgaataagatgttggaagaggctccattatctatcatggttctggccaccatcttgttggctatctggacctccacgactagcgggtcgttgtgcggaaacctgatcatgacagcatctttgtcgttgaatgttatggtgggctctcctgcccgtgggatttttaggcttcctttcttctacggccaggatcacttcttcttgttcgtgctgtgctgttcgggcatcctctccccaactttgcccgaatctccagctatgtgtgggcctccaatgatgacttgcagatgcccatctactggtggaggt

SEQ ID NO: 294155 - DNA, 518 bp, Cannabis indica
acaccaccagggtgatagaattatatagagctatctattttgaagatgaatttggttcaagtcaagggtcaagagaaattgtattcagggaagaacgtatttatgtctctgtacctactgcttctgcttccgctcctactattgatcctgtgattgaacaaattccaacagaagctcatgatgaacctcagaatcatatgcaagatgaaaatcctgatattgagggtggtgaagttgtgttgagaagatcagagagagctcgcaaacctgctattcatgatgactaccttgtctatttgcaagaacatgattatgatgtgggagacgcttctgaaccagttacttatcaagaagccatgaggagtcctcaatctaagttatggttgaatgcaatgacagatgagtcaagttccatgtcgcgaaacaaagtatggaatttagttgtcctaccgaaaggttgtagacccattgggtgcacgaaacaaagtatggaatttagttgtcctaccgaaaggttg

SEQ ID NO: 294156 - DNA, 506 bp, Cannabis indica
accatatgataaaaacgtgacacataaaattaaataaaacgtgacacatataatgaagcttcaaaattcagtccactttgatgagtatgaccaatctttgttctccttccgtgttgaccacggtctcttcttgatttaagactttgtgtactaggctgttaagctcttccttgaatctcttagctcgtgccctagtcactggacccactggaattggacttgatacttggtccttgatgtcctcatcagttaaaatgtcattttttgcagaaggaagttctatttctagaccaccgttgcttaatgactctaactatccttattggaaagttagaatgagggccttcatcaaatctcaagatgagaaggcgtggagaatggttctatcaggttggtctcctccagttgagacagattcttcaggtaatactactataaaatctgaactggaatggtctattgaagatgataaactatctgcctacaatagcaaagccttgcatgct

SEQ ID NO: 294157 - DNA, 665 bp, Cannabis indica
aagtttaaggcaagactagtggctaaagggtttacacagaaagaagggattgattttaatgagatattctcacctgtggctaagtataaaaccatcagaattatacttaccatagctactcaatttgacctagaagttgatcaaatggatgtaactactgcatttctacatggggaacttgaggaagagatctacatgcaacaacctaagggatatgaggaaaaaggcaaggaagacttggtttgcaaactgattaagtccctgtatggacttaaacagtcaccaagacaatggaacaaaaggtttgatgagtttatgatcaagaaagggttcaccagaagctactatgacacctgtctatactacaaaggcactaaaattgatgaagtcatctacttacttctgtatgtagatgacatgctcattgtgagcaaggaaagaaccagaattattgacctaatgaagggttggctaagggaagaatttgagatgaaggacttaggcaaggctgctaagatcctaggtattaatatctctaggaacagggaacatggaacactaaggctacatcagaagaactacataaagaaagtcatagaaaaatttttcctatgaccaatgcaaagcaaactaaacaacctatgacaaatcagtactacctaagc

SEQ ID NO: 294158 - DNA, 538 bp, Cannabis indica
atatacaaatcaagtgtagtatgtagtatactctccgtaataggatctgacaggttgtattcaacacaacctttcctccaccattacatttccttaatcacaaaaactttgatattgtgaaattcctctctatatgtctactctcttgggatactggattctttactattggcaactacttttgtgttaatcaggaagtaacactagtaattaagaaatgttggaacaatgccaaaaatgtatagaactttccttagactgaataagtacctttcttgcaactttaacattcagtctctctctggtagacttagagacttcagataggttttcacacttctccaaaatcactactccaccccagagtaatctccatctcatcagcagaccttctagcactaaggcaagtctagaaatcttatttggtgtagtttaagagtattaaatacaccctttattgactaacatatagttcctcttattgatcttaagatttacttgattgtcttccaatgttcctttcctggattaatctgat

SEQ ID NO: 294159 - DNA, 845 bp, Cannabis indica
gactcgctaaatcacttttcgcggacttaaacttgaaactaaaagttcccccatcgataaaaaaacatggaaataccctaaatacctcaaaattgggaaaaactagggtccccaaaattcccccaaccggcagaccggtcccaaccggaagtccagatctgggacaccaaccggtcgaccggttggtacaggtcccccagaaccggtcgaccagttctgtgctgggaacccaaaaccaacccccttaactcaattcaatcccaaaccttcctaaaacttccagggtacctaatatgggtattcgcaatacattttaaccaatatttcacagaacaaaccaataaatatcaagttgccattaaagctcaaagcttgactttcaaaactcaagcttgcttagaactaacaccatgcacaaaaatcaactaccaggacctctaatcaactaaaattgagaataaaaaccgaaccctaaacatatgaaaccctaacagccactaaaactcaatttcacataatcacactaaagaaataagcttaaaacttgtaactaatggtctagggtttaccttttgttgaagggaaaaacagagagagagagttcaagaaacaactctaatttccaatttttttctattcttgatttttctttaattaacttatgctgaaaataaaacattggctaggtgtcacctactcatggcagccacctaccactcaactaaaccaaaagacaaaattgccctttaacccaatactaaggtttttctaaagctaggggtaaaatagtcaaatcctataaccccgctcaaacccgatatttaatttctctaaaatatttccca

SEQ ID NO: 294160 - DNA, 513 bp, Cannabis indica
aaaaaaaaaaaaaaaaccgaaattattaaaaattacagaagttttgagattaaattaaattgggcttttttcatgtatttattacagagcttatttcacaaattacaaaaaaaaaaaacacaaattataaaaatacggttttatataaattttaaatattttttttattttatttacagaaaataccgtcttttatgttgtattcttgttaattttttgttatttatatgttatcttttgttgttattttgatgttattttcatgatacttttacatagtttttttgttatttttatagaaaattgtaaaaatatataaaaagtacccactattgtgagtaatttgcctaatataccctcaccttttatttaaatttagcacataatttacatcaacctaaagagtataataggacatcatctataaaagtgggtatatcttaaagaatatggaaatcaaagtaaaaattaaaacaaataaagtaaagtgggtatacaatataatttcctcta

SEQ ID NO: 294161 - DNA, 700 bp, Cannabis indica
gttataaataaaaaattatagttgtttgatcccttcttcgtcaaaaaggtttgatcaaggtgttataacgatttgacccctttctcgtcaaaaatgtttggtcagggagttataatggttcgactccactttcgtcaaagaggtttagtcgagaacctttgaatttcaaaaaaactttttgaaatggcgggtttgcattatacaatgtatttctagatgaatttcagttagtcatacataaatgccccttaagtaattcaaagaacgaaactttgtaattacttaatataaatgattctctttattcataattgaagtttaaagtttacatcagtaatgcaagtttcatcatttatttattgatagtaggttgaaaatgttctacgttccagtagttctttattagcgagccatcaagtcaagccaatttatagactccgactccaactactgcttcgatgacatatggaccctcccagttcaggttgaacactcctgctgatgcatctctcgtatttgcaaagactcatcttaacaccaagtctccaacattgaatagtcttttcttgacttttttgttgaagtatcttgtgactcggtgttggtatgcagggttggtgatctgcgactcagtttgtttttcctcaagtagatccaaggacaattttaaaagttcctagttttcttcttgattataaaa

SEQ ID NO: 294162 - DNA, 544 bp, Cannabis indica
aaaataaataagttcaaaatataaatgcttaaataataaaagttcattacataaacatgccaaataaaataaacaccttaaagtaaataaatgataataataaaaaaacataacaaagaaaagtgactaattgtggacattcccatctccattatcgatattcatgttgttattaatgagatcttcattaaaaaaatctgcaacatctaagtgcgtaatatccaaaggctctttgagaaaaccatcatcttgataggcaaaatttgcttctattttctcctttcctttcacagatgcttgataaagatcagcaaggtgttttgccgtacgacaggcacgtgcccagtgtccttttattccacatctggaacataaattttcagaatttctatgattattattttgaggaccttttcccttgttctcagtagttgtgcttttcattggagtatatgaatttttattttgaccattacgatgccaaacattgcttcgaccgcgatcgcgaccacgaccgcgactttgattatggtcacgaccacgt

SEQ ID NO: 294163 - DNA, 1089 bp, Cannabis indica
catctctcttatttttctcttccatatttcctttttagtacttttttctgggttaaccaatcaccaaataatagtgattaatattttgatataaagattcccaaacacgctttttctttttcagaacttcaactaagggtgggtgtgtctaagatgacaggaaatatacacaaggctagcttggtcctcctgccttggaacttgtatatacataatatatttatatatatagacactaagttgccatagtggcatttattaacaaatcaagcttatattaattaaaacaatcttattacacattagtagtgtttagcatttttaataagtgacgtcttataattggttaacgatattttttaaaatttattttcttaagtgatatgtaacccgatatttaattacatcaatagcagtatgaaactggtgagagtattaggcaccaatgatgcctttttaaagagaaatgttaaacaagtatcattttcagtgtcatattattattggtgtaattaagtattgtatctcatataatttataataaaaacttctagagaatatcgctaactaattaaagtaaacgacttacgattggttaatagtattctattaaaattatcatattaatttatataagacctattacgcactaaagcgtcaaacactataatgaagtgacgtcttataatataaatgagattcgatattgaattgtatcaatagctatattacacctcacagggctatcaagcaaacctttactcatagcatttctcttaaactaatttaaaataaaatttagttaaattcagtgcattatgaattgtgtacatgtgtagagttatggttgactttgattgcactcttttgtgtattagcgtcattaaagacgtatacaggtgaaagatgtggtccccattattatcctaagcaagcaattaaattgttttcgtggcaaatttgaaagaaaggaaaaaaaacagatgttataatgtcgttttttttttcttaattttataattaccaaattaagtaataaatgtatatatatatataagtagtaattattatggtctgttgtggtctggt

SEQ ID NO: 294164 - DNA, 608 bp, Cannabis indica
aaaaactttttagttaatataatataatttagttttttttaaagtcatatatagatttaaaaaaaaattatatattattattattattattattattattatgtactcttttagtaaaaaaaaagaagcaagttagtttattttattatttattttttttgttagtttgtattttattatttttactactatattagggtgtttagttttttttttacatttcttttattttgtattacttttttttttcctttggatttagccattttattttttttttatttattttaggttagttgtagattttttctcctttaggctaaaaaaaaaaattgtgcataaaatattttcataaactttttagtgtaaacccaattgtgtaatggtaaaagtggtacaaactgagatcattctgtctaagaaagattggctttaaaggtttgtgatagagtaccctctacactttctagcaaccccggggagttctagtaaaagtgtgggacgaagcggtaccttggcaaccttcccaatcggcctgggaatatcttgtgtgaatacccttgcattattacatagttgtaatttacattatttaacaagtgaaaata

SEQ ID NO: 294165 - DNA, 748 bp, Cannabis indica
ttttacttattagatttattttacatgtattattttcaaaacacaaaaatggttttaattaccacctgtgtattaaagcagccacgtcagtagataggctgagttggatttaggggttcacggagtcaatgcacaaaacagtaaattgcaaacagaacgggacttaagggggttttcccactaaaaataaagaaaagggggttaagtgttaaacaaataaaacataatggggtttggccgcaaatttctcaaaaatttatagttttacgtacaaacattgggtacttatgccgctaaaaataaatattgagattatgccacttacaaacttaaaactttgggtacttatgccactatttaccctaaaaaaatattaaaccaacaataagacaatatgcactgcaaaaaaatattacttttagtgacaactttttagtcacaacataaagtttttgtgactaaatggacttttagtcacaacaaaaacttactagtgactaaaacatagtatttagttacaagttgtcactaatttagtttagtcacaacaagtattgtgactaaaaacacatttagccacaacaaattgtattttttgtgactaatatatttagctacggtcgaccttttaataacaacatgagaataataatttataattagtaattttttttttttatttttaattcacaacaaaaattgtaactaaaaataaaattttttgtaatgataaaaacacaccaacatg

SEQ ID NO: 294166 - DNA, 592 bp, Cannabis indica
agtaatttttcccacattgccaggtgacggttcaattcgttcgtggaaatcgatccgaggctggagtcaaatatgttcaacaaccaatgatccagatctatctctaatgccacccaatgctttgctccatcgaagtagagggccatatatattctctccttgttcttccaactggccaagaattgactttcatcccctcgaatcaaatctaatatgccctcgtcccactgatagttagcctggtcatcacccgcagcttcccaccgagcaataactcctgctgggaaaatacacggcattatgacacatctattcgggtaggactcgggataaaagtgttgccgcctcctcatcaaatggaatgccgcatccaaatgctaaaacatgaaaattaaatatgtcagagttaaataaaaaagagttagataaagtctttaaaagcaaaagcagtaaaaaagtcttaaaaacttacatcgttcccaagccaaaatttcggagtatgcagttcgaggaaccaagacgaatggtatcgaccggtgaagcactctctcgggtaattgttcccaatctggccgagtacccaattgtgaaa

SEQ ID NO: 294167 - DNA, 657 bp, Cannabis indica
ttggaaattcagcagattcactgaactcccattgtcgacaagtatgcgatggacattatccccgccaatattggcgattatgactagtgcatcggaatgcgggtgatggacccatctcgcatcactctccataaaggtgatgtcgtcgcattccttcttaaacagcttctcgggccgctcactaagattgttcacattggtgagcggcttctccttggcttctctggcatatcgctcttgtgacttgcgagagtcccctgcgatatgaggtcctccaataatagttaggatgttgcgaggtgttctggagccactcgcattctggttttctcctttgtcatccgcttggggacgactttcctcgctcttcttatacttgtcgaacttccctctccgaattagctcctcgatttcatcctgcaagacccaacattctaaggtagtgtgaccaatgtccttgtggtacttacagaattttttagggtctctcctgtcgcgatttcccctgatggggggcggcttcttgaagactccgtttctttcttcgattgcgtagatatggtctcgggagactgcgagttcagtatagttgacgaaacgaggtccacctttccttttcggagaggattccttcttcggaggagacttggccaactt

SEQ ID NO: 294168 - DNA, 631 bp, Cannabis indica
tgagaagctgactacaatgaatgtgacaagtcaactcctgaagattgagaattaatagcataacacacttggcttaatgtaataattctattaatgagtactataatatgataataggttatttgcaggttatttgttccatctaatccagtttaacttacatgactgcctataaataaagtcatcactttgctatacaaggatccaaattttggttcaagccatcacgatgcaaaaattctaagaacctctattattgtaaactcagtagcaattctaatatagtaacttgtagactaaaaatttattaacgccctaactatatacaactttgtctcaaatatctcttaaacctctcttcaatctctataattatatacattattacttgccaaaaaaactcaataaacaaccaacaactaattaaatctataattaaattattttgtggtattttaacacgcaagtatacgtatcgttttaacatgtaatactcaggtatgtgagatcgctctcacgaaactatagctaaataccaatcaattgaattcttgttcctattttgacaatcgaatagataaattttgaaactaaataaactaattaagcaaaaataaataaacaaacaaat

SEQ ID NO: 294169 - DNA, 606 bp, Cannabis indica
aaaataatagaatattcaattgttgaccatgatatgaatttgatgatcaatgcataaaaaatatatagggtaggttaattagttgtagaataggaattggaaaacaacacgtactatgaattattgaagaggaaattacgtagaatatggcatttttccttaaatttcatagatatgggaaaaattagagatttacttaacttatggctttattacaatttacgttagttgtatggaaaaatatttccatatttttaagtttttattaaataaagccacattttcattttattaacttatgtttagagatttctaatatttttttaaagcaaatcattaatatatacatacatttatattatttttatattataattattttatttattttaactctacataatcattctttcttaacttttctattttattttttctttaaaaaatctatttattaatatatgtaaaagatttattttatttttaacttaattattacaaagtattttttttatttattttgaatataaattaacattttgatattatattttataaaggaatgcaacgatattttatttaaattctcaagtaccaagttacttt

SEQ ID NO: 294170 - DNA, 795 bp, Cannabis indica
gtcatagcctatgcctctcgtcaactgaaagattatgagcagcgctatccaactcatgacttagagcttgctgctgtggtttttgctctaaagatatggcgacattatctttacggtgagaagtgcgagatttatactgatcataagagtctcaaatactttttcacccagaaggatttgaatatgaggcagagaaggtggttggaattggttaaggaccacgagtgtgaaattctgtatcaccccgggaaggccaatgttgtggccgatgctttaagcagaaaaagtctcgggcaggtttgcaccacgatgatgatagcccctcaactagcctctgaaatggttagtgcagggattgaggtcatggttgggaaattgcataatttgacacttcaatctgatctattagaaagaatcagaaaggcgcaattggaagatttcgagctagttaaggttcgagacgaagtaatgactggtcggcctagaaaattttcagtctcgaacagtggaatgttgttatagaaagctcgagtttgtgttcctaatgttggtgagcttaagaaagagatacttgaggaagctcacaccacaccttattcattgcatccgggaacccaccaaaatgtatcaagatttgaaaccctacttcaagtggcatgggatgaaaacagatgtggtggacaacgtgtccaagtgtttaacctgccagcaatcaaggctgaacatcagaggccggcgagggttactgcacctttagtccttcctgaatggaagtgggaggacgattgcaatgga

SEQ ID NO: 294171 - DNA, 621 bp, Cannabis indica
ggtcctatttttaccattttgaaaaatacagtgtccattttgccatttaacaaaacagatggtctaattggtaacgtttgcaaaacacaaggtctaaaatggtatttacccaaaatacaaattgacactttatttacaaaaatattttcataaggtatgaataatattgatatcttttatgtgcttttaaaaccaaaatacctcttatattatcacttacacaattagacgaaggttgctagctggttgctgggtggttgaccgaaggttgcatcaaacgaaggttgctggggtggttgaccgaatgttgcatcaaacgaaggttgctgggtggttgactgaaggttgcatcaaacgaaggttactgggtggttgaccgaatgttacatcaaacgaaggttgctgggtggttgaccgaaggttgcatcagatgaaggtttcaatcccaggaagcatggatcgtgggttgttgttaaaactgtaatgcaatagtattacagctaaaaatgtgcaacttatatctgttcaatcctagttatagatgttgcaagccaactaacgtgcaacttaattgcaactaaaaatgtaaaatgtgaatgtgtatatgtaagaaactatttg

SEQ ID NO: 294172 - DNA, 448 bp, Cannabis indica
gttcttccgatgtggggtcctcttgagatccatggctactctcctgttgggtctcggtggcaggtcaggaatttgctgggtttctcctgggggagcaactggggctaatgctccggctacaccctctggtggtccttggggcaaaggccctcctacctgaaccggattgaggtgaggcaaccggttcttgatccattcgtaaagatgtcccaatcagatcaagttttcgatctcgtccttgaggtttttgcattcattggtgctgtgctcaatgtcgttgtggtactcgcatcttttattaggatccctctggaagctatccttgtacagaggaggcggtctccggtagtgcgtattttgcctggtagcgaaatacacgcgctcttgggagtccgttagcttcgtgtattgggtatattgggggagtgtacccccttttctaccgctt

SEQ ID NO: 294173 - DNA, 570 bp, Cannabis indica
gttagcttcgtgtattgggtatattggggagtgtacccccttttctaccgcttatcctccgtccggttgcttcctttttgaggacctcttgctccgagagccttgagaggggccagctaagcttgctgcaggagcggagtgcgacgcggcttgtccacccatgcctgagggatttccaaagtgagaagatgcaggggccaaggcctagccctgactatatccaggagtagcggaaaattgtatgctgctcatcggtggggcagctgttggtaaggttcctgggagctgagctccgggtacatatcccgctatcccggtaggatagtatcccccataggccactatttgggcctcttctaggttgatgtatttttggactctcttctggaagtcttgaaggttggaggctctttcttgctataactcgttccagaacggagtccctgtacggatgcctgcttgaagaagagcaagttgttgtccgtcatcgactttcttggttttgtaggcttcttccttgaacctcttatgaaattcttcaatgtctccataggcagctgcttgatgtta

SEQ ID NO: 294174 - DNA, 474 bp, Cannabis indica
ccaaaattctaatatttgtgtaactttcactttttttataatgtgtttttacatatttttacaaaaatataaagtgaaaagggagtgaagaaattaattagggggtgagtgagtttcgataaagtcaataaagtagtttttgaagtttggccccaaacagagacaaatatacctacactacactattaaccactgctgtgaccttattacatttcttttttatatatataaattttgtactttagatttcaatctttatgacaattttattgaaaaggaagtagtgaagtacgtagtctgtatatttgaaattaaaagaaaatatttattgcaaatataagcttttaggtattgaaagttattattccttttacttttttaaaaaattattattattttttattatatttggttgaatttaagtctttgactttaatttttagaatccaaacagaaatttttcttatatttcta

SEQ ID NO: 294175 - DNA, 818 bp, Cannabis indica
tttccaatcaacctgcccaccaccatacttgttcaaccaatttctgaaagcaattattggagcatctgattttgttggcacaaaaaactctttatgccatggcccacgcccaacatccattatcctatgctcctatacattataattattaattaacaaaataccatgaatttatatccaatcattatttttatataattattacacaaaaattatttttatataattaatcacctcaacttgtaggagacttaaatctgaatcgaaaattatgtttgtgtccatatgagatatccaatttggaacaattttgtcccataatactccaaagtttttttacacttgaccatatcactctgcatttcccaggactaactggtatacagctaaacacaaagaccagcttcttctgctccaattaaaaacaaaacaaaaaaaatatataaataatcatatatagatacatataagtattaagtaatatatatagtgtatatatatgttattatgtatcatatatttatttaatctctttgttgatccttgtattattttacaatagagttgtaatatcttgattttcttccattgttataaaatctctaacaatcaaaagcttatcccttttcaatggaagaggtgataaatcaagattgtgagaatacaaggataagagattttatgtgaaagccattcatgggtgagcatgatggtgaatattatgtgatttactattttatatgatagtaatatatattatatatatatgagttatatatatgtgacatatatgtgatcatgtgtttatatcatataat

SEQ ID NO: 294176 - DNA, 535 bp, Cannabis indica
ctctttctctcattcttttttttaaaaatcagtatcattctctccctttctcatttttcttttaaatcaattttaatttttggctgccatcaattctcataaataaaactaggtatatattatatatattatataatataaatgttacataacgtatatatattatttatgtgtattctctttctctaatctctataatatatatatatatatatatttgtttttcagattggagctttcacttggtggttggtttgttatttttttttacttggtgattgtggtattgggcaattggcgacattgaatttgtgatagcaacaaataccaggttcttttgttcctttattcacttctaatttaattattactctcttgattgttctttgaaatattatattagttcttttttttactatgcctcccaatattagaaaacatgagtctgggtatgaaaaagaaaaaaaaaaatgaggagttaactcaatctcaaaaaggagctcttgataaatttattataaaagaaccattagtt

SEQ ID NO: 294177 - DNA, 816 bp, Cannabis indica
ggtcgatttggtcgggttataatatatttttagtaacccaatataaatattgggttgtaaatatttaattgtaacccgtccaattaaaaattaaaaaaagtttaacctgtccaataattttgtcggtttggtcgggttaacccgtccaaactgttttttatttttttttataattattttttagtattcaaataattagatttaacaaaataaaaatatattgtttatatttcaagctaaaaaatactatagtttaaattaattttaagaactttaatataagataaatataattgagtaaacataaaataattgaataaaataataataaaaagtataatatggtatagattttaaactttaacttcaatatcgaaatacaataaaaattattaactataaagtttaagttttaagttaaacagtaaaatgtctaaactttaaatacaaagtaatttgactaataaatgtaatttatataatatattatatatatttttattaaaaaaataaataaatagatttaattcggtttattcgagttaattgagcaatttagaataatttataagccacccaatatattcattaggtagtttagatttttattgtattattttgtgttgtatttttatcgatttattcggtttgctttgaacgatttattaagattgagcgattttataaattttgttgaacattttttattagggaaattttcacttttttgcccttaataaaacctccaatataaaaatttagaccctccactaatttgtacaaattaattccattgattacataaacttcccattt

SEQ ID NO: 294178 - DNA, 646 bp, Cannabis indica
tcatattatgtctttgtgatctagttcttgcacccccaacagtaagggttaactcaaccatctgagcatagaaccagacaacttctagttgcttagccattatatctacattctgaatgatatactctttccaccttcaattagatttaacccttctagcagccttagcaactactccatcaaaacaaaactttgccaatcggtccagcttagtgtcagtttccatcaccgcgctgcccgagaccaactatgtaaattctactacctggccactcaggtaatttcttgcctcatagcattcatttgctctcagccctgtggtagtggaagattaatacccacaccacctaccccgagcctagtaggctctcaattttacttactagatcacctcaggtacacctcctagtatactcgtgaccattccttgctcatagttagaatctttctaactagaactaatgctaataagcattaccacacatgcataaatatactcaggaactttatatctaaacttatcatgcttctctaacaacttacacatttcaaataagcagacaattcaaataatcagtaaataattcactaatcagctaataattagcacttactaaaccatgagtcgaacgagtcttcgcagcca

SEQ ID NO: 294179 - DNA, 564 bp, Cannabis indica
caactttatataaaattaggagtgtttatcaaactgctcaaatttttcaaactactcgcactgtaccacaaaaaaaatacggtttaaaattctttcccgtacggtcatggtttgaattttttttaaactgcgtggtgcagtgcagtttgcagttttaaattgttaatatgcggttcaaactgttgcactgcaccacacattataaaaatatcaatttttatatttatttaggttcaatatgttaatgttcaactcaaagcccactaattattgtattgttgtaaacttattttttttcatatttattttcaagacttatgatatttttgacaagtgttgctcaagctttgtttttatttgtgatagtttaattatttagtgatagtccaaaccacagaaatcgcaaaaatcgcaccgcaccgcatcattttttacggtgcgatttatgcgattttttagttcgtagtgctggtgcaatttgggaaatttgaaaaaccgcaagtgcaagttggtttgaaaaaatggtcaaaaatcgcaccacccgcaccgcgaacaccgctatat

SEQ ID NO: 294180 - DNA, 576 bp, Cannabis indica
actttccaggagccaacttgaaataacattggtgagcagctatagacagagtggcaggaaagattcagtagcatacatctcctcgtaccccttgcaaatccatttgcatttttaagtacttgagatgggaaagaggatcttctctcccagtatacatcttccacgtcggcattttgaacttgtggggcagtggcaggagattgatctccggcgagaaaggagttccgcatggtcggtctaactcaagatcattatttctttccccatccatgtcgtgaaacatattttttagttcatcaagctgagcctgtacggctgggctaacttgctcggcattctggtcaatttgaattatgtcagcatctttctgagcgggaatttgagtacgggctccaggctgcacaatcatcgtaatattctattagtctactcccctccttctgttcagatcattccttaggtcatgggttgctcccaacctttcgaatacagaagtgcctggttgtcttagcgattgattcgcttggttgacaggtggaatggcaccattaatcttgttggaaccatcaggtatga

SEQ ID NO: 294181 - DNA, 763 bp, Cannabis indica
aaggcttggagtggcccgtgagacatgctcttaattaattactacagtactagtattattaatagtagttatgttttattaattagctttgtggtggccttggtctacaattgtcgtttttggtattgattttgtcgtttagggaagttatggaaatgtgttactttgttgggggtatctctattgtacttgtttattcccaattctaaatcttataagatgaaatccaaaaataagtaagtactaagtttgtacttcttagcttttttgtccaaaaacattattatggcatgtgtaattgcaaatgttaagtgtattccattcgattctagtttaggatcatctctattttctaatgaattactataaagttagtatacaactgtttttcaaggtatctttgacgaaataaatctagacatatatttggtattttcatttcaaaagaaatagttaacatccactaaattagaaaatgatagtgtaaaatatatgtcaaatttattacatactataaaatagtactaaatttgttagaatattttcatgtgtaataatataattaaacattatttacgtgtatcggtattaacatatatattgcatgatattatatgcgttcgatggtagaaattgttgaaaactttatttctcggctattaatatcattttcctaagattttttttgaagtttttgaagtttttttttttaatgaccaaaaatgtagtttttttttttttttttatttttttttaatattat

SEQ ID NO: 294182 - DNA, 902 bp, Cannabis indica
atgagatcaaaatcatggcgtccatcgttacagagtatttatgaagctacaaattaaaactattagttaagtttagttagcttcaagaactcttccatggccagagatctattactattcatcatcatcatcatcatcatcaatcatggaaatgaaaatagaaatttaataaatttctagtttaaacagatcagtataggcctttttctccaaacccaccatgttacaaagttaaattaatatatatatatatataatattaataataatctgtatagctacaaaattgctatgattaatgagtaatttgtgatatgaacaagttttttttagaaagtataaattgataagattagaaagaaaagaaagaaaatctgagttggttttgagtttcatcatcatatcagtaaaattaaggctccaccaataataataataataataataataataataataataataatatcacaggttggtcatactattaagcaagataatttacaaagagtaatttgttaagagttaattgttaattactctactctatatttttgtaatgtttatttaaactaatttagtaattaattttatcaatatgatcaaatgtgcttttaccatgtataattaagtaattaaattcaaaattgacataattgagttacgtttgatcatatttatataaaaaaacacattgtatcaaataaatattattaaaacaaacaaataccaagtaaaaaaaaggctaattaggaatttttcttcccgaactttgacatgtattaaattatgctcttaaacttttaagatcgttttagtaaaaaaattttaacatagatgaaagttcagtggacataatttagtacatattaaaatttgagagatataatttggtagatatc

SEQ ID NO: 294183 - DNA, 686 bp, Cannabis indica
actaattattaggtataagtaagcattgcttaaaaaatgacacttgtcattagaatataaagagagtgtaaaagagagtgtaaaatagagtgtgattagcactcctcttataatttttataatagttaaactatatataaggaccccaaaatttaattttgctttgggtcccgtatactttagtacctgcctgccctgaataccccttttaacatttcttaattaaaatacctccaaccgttggaaaatgggataaagaaaaaactagttgaagattgtgtttaatctcaactttatcttatgaaaagaagccgcaattggtacagtgggaccattgctataataatattcttaagaggtaagaactaaataaacacatagcgtggtacgaaacaggacaaacccaaaaacatcaagttggacccttcttctaggaaaggcccccaatatgggtgacaataaacgtgtgatgtaggtagaggaaggagctatctaatctttatacatacatgtgctatatatttttggggtctaatttcttaagtgagggtctaacaacagctgactgtctctctatcttatagatttattaatacgtatatgtatatgtgttattatttattccatatatgttaatgtatttaaaaaatattatgtggtagtaattataatgtatgataatttgg

SEQ ID NO: 294184 - DNA, 1284 bp, Cannabis indica
ttaacagatgagcatgaacgttcaatactagggtacaaccactatagcacatacacaacgtacgtcacagtacgagtgttggtagggtttgtttcgtaccctgagtacaactgagtgatataccacacacctcagtactttcctgtacccgtgttggtatcactgtatcgtactcacaacaacactcactataccaatgcactctgtatcataactatacaagtgttggtagcgcaaataacaatccaagcatgcatatacacacacatatacatacattcagataatcatatcacacattatattcagttcttacctgatttccaaattgaacggaaattcacgtgctagatgaatgccctaatcacatgaattacaacatagatgagtgactcgctaaatcactttccaggaatttagacttgaaactaaaagtttccctatcgataaataacatggcaataccctaaataactcaaagatggggcaaactagggttccaaaaacaccccaaccggcagaccgattcccaaccggaagtcaagttctgggtcaccaactggtcgaccggttgccacaagtcccccagaaccgaaattctggttctgtgctgggaacccgaaaaattctccccttgatctcaaaaccaacccaaacactaccaaactttccagggtacctaatatgggtattcacaatacatttcagccagtatttcacagaacaaatcattaaaactcaagttgccattaaagctcaaagctttgaaatccaagctcaaagttgcataaaaccaacaacacccattaaaaccagctgctaggagttaaaatcaacccaaaagaaccctaaaattcaaaccctaaacctatcttaacctaacagccaccataattcaaaatcatgcttgaaaccaaagtaaactcaactaaaaacttataactcaaaaggtaaaggtttctagggtttacctcacttgctacaaccttgaatccttgttaaattccagagaaatggaagagaaaaactgaaccttgcccttgcttagtcccagccgaaagaaagagagagaaagttcaagagataagtctcttttccttattttccttcttttcttgatttttcttcaaatggaaaaaggatttttcaactaattcatgttgaatattcacttgctaggtgtcacatacttagggcagccacctaacactcaactaaaccaaaagacaaaattgtcctttaacccaaaactaaggtttttcaaaagctaggggtaaaatggtc

SEQ ID NO: 294185 - DNA, 950 bp, Cannabis indica
ttaaaattataaaaagttataaggtaaattataggtttggagtaaactttggagtattgttagttggatctaattattaatatttaaaattaattataaataaaatattaattatggtgtaatttccaagtagttaatttaagccatttaattaaatcaatggctatgaattcattatacctatctaatatgtaaaatgtacaatacttattgtattatctcccaaatataatatatatatatattaaattaattttaaaaaattacttttaatattttttaaaatttctttttcactattattttcatttaatatcaatagtctattttattttattttcactattttttttaaatcatgtatagatttttaaaatttttctaataaaatttcattataatttttatttaattttttaccttaatatttaaaatatatttattttactttatagatatatttttaagaatataaaaagaagaaaaaaaaaattaaaaaaatagtaataattaaagatttatattttgtataaaataaaaattattaaaatgaggtgtacttataactttatggggtgcaaataaaacattaaagccattacccttaatagcatttcttagaaaattggtgtgggaagttctctctttcttttcttccttatttaatcaagtttttcatttcctaaatttaataaattaagtaaacaaatataagtgaatgactcacttaccattaattctcatcacttaatagtaaatgtaagagagacaattttttttctttatttctttattctattagggaaaattgcagcataagtcttcaaaaacttatgtttgatgttgataagtccacaacctcaaaaattggcagtaatagtccctaaggtcaaaatttttataagtttgttagtccctaattttctcattctattataacctagtaatag

SEQ ID NO: 294186 - DNA, 631 bp, Cannabis indica
catatatgttattaataagaaaacagagagtaaacacttgcagacccatataatgcctagaaaaaattctagcctcttcacgtttttatattttagcatttatagtatattttattactgatgtatgaatatgtagtattataattttaataattttttaattgtatatatatttattaattatttaaattttttgtcaacataggtaaaatttcataaattcttcgctgagtataagttaaaaatagattttataatataatttacttaggtaggttatataaaatatatatatatatatattattttggctacaaaatattattttactacatatataattaaattttatattaaattctttcatatatttaggaaacgatcctcatttaatggtaagaaaaataattagagcatccaaatatttttattgactttttttatagatatatatatatatatattttttttttagtaaattgcacattaactatttaatgagaatgaatatttgcttaaaatgcaaagaattattcagtagtagaaatatatattttgtgtaaatgttgttcataaaaagaaaaattattgattcacatatatatctatagttttataatcttcaaaatat

SEQ ID NO: 294187 - DNA, 407 bp, Cannabis indica
attttttttcaatttttgaaaatattttatttggattccttgtgaaaaattaagcaattttgttttttacggaacttgattccgataaaaattgagaaagttatgaattttgaaaaaattggatttcgggtatgcatggatgctcaatcgcacgcccaggagcttcggacaagctcctcctccgcgcgcgtgagctgagcatccagcccatgtgcaccctgctgtccgcccaaatacgcccacgaaaaccctgctggcgccgagatttctcgcccagcttcaccctctccgcgcgcgtatgggctgctagcagccctcctgggctgcagttgcagcctactgggcagccaaacccaaagttgcgatttttgggattttttcccaaaaatccaattttttcatgggat

SEQ ID NO: 294188 - DNA, 787 bp, Cannabis indica
  modified_base (711)..(711): a, c, t, g, unknown or other
cccctcctcctacttcttcccagctggtcactcccgggagggcttcctccagcaccccttcgggcactattgtcttggtggatgaggaggaggtgcttcttgaggaagctgaaaaaggtgaagaagagcaagaggttgctctagtgcccaagcgcaagggcaagatggtagaagaggaaccttctaagcgcccccggagggtggacactctggccccgagccatgactctgggattccttccaagggggaggaatacacagtgcctctcggcatagtgttgactccgattcctggagatgaggagaggtagaatctttaggatagccaaacacaactatgccctcgacgagtacacccgaggacatgctgaggtggaggccttgaagagggtcttgcgagaggagcagcaaaacgttctcaacgtaaacgacttccagaatccgtgggacctgaacatggacccgctgactgactggttcaaccgcttcctggggcccaccttggctccttttgcctcggagatgaccagcgagtatgtctcccacctaactcaattcccacccaatggtacgctgcttgtgcatcattgaactccgtctaccaggttcaagacatcagcacgacgtggctgcggtaagtacttgtgattcatttctttcctcaatatttgtctaaggcatttgatctcactcttttctccttttttcagnttactgcggagaccagccgcctctccacggaccgtcgtcaatcatggcttcgtcatgtccgaatttgggggcatag

SEQ ID NO: 294189 - DNA, 712 bp, Cannabis indica
aaaatataaataaagatatttccaccgtaaactgatggggaaggactggtaataataatagtaatgtattgcgtgagtgcttgagtgagtgttcaatgagtgacgatgaggtgatcctttaggactcctgggttctccttttatagagcctctgatggttgaatttccctattctgaagaacgaacgtgggaagtggtcttccccttttccaggaggaaggatcgattcttatgcttcagttcagactcgttcctatcctttgtattagattggtcttgtagctgctgggctcgtttgggccttgtattttagccaaagccctatgtattttgtatgagtagattatatttcttgacttagttttgaaggattgtaattctgatttgggtcgtaagaggcatttgggcctggtgtaattttggccactacactcctcatcaaagcattgatgcctacaatgcttgcgatgcccacaatgactctactggcataaaggaagtgattacagaagttgtttcagatgaggtaaaaaataccataaaaaaggataagcactacttggacgaatgggcttggttacattcgaagccaatgaatgagaaaaagagcttgaagtccatttcaatgcagtcattccagacagaggcactttaggtcctgacacctgtataagaggtaatctcacttctgtttattctgcattccacgttt

SEQ ID NO: 294190 - DNA, 546 bp, Cannabis indica
tgaacggaggagtctatattattccgctgcacccaatgtaaggtttcttaatacttttatattgttgttttattttcattaatcgtttttagaagtttcatatttagggtgttaatcaacatacttgttgagtagatctaagatcctggtaaaataattttccaacaacattatgctatctgcgatttcaccagaaatagcatgaagtatccaagaaataacagtgttgttgcatctacaccaactatcataatcctcatcatcctcatcacactgtggaagtttaccattgacaaatttgatcttttcttccagcaacaagagatatcatcaccgatcttctctaggtgctataattctcactttctgtgaagaatttttggaaaccaaaaacaaacacctagactgtcactattggacagaaaaatatggattggaaagatcatttgcattcgtagaactttaaattctcactaagaaactgaaaaaaatgattggaaatcgtttggattgttttctaagatctcgattgcatcatcttcgagc

SEQ ID NO: 294191 - DNA, 683 bp, Cannabis indica
gctgtcgggattggaaagtgatttcgaaatggcccaactctaccgcccacttgagtagtcgtccagaagcatttggtttttgcaatatttggcatagtggttggtcggtatatacccgaacaggatgagcttgaaaataaggcctcaacttccttgttgctagaatgaggcagtaagcgagtttttctattaacgagtatcggccctcggcctcaatgagtcttttactgatataatagactgatgttgtacattattctcttctctgattagtacgacactgacggcatgttctgtgacagctaagtatattcctagttcctcatcgtccagaggttttgagagtacgggaggttttgcaagttgtgcctttagctcttggaaagctttttcacactcctctgtccactcgaactgcttgtttcctcgcaggatgttgaagaatggggcacacttgtctgttgattttgaaacgaatctgttgagtgcagcgatccgactagttaagctttgcacttctttggtttttgttggcgagttcatatcccggagggcttgaatcttctctttattggcttcgattcctcgggcattggcgatgaagcataaaaactttcccaagctgactccaaaggaacactttaagggatttagcttcatattgtattttctaaggactttga

SEQ ID NO: 294192 - DNA, 500 bp, Cannabis indica
ataaattcacggaactcccattgccgatcagtatttttggccacgatcttgttggtgatgggagtctctatgaccagggggtcatggtgaggaaaacgcaacatctttgcttcttcttccgtgaaagtaattggctggtccatgagtcggggcctttgagccgaaagctgagtgacttcccacacctcatcgtgtttaatggccctgacatagcgctttagtttctttcgagtggtccctccaatatggggtccaccagatatcatagccactctttcgttgggtcttggtggcaggccaggggtctgctgaggccctcctgagggtgcagctggtgccagcgctccgggcgcaccccctggcgccccctggggcaaaggaccccctgccggaatcaggttgagatgaggcagccggttcttgatcaactcatagaggtggcccaaccgaatcaaatttttgatctcatctttcaagtttttgcactcattggtactgtg

SEQ ID NO: 294193 - DNA, 573 bp, Cannabis indica
gtgaagtacgggctcgtatccgaaggagtttcagttcctaagccagtaaaggggaggaagaggaaagtctggtgctggacgggctggagagagctcatcacgaggatgaactcattcaacttaagcgtgaggctaagttgaagggaggtgcaagggccaagcaatatgctcaggagcccttgaatcctgaagatgaagctgaggaagagcaggtgactccgctcaagaggaggaagaaacttccggcccagcccaggcccattgaacatgaaattcgcattagggagcccagttcacctgctcagcaaccttctcccgtgctcggaaaagggaaagctgttatggccgagataagaggcttgtcaagtgatgatggacttttaagtcttgctcgggaaatcgtattgcatactacttcgtcttgtttttaagcttcttgactattatgctttatgtttctgatgtctgttttctctaaccatgttgtttttattccgtgcagacatgtctcaaaagatgctcgatgctcttaagaagagggttggaggaagctcaagcgcatcccctccggcc

SEQ ID NO: 294194 - DNA, 532 bp, Cannabis indica
tgtgattctaatagccatacgccacattccaaagttgtcgggcacaaaatatgcaaaattatgaaatttctatatgtgacataaaaatgcattctgaattcaaataaatcatcctaaataattaattccatattaataaataattttcataataaagtcctaattatctgctaatttccaaattaaagctaagcggtctttacacaatgcgcactagaaaattatattgggatataagtaagatagtataaaaataatttgaagtcataatatagaaatgaacaattagcactaaataattaaatagtgtttacctgatattctaaggaataaagaacatttggtggttgttattcatcgatgataaccaagcagtcaatggtcttgccgcattgtcaaaaggctgactcttctcttcattgttgctaccactcactacgagaagctctgggtcgtaaaacttgaaaaactttctcaaactgttgatgctctcccatatgtgcctgtcaaaaaaattgttaagtattagtgt

SEQ ID NO: 294195 - DNA, 629 bp, Cannabis indica
ttttttttgtggcaaaatctccttaaatttacttttctttacaaatttaaagtttcagttagatattatcattaaatactaattggattactactgtatcgactatgaggttttactgttaaatatatacaggtgtatacagtgatcatccagttgatatttaacggtaatatttaactggcatatcaaacttgcaaagaaaaataaatataaagagattttgccaaaaaaaaaaaaataaggaggttaagtgtataaaattaaaacataagggattttttccaaaaaaaaaaaataaagagattaagtgtataaaattaaaacataagggagttttgctacaaagaaaaaacgaataagggggtaattaagtgtataaaattaaaaataaggaggttaagtgtataaaattaaaatttaagggtttttaattaatacgtacagttaacatattatatatacatatttttactaaaaataattatacttgaatagtacaattatctacatgttgatgtgaaagcttactatatcttcattgatttgtctacataataattaaatttctaatatatattaattctaataatacatatgtatatataatttaggtaatgaagctgagttag

SEQ ID NO: 294196 - DNA, 584 bp, Cannabis indica
aactaaacaacaaaagttaactaaaaaataaacacaattatcataaaattacactttcaataaaactaaaaaaaaataaagaagtctcgggaaaacaaaaaaagaacaactgcattaaaatatgtgtgtctattaaaaaaaaaatactttctccatcaactagaaataacaactataaacaaattcgggtctaaaacaaaatcttctttgtgtcatttggaggagcctcatcatcactatcaacataattcatttcttccatgcgagcatacttgtagaacatcacaaccagcctatcaatgtttctcaacatcgaatttggagggaatatgtttcatgtcaataaagtattcagcaacgatactacaaaacatctgcaatcactataaaacaacattaaaataacataaaaacaacaacaaaataacataaaaatatcatatttttgaaaaaaattcaagttgcttagctgataagaaaaccttaagctcttggataattttaaaggtacttatagacagagcttttgcaacgaataaatttttctgatcataaatataatcccaatcctatagcatttaaaa

SEQ ID NO: 294197 - DNA, 696 bp, Cannabis indica
aaccacttggatgaaaattgaatcttaagttgattacttaactacaatagactcaccccaagaagtgttatacagagttcctaagggaatcaaagtattaaacaaaggttgaacaagctcataaggccttaataaagtttatttcttgagtcaaaagaggacaaaaaattggccattaccttgggattgaagccatgtgccggccagggtcccaaggcattattatgtgccggttagggtccctgacccatgtaagaatcagccaggattctaggttaaaccctagaactggccaacctctctatatgacaccgtgtgctgtccaagtcacaaacaagacctataggccgaccagggtgctctatggattgaaaaatatgtttttcaaagactcgaacatgttcttcgtatttttcgtgactcaaagagtcaagaatcaaaacgaagctcaaaattgaatctttttcatcaagaaatcatacattatgcatcctaaagctatcatgtgatcataatgcaaaaaagattacaatctaacgtgagaatcaagaatataaaaagctttaaaaagcttaaacagaataatgacagagttaagaaaataagtggagaacgagatttgaaagcttaccactaataaagtctcttgaggatgcctgtggaaagcttggattgccaaaatgaagcgaaaataat

SEQ ID NO: 294198 - DNA, 636 bp, Cannabis indica
cttcattaatctttttctggccatagttatacaaagtcacagcgaggtcatccctatagtgcgtaatcatctcatccatattaggaggaatctcattaatcttgccccggatgaatagatcagcatacttaatcacaaatacaccacagtcactgaaaaacaaaacaaaaataaataacaatacataaccagttatttaagcagaaaaaataaacaaataaagaatcacagaagtcataggactaaaaataaccagttatttacctgttgctttgagtggggagcttgtccacaaactcatatgcaataggagtatccttcggcacagcataagggcctgactccaaactaatgtcgttcctaccatcataaaaatttaagaaatcaaggaagtatggcagtaactcacagtacgcaaggagatcaggcaagatcttcttttgattcgtctttgtattcttcatggaattgaatacgaagatcttcctccttaaaatgctgaagtgaagaaatatccaatgtcgttgaacaccgacatgacacggaccgacaacatcgtcaacaccgatccaaggctggaagcaaaagttatattgccccagaatgtaatcggtgaccatgttgtcatacctgatg

SEQ ID NO: 294199 - DNA, 577 bp, Cannabis indica
aacatatacatacactcagatatccatatcacacattatatacagttcttaccttctttccgaattcaagtatgctggccgacctgaacggaaagtctcgtgctagatggatgccctaatcacattaatcacaacataggtgagtgacacgctaaaatactttccggggacttaaacttgaaactaaaagtttccttatcgataaataacatggaaataccctaaatatctcaaaaaatgggaaaaactagggttttaaaaactaccccaaccggcagaccggttccaggacaccaaccggacgaccggttgctacaggtcccccagaactggaattccggttctgtgctgagaacccgaaaaattctcccatgatctcaaaatcaagccaaaactttgcaaaaactctcgagtatacctaaacaattgataaacaacattttccaaccagtatttcacagaacaaccaaaaaaactcaacttgccattaatgatcaaagctttgaactcaaagctaaactgcacaaactaacactatcaaaatcagctgctaggacccttaatcaactcaaattaa

SEQ ID NO: 294200 - DNA, 542 bp, Cannabis indica
atggcggggctctaagcccaaagttcagtagctcatatgagaaggaaaaatgaggaactgcatgatgtgaattagaaaatttacactaaatactaattttttttcaagctttatatttatactttgaaaagaaaatttttacatctttctctacttaattttttctttttacttttttttttctttctatctttctcttctctctctctctatttctctttgttattttttctaactctctctcttattttttttctcagacttaattttttttatctttgtatatatataaatatatataataagtgtactattttatatcttgttttttaacactctttatctctcttaacaaaaaaattaaaagcactcatcctatattttgtatcctttacatgattaataaaaatagtatattttcttggatgtcttgtagtttattcagagttaatttatgaatgatttgcatattttaacaagattgatgtcttgttatttttttgttgatttatagttgtctttttgttactttatagttattt

SEQ ID NO: 294201 - DNA, 575 bp, Cannabis indica
atttctgttgtttatttgttggtagttttggtcctcaatttttaagcaaaattatatagattccatgcaataatattaatattattgagagaataatggaagttaattcaattttcccgctgaccaaacttggagaggaaaaaagaaagaataaattctattttatacatttgcaagagatggaataaaatgaggagtttatttatatatattttatattttttaaaaaaatttacagttagttttggtaatttctatgtttgttatatagattttggttggttgcaatttaaattattcaattagttgatatgtactgggttgctatgtgtatttccgtaaaaatataaaaaaaaaatattactttgaaatgtaaaaatgaaaaatctctataaaattaacatatatagactagtatttggattaaaatgataataatttgacttatttttagaaatgtttacaaaatagataaaaaaaattacaaaaatacttcaacacgaaaaactttttattttactttttaaattttttatttataaaaatacattttcagtaaaataataactattttt

SEQ ID NO: 294202 - DNA, 503 bp, Cannabis indica
tagtattatataaaaatatgatatataatctaattcagtataatacgatataatacgacctaatacgacgtacaaaaacgagcccatagagataactaaattgatatatttgtagaactataaagtagttttgggtgaagcccaaaattcaataaaaaactcaaccaaatgaagcccaaaattcaatagaaatccaactaaatgatcaggccaaattcaaggaattatttcacaaaaacataaaaacaacaaaaaaattacaaaaatacagtttcatagaatttttaacatttttacgatttttttgattttatttacagaaaatacggtctttttatgttgtaatcttgttaatttgttgttgattttttgttatatgtatcttattttttgttgttattttgatgttactttcatgttaattttatgtagttttcttgttgattttatgttgttttcgtgttattttttgtaaaaactgtaaaaatataaaaaaataattc

SEQ ID NO: 294203 - DNA, 640 bp, Cannabis indica
atctctaacccttgtccttttcatcgcagagtatgtcagatcaagtctagatctctttctctcccttttgggggtggtttaccaccatcttctgcactatgattgagtacttgactttgctatgtgtgggcatgtcactctatcactatggatcgattaatgaagacaatgaaggagggttcgaatcactatagaatgtgtctctcatctactagttgtctgacatagttagaaactggatttgggaggttgaaatccattggatgagatgagaacatcatgttccttttataatgtttcaactagggcttagatttgaattatatggattaaaaaagaataaaataacgggcaaaaattacacatagtggtcgaccactaaaggaccatttattaattacaattttgccaatttattttaaccacttattcttctttcaatagtaccatattttctaatttcaatcatataaataccaaaactatttatttaataattataattaattatcaaataaaatttccatttatattatttattaagtaaaccatgtaaagtctcttaattaacaaatagacccaaaaacctcctttttcacaattaagcccttgctatgtgaaaattcataaataagacata

SEQ ID NO: 294204 - DNA, 913 bp, Cannabis indica
aacagttaagttactctaaaattgtttttgatttgttttttattttattggaacacagtatttttgtaattttaaaactttaaatacagtatttttataaaattggtacaacaaaaatataaatataaaactttatatcacagtatatttgtaaactttctttagtatagtattttgtaagttcaaaaaaaaaaaacctagtaaaaattatatcaaagagaacctttattagtttgtactacctttatttatttatatattttgttttttcaaaagcaaagttcgtacctttatccgttttcgtaacatgtaataccttaatattcttataacataaaaatcaaaatacgatttttaaagaacgtatttgtaaaaaagtagaagctataaatcatgggccattcatatttgaattactgtatttttaatctgaatttttgtgaaaaaagttgaaagaaaatattttttcatatatatatatatcaattaaatttatctttaaataaaatttaatttaaataaatctattatatatttttataagtattgtatctaaattattctcatactttcacataattaagacataatttcaaacataataaatttatgttttttagagataaatatgtaggtttgtaaaaaagttgaggcaaaattttaattaaagaaaaattgatactgtcatgaagtgatagtggtaaaattggtagaataattaaaaaaatataaatataataattataaaaaaaaatgtaaaaaattaaactcagggtcttactttttaccattttggaaaatacaggatccattttgccatttaacaaaactgaagatccaatcgataatttttacaaaatacaaggtccaaaatagtattactttttttttttttttttatttttttatctag

SEQ ID NO: 294205 - DNA, 926 bp, Cannabis indica
atagtttccctcaaccaaataagtcacatggacgcaaacctcgtcgagaatggaaaataaagtccaaaccaaatcctgatgttggtttggttgcaaagctatccctgtctgcctttgttgaaggtcagtggtacttcgacagtggatgttcgcgtcacatgactggaaataagaaattgctagttaactacaaagatgaaaaagggggatctgtcacttttggggatggtaacaaagggcagattgctgggagaggtgatgtgaatgtgaatggagtagctcagctgactaatgtcctatatgtgagaggactcaaagccaatctcatcagcatcggccaattgtgtgacgacaacctctctgtaagtttcactaaaactcaatgtttagtttcatctgatgggtgtgttgtcttaacaggaaacagaacagtagaccagtgctatgctgtatgcaataccatagtgtgcaacaggaccttcttggacaaacctgacttatggcactacaggctaggacatttgaactacagagatctccaaagattggtgaagcttcaagctgtaaggggaattcctgacatgaaagtatccaaggagagagtctgtggtccatgtcagcttggaaaacagcataagacacctcatcccccaattaatagacttctcacctctcgtgtgttggaactaatgcatgttgacttaatggggccaatgcagaatgaaagtatcagtgggaaaagatatgtaatggtcttggtggatgactactctcggtttacctgggttgaatttcttagagacaagtctgacacattcggatcattctctgccttgatattaagactgcaaactgagaaagactcccaaagttggaaaagtatttagactgagaagtgaccatggaaaagagttcgaaaattccat

SEQ ID NO: 294206 - DNA, 296 bp, Cannabis indica
atagcaatggatacataaagaataacgatgcctataattaatgtacatattagatcaaacagttggaggtggtcgctgaattttcttatatatatatattgctagaataaatatatatatatggataaattgcggtataaatacctaatgtttctgattttatacatttaaatacttaatttttatttttggtggcaaaaatacataatgttacaattctcttacaccgttattaccacttccgttattaactcataaatatggacacgtggaggatccaaatgcattacatttat

SEQ ID NO: 294207 - DNA, 610 bp, Cannabis indica
aatattaaattcacaatatatatgttacatatctcatatatatataacatatatactataatatacatatatatcatatacacataatatatacattaattacacaactatatatgttacatacctcacacatatataacatatatatacacattaatatacatgatatatattatatacacatatataacatatattatgtatgcatgtctcatataaatacataaaaataattatttctacatatttaatctcactaatatatattatatcacatgctctacatatatataatatatattactcatatatatacatgttatatattatatatctcacatatatacataaaataacatgatataaatttcaaatatcatatatataatatgatataaacacatgatcacatatatataactcatatatatataatatatattactattatataaaatatagtaaatcacataatatacaccaccatgctcacccatgaatggtttttacataaaatctcttatccttgtattctcacaatcttgatttatcacctcttccattgaaaagggataagcttttgattgttagagattttataacaatggaa

SEQ ID NO: 294208 - DNA, 476 bp, Cannabis indica
tatgtgtttatttcattgtttgagaattcatattaggattttatgaaacatacttgttagtaaatcgatcctggtaaaatatttccaacacgcccaacttccccattaccaaagtaatccgagctcaggtggtaagcattccagcaacaaccataagcaatggaatgggaagaaaggaaagttcactggaaaatccgaacaacctccctgggagaaccatgccaaatatactgcattcactaatctgactgaagatatagaaagtgtgtacatggcaactcagtcgctggccccatataagaagtccaggcccatgaagaaagatgccagcaagagggacatgacaaagttttgtcgattccatggagactacggtcacgacactaacaaatgcaacaacttgaagcgggaaattgaattcgtaataggaaaaacaatccacaccagcagaagtatgttaagaccaatcagggtca

SEQ ID NO: 294209 - DNA, 534 bp, Cannabis indica
tagtcatgttagactatactttattagtaccaattatttaaaatttaaataaattaactaattatttaactttattataataaataattaaattaatatttctttgtttttttttcttctcttccttccaactaattatcatcaaaagatccaaactaatacccttccttaatcccaaactacccaacccacttaccaccaccaccaccaccaccttcttctaacatggcatttaatgaattatgtttagacgctataccttaatatacaaatagaaccaaacattaagagtgtattgccactaaaagaaataaaagattcattatatcaaaataaaaatataagtggtttaattagccgaataaccttctttttttttttttttttgaatggaataaccttatttttttaatatgtttcatccattaaaaaaaaaaaaactagtgtttaactacttcaccaatagaattaattacctacaaaaataataaatcaagtgaattagtaccaactatttaataaatttgtataaaa

SEQ ID NO: 294210 - DNA, 531 bp, Cannabis indica
ttttagaggtggttggcgagggttttcgtgggttctctctgctgtagaagtggctggtatatgctggagaagaagaagtgaggaagaagaagacgatgcagaggttattcagtggagaccctatgccgtcggttctttgctaggaaccgacggcatagggtctccctaaaaccctcaaaaattcccaatttccaaccgacgggatagggtttattaatatatatacttacggtttttaccaaaaaaccgcctctaaatgtcaatttcgaatcaggtgggtgttttcacaccctttagcttccttttttataaaatgggttaaaaaaaaggaagctaaaggcccatattgtagtagtggtctaattaattaatagtacatttttttttttatattataggcaaaagaaaaacgttggaaaaatattaatggtcgattggctgatatttgcatagcgacatcagcggctcctatatattttccagcgcacagctttactattactaagagcagctccaaggagactgcaaatt

SEQ ID NO: 294211 - DNA, 785 bp, Cannabis indica
attaccttaattttctatgtagaaaagctctaaaagttcccaaactaatcaaatttttgttttgtactgtaactgcaaccacattggctaagtttgtaacatataatccaatctcaagaatcaagattaacaacgatataatccatgttattttgttaataaactatatatttatatatatatatgagtcttttttgtatttattgaattttttatttcttataaaataatcgttggttgtatagaaaaatccaataggttgtttggaatcaaggacggaggcataagcatcaaaggatcaaacgattagagaaaaaaaattaaagggggcaaataaaattattttttttagctaaagtattctctttaatattataccgcttgtaattaagtagtgggtcacatataatttaagaaaataaattgtaagaatatcggtaaccaatcataaagtgacgtctatgaaaagtgttgggcacgtttttatattttaattataataatagagtataaattgtaacccctgaacttagaagtgtaaatagatcggatctgattcgactatgatccgaatcgatttagatcacgtaatgatatgttccacccgctagatcaaatattcagatcgaatcagattcaacttgacttatttgaattggatctgatctggcctggcctttttttttttgaattttaactttatatttaaatttataattttatatctattttaattttatatttgtattatttaatacaatactatgtttggtattaacttgtat

SEQ ID NO: 294212 - DNA, 518 bp, Cannabis indica
attcattattcatacacatacatatacatatatatgtatacatacatccatcaatcccctctattactattactattaccttccagttctgtgtttttgtattgtaccaatcagactgtttcaaaatcacccacatgttatctttcatcctatcaaagctcaatatatgtatatatataataattcaacagtggtcctcattataatatctctggaacccacataattataatcgataatatgatattctctcaatattaataatataacatggacgtgagtaacgacctataaatatatattgcaaaattataaatataaacgtggaaatatagaaagtgtactactgctccagtttttattattattataattattattattattttctatctagaaaattgaaagaattgcctttttcttcatctttttgattactaatataataaatttgttaattatgaaaacaaatgaaagaacaatttatttatttattttttttttttgttaaaaagtta

SEQ ID NO: 294213 - DNA, 789 bp, Cannabis indica
accaatatacttcaacacgtgacattctgccagtacttacgggattgtaaattggtatcgactgacttataaaaacgtgagcttgagaactattgtcgctattttttaattttaggaactaatctgcatcaaagttaactttttgggacttctcccaaaaaaatatatattatgaattggtattcagtgaatattttgtggattaaatttgtgttagattttgaattattaaaatattttaaaaaaattattagattagaagtatattaaaaaaagagaaatgttaaaaggtattattagtttttagtatttttctcaatgtatattattattggtataattaagtatcgaatctcatataatttaagaaaataatttttaaaaaatatcgctaacaaaatgcaaggcaccacctatagaaagtgatagacactactggtatctaatagcaatgcttttaaaaaaaaaagaatatttaggatttttattccccgaactataacatatgtattattgtgccccttgaatttttcagtctgttacaaatgattcctaaactattcacaatattgtaaattggtcattctgacaagttttgacacacgtgacaaataaaatgataacatagacagggccatgtgtataaattaaactttaaaaaaaaataaaaaaaaatagacatttttaaaatatcattaaattaattaattaatgattaggaaaacttcataaaactaaattaaaaaaacttaaattattttttcaaattaattacacatgtggcgttga

SEQ ID NO: 294214 - DNA, 531 bp, Cannabis indica
ttaatttccataaatacatataattgaattcgaaatccaaggtatttagaaccaatacattttcgaagttcaactctaaaaataaaataaataaaattggaaaaattattctaatttatgttggtctaaaattaaataaattaattttcaatataaatataattttcctatttaattaaatttcttaagaaaaatataaaatatttaagtgtcttgaataaaatcaacttaaatattaattttttattaaattaaatatatctacaaaaataccaaaaagtctacctagaaaatatctatctagataattcataaactaattattgattttttaattaaaataatatattttagtctatttattttaaataagttattaatgaaaaattacattatttaagttgatctaaaattaattaaaactaattttcaactataatctaattttcaaaattgaaaaatttcgaaatatctacattaaaaataatgcaattcaaaatttaagtgggaaataataattaaaataaaata

SEQ ID NO: 294215 - DNA, 598 bp, Cannabis indica
ataattctttttcggcaatggcggcttctccattttttttaataaaagaaatacagtatcgtagataataataaataatatattataatggccccttcaaaaataaattaactagaaaaagaattaattatgataacgatcgatgtgaaatgtctcacattaattatattctctctggttttcacctcaatattctttcagtcaaaacatcattaattttaattaaggaacattattattttataatcatttctgaattagaatatataaataataaaaatagttagatcttggatgaaagatattatttagcaaagtatttgaaaccttattaccatgcttaaatagtatcgttttaatttaattaataagtatattaatattgcaaattaataaaacttttaaactaataataataataataataataataatacaatattcatgagatacgaggcattaattcaaatagaacgttaaattaatatataataaaacatgcatttagccccatgataataacaataatataacaataataataaaactatattatcaactctattaaaaaaaaaaactaggaatttctagttttttg

SEQ ID NO: 294216 - DNA, 325 bp, Cannabis indica
tattatataaataataaaaaaaatggggatctatgaggttaagttagatataataataataataataataataataataataataataataacgtggggatatattgtgatttattttaataaaaaaataattggtttatgttagatattttatgaaaaatttattaaaatattttttagtattattttagataattaatatttataaacctaataaaaattaaaaaagtaagagaattaaagagaaaatagataaatgcatttagagtaattctaaagcgccatgtcaccgtcttatacttctcctttatatatatattgattt

SEQ ID NO: 294217 - DNA, 562 bp, Cannabis indica
agttcataagaaaggaactcacgtaaacccctatagggctaacaaggtgaatcagactttaagaggaagagcaaggtccgacagcagtcatgactggtgtgacctacgagaacatttgaacttgagaaaacttgatcttcgtcaatgactcggtccaaaacaaagggatttactccatttgcgaatagacgagttggagaataagttcagaaagtatcaagtcaaggaacccggaagacaacttgggtatgattctgttgaagaattcgaataagaagtctcaggatcaaagaggaaagacgattccaaaaggctacccaaggataagaaacacaataaatatatacccctttatgctgaatataccgagctcaatgaaactcggaaaaatatctacctcgcacatgtacaggaagtcatttttagcgaggcaaaacctatgagacatccgaggcgtaaaagggacctaacaaaacggtgtgaatatcatggggatatggacataccacagaagagtgtcgtcagttgaaggatgagaaagaaggtctcatagcgcgaggac

SEQ ID NO: 294218 - DNA, 625 bp, Cannabis indica
ccattttcaatttatactagatatatgtaattaaacaaaatgaaaattactaatgcattatgaacaataacacaaatagaatattatatcaaataataaacattcggtaaatttcccccctttttttttttttttgaaaaaaatcacactgccaaacgacacgtcgtttcattcaccaaaaggctgcctaagaagacaaaaacgacatgtcgtttttcacagtgtgaaaaacgacatgtcgtttactataaacgacagctgcaacgaccttccaaacgacacgtcgttttttgacaaacgacacgtcgttttttgacaaacgacatgtcgtttgcgtcgtcttcttcagccaaaccgggtcgatttttacccgtttttctgcacgcgggtccgtcgaacccgacccaaacccgatcggaaatgacaattccgacgaccaaattgcgtgttttcaaatctaaaatgttctaaatcaaataataaagagatccacatagattttatgcacgaaaacacgaaaaaatataaactttaatatcacgaagttaatcgggtccgaaaaagttttaactgaaaattttttccatctttaagtttttcaatggattttcaatgcttagatcga

SEQ ID NO: 294219 - DNA, 542 bp, Cannabis indica
cttttaaaaattattaattattgtgtaaaacattaattatatatatacctaaatatatatatactaaataatattttctttttaaagtaaatgtgtataataagatggatcatatcaatctcatttaatatattaatatttacaacgttgagaatattttatttttttgtagagaaaagaatattatatgtgatttcaaataataagatggatcatcaaactcatataattattaattggcgtgctactgaatcgatcagtttaccaataagtcggttttaaatttgacaagaactctacggctacatatacacatagaagtgtaaaaccacagtaatctcatatataaatatattagcaatattggcatctttgcatgcatgcatgcatgtgttagaactaattatgaatttatgaatatgcatataaatataaatatatgggtaaatactattttagaccctgtattttacaaaaattaccaataatattttgttttgttaaatgataaaatagaccatttatttttttaaatggtaaaa

SEQ ID NO: 294220 - DNA, 326 bp, Cannabis indica
aggtggatccagggaaaatagaatccgccagggattggccaagaccgaagacagtgacagaaattagaagctttttgggtttatccgggtactaccgtcggtttgtggaagggttttctaaaatatcaacacccttaaccgaacttacgaagaagaatcaggggtttgtgtggtcagataaatgcgaagctagttttcaggagctgaaacagagattgattacggctcaagtgttagctctgccttctgacgatgcaggccgatcgggttatcgcttatgcctcccgtcagttaaaggattatgaacagcgatacccgactcatga

SEQ ID NO: 294221 - DNA, 685 bp, Cannabis indica
ggcgatgatctcatcccggaaggtcttctccgcgactggcgccctcaagttgggacagaaaacccgggaaaggttagagtcctccacagattggtgcagaaggatgagttttgccttcctgcagttctccgtagtgaccaggcccccgacgtcaagatcagcccggtcataagaggcaaaggcctaggctctccgaagaaagacccgagtaggtgcagtccgttcgtaacggggaatcctgacccactcagtaaggagctccaaatgctccactgcccgaaacccggaggagaagaaaaaacgatggcgataccccttaacatgagtttgcctattatacgggaccaccccttcattagcagggtgggcccggaacccgtaaaaaccgtccttaagtttgtcccccttcttggggacggaaataagttcgtaaaaatacaatattttcgctgggcggggagagccccatccccggggcggaataaaaaataaataagcttgaaagcagacggtatgcttggagaataagttggtatggcgcaaggccgaaaaaaactaagaaattaacaaaataatcttgaagaggaagcatggccccagccatcaaatgcgtctggctccaggccccaaagccgccgtaattgtgattgggcgtcttcgcgtcacgaggtggccgatggtaggt

SEQ ID NO: 294222 - DNA, 826 bp, Cannabis indica
atatatataaaaataatatataactgttataaatattaataattatgtggatgtccaaatcttttatttattaccatgaattgtaatcaacattcctcttttccttagtttccctttttcttagtttcttaatatctcactcttgtatttgtataaataggggttcaccccattggaataaacaactcagaaattctcattcactttctctttctctcttcatcttcttcttctttcttctcatctactttatattattttatattattttataacacgttatcagcacgagtctctgcccaagcttcaagcatgagtctctgcctaagacccaatgtaagtattttgttaaagttcttgaattgtttcaaagtcacgatacactaaatatatatttatatatatactcatctgactgaaacaatttcaagaatcatttggtttcctttttctttttatctatatatctatatattatatatgtatgtatatgtttttatatatttattattaatttcatatatatatatatatgttcttatcattcataatatttacaatatatgtgttgggtgactattcaatggttacatttttattgtaactgtatggttacattttcttttacctgtaatagcaggttacaaataagtagaaattcctattttagaattaattaattataattaattattttttaagtaattaaataaatattaaacaagaccttttttagcaattaaaatttataaatattttttttatttatatataaatcctttaacttaattattctaacaattaagccatttaattataatattta

SEQ ID NO: 294223 - DNA, 692 bp, Cannabis indica
aaatattcgactgttggggaattgattttatgggaccgttcccaccttcttctggctacctttacattctcctcgccatagactatgtctccaagtgggttgaagccgtgccatgtcgaaatgcagataacacaactgttgtgaaattcttaaaagaaaatgtgttatctcgttttggcacaccacgagctatcatcagtgatcaaggcacccatttctgcaaccactcttttgagcatttgatgcaaaagtatggtgtacttcacaaggttgcattgccttatcacccacagacaaatggccaagctgagttagctaatcgtgaaattaagcaaattttagaaaagacggttaaccctgaccgcaaagattggtcctcccgacttctcgatgctctctgggcctaccgcactgcttacaaaactcagctaggcatgtctccttacagactagtctatggcaaggcctgccatctccctgttgaactggaacataaagcatactgggctgtaaaaagcctaaattctgatctcaacgcggcgggccttaatcgtaagcttcaattgtcagaaattgaggagctacggaatgatgcttatgataactctaggatctacaaggctaaattaaaagcggctcatgacaagcagatcctgaggaaaaaatttgagccaaatcagcgagtgcatctt

SEQ ID NO: 294224 - DNA, 399 bp, Cannabis indica
attatttttttcagctgatggaccaatctcagacccatataatagtaaaaattaagtaaaatttctaattaaataagaaaattaatacataaaactactaaaatttttaatattacccattaatgagtaatacccattaagattgcactcatatatatatatatatatataaatgaatatcatatttggtttccctagaagacacaactatatatatggataagccttaaggccacaataagaggatatatatataaagctttttcaatggcagttgttttttttttttttttacagtattcaatattgtaggtattttggcactcatcaaaattattgaactaaaaatatggtatttttataacaaaaattgaattaataaagatgttttaataataa

SEQ ID NO: 294225 - DNA, 654 bp, Cannabis indica
aattaatttttcatttgattattttgaaattaatttagaaaaacacacttagtttaatgaaatttaaattcaagataaactaaatgaatttttctgtatttaattaaataagaattaataactaattagattcttctagatacttaattatttaatatttcattaaaatatatttaagttgacaattagttatttataactaattttggatcaacttgaatttgaatatttttgaaattcataattaagttgagaaatctagaaattagttattggaagattctttaaaatattattttaagttgaaagtttgttaacttaaaatggaatattttttcaaattaagtggttagtaacttaatttgttatttaattaaatttttgaaaataatttaagttggaagttgagttattttagaataacttaaattagataattttcaaatatttattttattatattttaatttatttatttttcgaattttatatatttatatttaatttttgaaaattaaatattgaaaattaaattaaagttgaaaattaaattaattttgaaccaactttaaattaagtaattttcattattaaaatatatagattaaaataaatgattaattaaaaaattcattgttttaaataatgagcttt

SEQ ID NO: 294226 - DNA, 501 bp, Cannabis indica
tataacaatataaaattcaattattcaatccaaactaaactaaaaataccaatgagtttgattggatgttagatgtattggatttttagacacctccaacatttgatccgatctaattggatatttaaaattaacatctgatccgattcgatcacaattagatatctaatatttggcagtcggttgtaattggatcggtcggttcttattggatttgatcgatttatgcacaccacaacataaaaaaagtgtattttttgtaaatataatcataaaaattgtaaaattatttaaaattctgtattattgtatttttattaattttttttttatttttttgtattcgttgtgtagttttagcctcaataattttcttagaatacgttatcttgaattttcttaggatgcgtttggaaagtcacagtgtaattagatttgtgtgtaattagagctaattaaacaatttgacatgcttgtctaaccatgtaattacactataac

SEQ ID NO: 294227 - DNA, 709 bp, Cannabis indica
atgtactaaatcatgtcctatgagcttttaaggttattaaaaatctcccatgaactattgagattgttggatttaaagacttttgtcaaattttagtaaggaaagtttaatatagatgaaagttcatgagacataatttggtaaatgtcaaagttcgaggggcatgatttggtagatatcaaagtctgtgaagtatgatttagtacataaataatcgcagaattaataaaattaaatgaaattagacaaaaattcttaaattcaaacaatctcaataatttaagaaacatgacttaatatatagttattttaaatattactttcatataattttttaattgttttcgtgttattattattgttcatgtaggtacataatgtaattttttttaatatggagttgtatatatataggttagaaaatgtacattcatatccataagtaggcacatgtgatgcacgtttttgattagtttatttatttttgttttcaattttttataacatttattaaatttgtatatatgactagtagttagcaaatactcttgtaacacatgataaacattaatgatttagttgagtataaacatatttttaagtgttcatgtttggtagtatcataaattaggtggtttcttctcttaagatttatcttgcctttttttatgtcatttaaaaaagaaagtaagaaaaaaataaaaaatag

SEQ ID NO: 294228 - DNA, 502 bp, Cannabis indica
ttacttttcataattacaaataagtaaggactattattattgaatcacattattataattatatacaatttgcatgagtgaatccagttattttatttattttttaatatgaaaaaaagtggactagaatgtaatattatgtgtatatagtaaaaaaaaaaaaacgtgaatagcggtataaatatttaaagttttaaatttataagcggtataaatttaatatttatttttaactgcaaaagtactcaatatttataaaactgtaattttttttctttaattttgtcactattcaaaatttattaagaaattatttaaaagtaacttatactaaatgtttttatttagactcaataatttagaatttagactttataagtgtcttatttaagacaataataaaatttatactgaagaaattaaaaaaaaaattataattttacaaacactaaatatattaaaggcaaaataccattttggaccttctgttttgcaaaagtta

SEQ ID NO: 294229 - DNA, 600 bp, Cannabis indica
tttcacagcagaaagatgggattccctgggattttcctgatatcgtgcacaaacactaacactataaccaatgtcacaacgataaagcaacctacccatcatactttgatacaaaataggatctatcattacaccttgtttatctttagataatttcaagattgtgctcttaggagtattataatgtctggctctttcaagaccaaacttcttcaccaagttctttgtatactactcagaaaaacaactgcacccatgctcattttaaactcttgttgcagtttttggacaaaaacctgcacttcagagttaaaagtagatccaaaaacaagatcatcaacatatgaaaaaataatatcaaattgaatgtgtgtgatgaactgtgtttttaataacatttccttttctataatcatgagagtgtaaaaactcagacagatgctcataccaagcacagggtgcttgtttcaagccatacaaagcatcgtctaaaacatgatcaagaaggtgggaatcctcaaccactccattttgttgtggagttttaggagcagaaaaattatgaaaaataccataagatttacaaaatttaccatacac

SEQ ID NO: 294230 - DNA, 921 bp, Cannabis indica
tagccatgatttggtttgttaatcttgatttgtgtgtgttcaaaataaatctgatgcttgcaaatcgaagaaagtttcaaggatcatcaagtgaaaagcaatccgaaacttgtaaaagaaaattttgaggaggatgaagacgagcgcaatgacggtggaggaggataaagcttgtaaaggttttggagcggctgcgacatatttgagaagtggtttcgagaaatatgaagacgataatactgtcagctatactataggcgagacgtttatagaccgtcgagaattctttcctccactctctctcgctatgtccctcacctcctctctctcatggtagcacaaagataagcacaacattctcttatttgttgtttaaatttctattaggcatgatttggtttgttaatcttgatttgtgtgtgttcaaaataaatctgaagcttacaaatcgaagaaagtttcaaggatcgtcaagtgaaaagcaatccgaaacttgtaaaggaaaattttgaggaggatgaagacgagcacaacgacggtggaagaggctaaagcttgtaaaggttttggagcggctatgacatattcgagaagtggtttcgaggaggatgaagacaataatttatttttgggggcaatccactatagcgacagtttaaaactgtcagctatgctataagcgacggttttatagaccgtcgagaattctttacctgacggtgtaaaactgtaaggaatttcgagttttttagtatgtagtgatccctagttatacaaaagtattaactaaaagaaaagaaaactaaattaatgtaataaaagaaaatacaatcaagcattaatggtgataattaatttggtgatttgggcattcatatataatatttcataacactacccatttgatgtccataaaaactg

SEQ ID NO: 294231 - DNA, 767 bp, Cannabis indica
aacaaagtgacataaatattacaatataatttaaacaatcacatgaaaattaatacttcttgttatttttgttatgaattgcaaactcggtatttaacatggctcctaaaagaatataaatcactaattagtaaagaaaacaattataacataactcaaaataccaaattaaattatgacatatataaactcaatatcaatattcactaagccattatataataaaaaaaattaaattatacaataacttcttaacaaaattatcccaattaaacatgctaaaaattgatacaaaataactcaaattatagatcataacacaacaacaaacaaaaaaaaaaattgatcttataagttataacaatgtagtatccataatagactaaaaataataatgaaaaaaacatagagttcgataataagctttggctttcataataaatgaaaaggaagctttagcaaattattttttaaaatggaaagaaaaaatatttagcacatgattttttaattatataagtgcaaatatattatcacataataattttgagcctcaaaggttagaaattaattatgaattaccctctatttgtgtaaagcctgtcattgagagactacacggaccttaggtggaacaacaaggttggtctttgatgggtgcacccctttcggacagccatggctacctcgagcctatcttaaaaacttaaagtcatctccaattctaaattgtttagcccacttatttcaaaatcgcttgtcgacaa

SEQ ID NO: 294232 - DNA, 461 bp, Cannabis indica
ggggtataatttaatataagcagttgtagctgtactgtgagaaaaaagcagttgtagcagaactgtgaaaaaaaagttgaactggatgtttggtaaattataatttttaaagtgctgtgagttgttaaaatactattataataatgataatattttaatctagttcattataatcacaaatatatattaaaaaatgtgttatataaaatttttattttttttatatatttttaattatttttttatagtataaatttatatgcatttaataaaaataatttttattatttttaaattatatttttatcacttgtaaaagataaaattgtagtttatcagaaacataaattgatattgtttgttaataataaaaatataaatataaaatatttttaaaataaaataaaaaattaagaaatttaaaataaccgttatttttaaatattttttccatttaaaaa

SEQ ID NO: 294233 - DNA, 519 bp, Cannabis indica
ctaagtcgttggttctaatcctggtctagcttcgaggttgggaccgggtacgggtctagctctgggtcttattctaggtgtgggtttgagttcgggtccgagtctgtgtccaggtttggaccccgatcagggtctaggtttgggtccaggtccaagtgggggtcccgagtgcgggtccaagtttgggtcttggtccggatcacagcgcagatctatgtccagcatttcgatcccagtctgggtcttggtccgactccaagttcgtattcggatatatatctaggtccaagtctgtgtttgggatcgtgtcccagatttaggtataggtctgggtctcagttccgatctgggtacacgaccgtgtccgagctcgagttccagtctcagtttgggtctgaggctaggtctgtgttcggttctaggtcttggtcacggccctagtcttgttctagggtcctggttcggcgattcttgttcaggatctaatttggggtcccaggtctaggtttgggttcgggt

SEQ ID NO: 294234 - DNA, 1116 bp, Cannabis indica
atatatcaatatatatatatacttatctttagatttacactaaaatatatatgtatctaattactaaaataaataagctagtatatatatatttaaactttatgtgtatgtgtctatgtgaataagaattatttttcttgtgttttttattacaaaataaataaaatgcaccaactcaatatattactaaaaaagattaagaaattagaagtttgtgtcttttttttaattaatatatattacatattataattttttaaaaatatatataattaagtgcggattggattggatcggttactttttgaggtcaaacaacatccaatccgcacaagtgcggattttagatttttcaatccaatccaatccgcacaagtgcggatatccgcattttgcggattggattggattggatcgtgcggattggattggatcggatactttgtgaacacccctaattaataccctcccataaatagctttgatttttaattttgattagaaacataaattggagagaaatgtatatgtagagaggatgaaaatttttttactgtttgagatttcacacattaaacccgagaagaatatggtctaatgtgcttagttgaattaattatttgtaagaattattggaagacttaaagaaaatgctgagttttttcaagaagaaaataaacataataaaagtttactaaaaagtaaaataaaataaataataaaataatgaggattgcaagatagtaatattttttcattgaaagacatgtgtccatgtgtataaatgatttttttgagttagttttttagtaaaaaaaatagaattatctttgaagaatgtctgtataaatgagggtaggttgaaatatacccgttttttttcatctaaaaaccaaaaatagtcttattttaaatttcaattgaaatgtaccccttttataagtccattaccgattataccctcacttaagggtactgttcagggaggtgaggaaaggttttttttcattacataaaggtataatcgggatataacaaataaaagagggtataaattaaatatatagaaaagaaagataaaaatgaaaatgagttaaaaaaaaaaaaaacggtaat

SEQ ID NO: 294235 - DNA, 764 bp, Cannabis indica
aacatcaatatgcatatgccatccacatattttatcatcatcatcactatataacttttcccaacatactttataatagtctaggaaggtaatccaatagcaaataatataagcacttactataccatgagtcgacctatcttcgcagtaatgtacttattcgaccagtcttcaagaccttttgaaccatgggtgctctgataccaagttataatgccctaatctatagggacgccacgtgtgtgatttataaaatagtttaatactagtagattaattaattattaaaaaccgtgataatattaaaacttgactaaaatagaacactaaaaatggacattataacggcataaaaagcgtgttctagggatccctgtaataaaaagttttacaaaagaactatatatgacgatgcctcaaaaacataaaaccaaaaaacacaatagatacaaccaaaaacaattcttggcaactcagcacgcaggccagcaaggtcaatatgtacattgttggataagactgtcacctcatggttgatctagcttttctttgcctttacctgcaccacatagcacccgtgactcacaaggactcatcaagaaaagtaatattaataataatccatatagttaattatttggataccgtcattcatacaaaaccagaatcaaaccatcacgcattaatcaaaagatgaaaaccaaatcactactagcatctaccacgaataaacatcaatatacagatatttggtaatacaaaac

SEQ ID NO: 294236 - DNA, 554 bp, Cannabis indica
cctccgacttttctaggaggtattgacataattaaggccaagcagtggatgaagagaggactgaatgccacaatcagtcgggacttgaaggttaccacttcatatgacactttgtacaagaaagtgatagagctagccttaattgttgaggaggctgaataatctgtaataaatgagcagaccgcaaaggatgccgtcatgacatcgaatccgcctgctagtggtaacgtcagtaaggggaccgacagtggcaaccctgattacaaacggaaggctgaggctttcgaagtatcagggagtaatagaaagtatcggggaaattgaggtgaccgtcaaggtcacgaatcctctttcaagtcatatcttgaatgtccgaaatgtaagaatcaccatcagggtgaaagatgggccaaagctacgtagtatacttgatatagattatatgaatcggacgttccaagattacctgattagatgtgtgatcgtgtttatcgatgacatcttggtgtaatctgaaacagataaagaacatgagttgcatctcagatcagttt

SEQ ID NO: 294237 - DNA, 513 bp, Cannabis indica
atgatattaagttcaaatatatttaaaaataatattttatttaaattaaggtttgaaaattggaaaaaatcccacaaaaatcgcgtttttgggctgcccacgagacaggctgcacgttgcagcccaggaggctacaaacgggcccgatgcgcgcgcgggagaggaagtgacgccgagaaatctcggcgccgacaggatcgagacgtgcgcgtccctggatgccaaacgaggctgacaagcgcttcagacaggaatttttgtcccaatgccgcgcgcgtaaacgggttttgtccgagactctggtacgattaagcaccatctcgacacccatggccacccaaaattcaaaccttcataactttttcaattttgatcggaattgagttaccgtaaaaaaaaaattagcttaatttttcataagaaatccaaataaaatatttttaaaaacagaaaaagtatttttcatagaaaatttcgtacaacacatacattcatcacataagcacataaacc

SEQ ID NO: 294238 - DNA, 649 bp, Cannabis indica
gataaaatgaaaactttcaattactctcagtatggtggttacaagaatgattttccaaccccctctctcatctaagaaatgggtatttataggctctaatggcgtgagatggtggtccgaaggagacaagttgttgctttcaggctgcaaatctcaagtgcaagaggtggtcttgcacctcgtacctttgtctggtgtcggtggtcctgggtcgcaggagtagtggatgcagagtcctggtggtcagggcgtcagggtatgtaggagcgatgctcccactacttgtacctccatgctttcaaagcttgtagcaggcgtggtcatacgctcctcgcatgcacaccttgtccttatgattgtaccttttcgcttcattctccccgtacttgggagagctttactatgttgagccacattgtcatggatgtcttgtgttgagtgagaagtgcatgcatgtcgagtgacttgaggatgcatgcatgctgagtgacttgagaatgcatgcatgctgagtgaccttaaggatgcattctagccgagtaactaaggatgcatgcatgtcgagtgacttgacgatgcatgcatgcctagtgactaggatgcatgcatggcgagtgaccttaaggatgcatgctagtcgagtgacttg

SEQ ID NO: 294239 - DNA, 568 bp, Cannabis indica
atcttaggtcccagtctatgtccgtgtctgggtccgggtctgggatcgagaccggggttaggtcttgggtcccagtcccagtcccagtcctgggtcctaattgttgttctaattttgagttttggtccccaatcttggtctgggtcataggtctagttttgagtctccaatcccagtctgggtcaaggtccaagtctgtgtctccgttcgcgttcgtgtcccgagtcccgatctgagttttgatttaagtccgcatccctatccaggtttgggtctgggtcgtagtcagattccagttctcgaactcaaacccaaactcggactcggacccaagtttggggtacgggtctgggtttgggtctgggtctgagtctgggtttgggtttgagtccgggtatgggtcctatatcttaagttcttctccgtctacaggtttcgagagtacaggaggttttgcgagttgtgtttttagctcttgaaaagctttttcacattcctccgtccactcaaattgcttatttcatcgcagaatgctgaagaatggaacacacttgtctgttcattttga

SEQ ID NO: 294240 - DNA, 813 bp, Cannabis indica
agggaacattgataacgacaaactgcaccatcattctacgagaaattgatcggtgctgcatcttctttgccaaaggagatcgtgtgctctatgggcttctatttcttagagctctagtcttcgacagctactttaggctcgtgacagagtgttcaagcataacgctccctagctttgctagtttcagtagtaatgtgggggtcgcttattatgatccccaaatgtcctgccatgggtggtggtgttggatctccatcttggcctccttgtgcctgggtctagtcattttgcacataacgacgcaggtggggattgttatgccttatcatttacttaatctccctcttcatattttaacactcattagtgtcgtgaccgaagtcattatggtatctacaaaacttcgccatgtccctcttgcccatctcccttttgattgtaaagggatttcagtatggtactcgtcccctgagtcgccataaagatggtctcaggcttctatatcaagagagtgaagcaagtagacttccctccttatttttctgtggcgtgggcgaagtgttgaacttcccctttttgccactgttcctcccagagctgttggtgttggaaattattttaccaggatctagatttactaacaagtatgtttgattacaacctaatatgaattctaaaacaatgaaaataaacaaatataatgtttagaaaaccttacagtggtgcagcggataatatgactccttccattcagatctctagcccttgattcctttttgtagcagagcataatcaagatctgaatcttgatct

SEQ ID NO: 294241 - DNA, 623 bp, Cannabis indica
aatttttgtattttgcacttttcattctagtcgagtccgcatatatctggattcagggccggccagagggtggggcaaccggggcataggccccaggccccaccattttggaggcccccgaaaaattaaattgatatatatacacacaaaataatataatatataacttttagttcaacaaaagtcatgaaaaggctgtagcacaaatagtaaataaggaagtagaaagttgatgagattgttgaggtgcttggttcgattctttgtcgagtccattttttgtgttttacataatacatacatataagaacaaataaatagtgaagaattagtttaaatttgtaaggtttattttatttatttatttaaaataagaatataatattttggactaaatattatattttgtatatttttttattaaattactttaatatataatgtacaatagtattttaaggtacaaattggtacaaaaattagagaaaatattatatttagtataattttttttaatgaaattactctaatatataaagtacagtagcatttcaagatacaaactagtaacaaaaaattaacataatttttgatatactatttttttttaacaaaagtgccaa

SEQ ID NO: 294242 - DNA, 464 bp, Cannabis indica
aaaagagaggaatttaaccttactttaaacaactgtgattagttgaataggcccaatactaattggcctaaataaaatctatcaaatgagacaattttatttagcaatctagtccattttaattacaaaaattaaatgggctccttatatgcatctaagcccaaagcaaacatataggctcacacaggcacactgatttggatggatcctatcatgttactaggtttatacacagatgaaaaaagattgcaaaatttacctattacaaattatttatttgacttgtttgttagataaattaataataaacccaagattaatttgtatataacatagaacacaataataatatataataattaggtatgcgtacctgattgatccatagcaattacctcaattcgatccatagcaattacttcaattcaatccatagcaatcacttcaatttgatagtgcaatac

SEQ ID NO: 294243 - DNA, 554 bp, Cannabis indica
ttgaattaaatactaaaaaaacaatgaaaaaacagagttacactcacaatgaaagaggtaaacaccttatacctctcaaaaaaatgaagaaaattttagcttaagagtcaaatatggactctaataggtgatatataattttaacagtgataattaagagcacttacatcagatgcttaaaaataacatttttaaaaagtatttaaagaactaaactaaaaacacgtaacaacaaatgctctaaattctttttattttaattttttttaaaatttaactattcaggctcaacatttatagaataatattcattgtttttaaatatactagttagatattacgtgcgaggcacgcaaacttagttttatgctaggtgttttctactttatttaaaaacaatacaataaataattaaaaaaatatattattaattattatttgaaattatttttaagtatattaaatagtggtattgtaaattgtgtgtcagtatattttataagtaaaacataattgaatctataaatttatgatatgtacattgttattaataa

SEQ ID NO: 294244 - DNA, 626 bp, Cannabis indica
gagcagccatgagagcgagcagatggagattgtacatgtcagggcggttaggcttggagtgtacgatctttgggacatcagggcttattttgtatagttgctaggcgacagacttttgtatttgtacaatgaaacttttgtaaatgctttttatcctgaaattttatatgtatgctattttatgtttttaattaaatgagcaaaattttaattaatcatgatttttgataacctcgttgattagcaacgagttgcattgtaagttaaaaatagttagggtgttacacttttaatttaataaaatgaatttaagaaaaacaaacacaattaaaaataagatattttgaaggttaagatattttcaattttatttaaaaaataaatcaaataaaatatcataagtttaaaaattttatagttatgaaacgctaaaattcctattcaaaccaaaattaaaaacttttcaaaattccatgtcattttgacgaatatataaaaaattaaaataaatatctaataagataaaatgtcaaaattaacatttttctaatcttataatttaaattaataaaatatattttaaaaataacaaattttaaaaatctgatatggttagcaaatttaaa

SEQ ID NO: 294245 - DNA, 600 bp, Cannabis indica
catcggaagaaactgatattgaacttggataaaatataataaacttaccataatatctattcaattcaatataacctagttgatcttagatcaaatgatctcaatcctgagatggttaggttctagttccattatattatttgtgttcttcaatttgttcgttaaagtcgactaatagatcttctcgtgacatatagattaaagacatgatagttcaattgagtgggagcgctaatcatagatacggaatctatagcttctatctagacatagaagtgaaacgataatttttttcgagcttggcttaatagagataaatggttgagtactcatttcactaattatattagttaactgaaatgtcatttataggtagctaagtgttttaaggataaactacattgaatggtgtaatggtaaatttatccctactcatgaatgtagatcaactatagaggatcattgataattaggattataacaatgaataattcatagcgcatctatataattgagagtacatttcaaaatctatagtggtgcaagaatgaattaataagttagggaatttacatggtgaattctagatttacttattgg

SEQ ID NO: 294246 - DNA, 487 bp, Cannabis indica
aaaagacaaggataaattagaaacttgtgatgtatcttctatatatactttataatttgagtggaagtatgaaatggaatagaataaaaagagataattttcattccattgtcttatttgattacgtattaaagtattgaaatgtcattccaataaaatgacctttctaatattttggtaaattgattatttcattttgaaatgaaaataaattctattccaagacattatgaaagaaaaactaataatttttatattaaatttttttcatacattttaagttttattctatttcatttttacttttatttctattctcattactctttttatgtttttcattcctctaagcacactttattttacgttttcctatttttttatggattgtatttatgatggtagttatctcttttttttttccttatacttttttttttaattatttttcgtaaatttagtgtgtccttaaagataaaaactttgt

SEQ ID NO: 294247 - DNA, 582 bp, Cannabis indica
atagttagtataaatatacacccagtaatttttataaataattaggatgtcatatatttcactcgctatcttatatttttaatacaaaaaaataaaaaagaaaaacaattactttcatagagcaagaatgacaaaacttttttagtaaaataaaaacaatattgattaatgctcttacaaccccacatgttgttcttatcgattataaaattaacataaaaagaacaaagtaagaatgtagaataatatgaataagaaagttagatgacaacataagataaagatcttgaaacacatcttcttaatttgtgaataaatttgcagaacctctaaccatgcatcgataactctttattaaattttgaagtgtggtgaagatttccacaatttcatgagtatattattgtatgtgaaaatacattttcaccaattttttctttggctagctactttgaatgagtcattttatgatagaactttggatattttatattaaaaatataatttgtataacatattattataattaaataaagatttaaataaatttacttttataataataataataataataataat

SEQ ID NO: 294248 - DNA, 607 bp, Cannabis indica
agaaaatcgagcatcacttttggcttcaaaagagtgagaaatccaggaaatgcaagacttggcgagtatggtttgtagggcaatgagttctcggtccaaatcgaagtagttgtggtcaagctccgaaaggagacgaggagctttgtgaggaagatctttagaagtttaaaaaagttggtgtagaaaactcagttgttcggaggagaggtcaatgtgtttggatttgagattttttttattgtggatttgatttgggtttgtttgttttggtaaaatttggatcttagattgtggcaagtatttagggtttaggtttctttgattgtgtttgaatttgaaaaaaaaaatgttgaggtggtggtagtggacagttttggttttgttgaggttgatggtggtgatgctagaagaagaagaaggatgaggagtgcatcaggatagaaaaagaagtagaaagaaaagaaaagaaaagaattagggttttttttaattttaaagaaaattatttttattttgtgttttaaatattaatttttattttaaatatttatttacgtgaacctataaaattgtagttcacgtgtacactgtgtacacgtgaacattc

SEQ ID NO: 294249 - DNA, 461 bp, Cannabis indica
ttttgtaactctgttttgccgcttaggtcagctattggaaacagacttgtaatattttgtaaattgtttttgggatcccgagacatgtaacatttgtttgtttgtaaagttaaaattattacaagtttattttcattccatttgcatttaaagttttaatatcccatgcttttctgtttagtaatcccgtttaggggattagggtttcttaattatcttgggtagcgtgcctaatagtgagggcattacaatttggtatcagagcgccaaggtttttaaacttcctgtagacgggccgaacatgtacaatcatcgtcaaagacaagctcaactcatggtgcagtaagtgttgagagtaaatactttactgcttatgtgatcatttatttactgctttccattttaggcagtatgtaagcatctagagtatttatgtgatatgtgatgccatgcttaaaatg

SEQ ID NO: 294250 - DNA, 605 bp, Cannabis indica
taacttatattatatcttaatttcaataaaaagattataatacagacaaaattgcttcagtattagacaataacaattgttttttatttgcgtttactacagatggagggcgatccactttcttatatggccgaactacggttaacgagagaatgattagaggaaagttacaagtagttgaaagtagaaacaaatagtttgtaacccgacgactgaaatactgggaaagggacgagtagcgttgaagttgtttttggtaaaagttaagtcagggaagtagagtaagaaatttgtttataagcagcattcgactggaagtagtgatgaattaatgatgttgctaaggttatgtctattttgttccttttagctttgtagatatcatctctgatgtaatttggtgaaatcccaaattttcaattgagggctaaagatttagaagattcagtagggacttcctttttctatcaatatgtctattttaagcattttcattggcttattttgacaaaagactaattaaattgtggatgtcactttactgaaccagaaggaaatatgagaaataaaataagaaatagaattagcagataagtcagcctcag

SEQ ID NO: 294251 - DNA, 575 bp, Cannabis indica
atagctgttattgtacgagaactcgatcaagggaagatactttacccatgatccttcaaagtctaatatacatgcttgtagcatgtcttctaggatatgaatggtcctttcgaactatccatctatctaagtatagaatgctgtgttcaattttagttgagtacccatggctcgatgcaagctctcccataatctcgatgtgaactttgaattcctataacatacagttctgcatacttatcaatagagaaatttgtcttaacaggtaaaaagtgcactgactttgtaaacatgacaactatgacccacacagagtcgtattgtccagtggttctaggaaatccaaccctaaagtccatggcgatgtcttcccattttcattcttgaaggttcagtggctgtagcaaacctgcaggcctttggcgttcatctttcactctctgacaagttaaacacttagcaacatattctgtgacatcattcttcattccaggccgccagaacatggccttaagatcttaatacatctttgttgtcccctggatgaacagaataaggagttgtgtgagactcat

SEQ ID NO: 294252 - DNA, 682 bp, Cannabis indica
catcaacatccatgataaatctcattgttacccattgatgatataaaaatggacaggaaacaactagataaaaaacatattaaaaaaaatacatacagaaggtgtttacactattaaaaaactatgaaaaaactattacaaaatgagaaatcaataaacacaaaacccacaaaagttgaatatgaaaaaatttcaaaaatgggggaaaacctagaatagcacaaacgaaatacacaaaaccgagaaaaatgcaaaatacaacaaaatctagaaaaaggggaaaactaaaaagaaacggtaaacaaacctcagttcgaagaccaccaccaatattatcgtttttttttcagcaacatcttgagccattttttcttgggcacccaccttcgatttcttcttaggaggagctcgaccacgcttagataatggaggagcaaaatcagagtcatcctcctccataacaggtcgtttacccttgttcttattagctaaggatttcaaacccattttagagcttttcttttgaacgggggaaggagatgatgaagaacaggtaatagccatatatatacggattgagaaagaaatagaaagagggaaaacgattatgggattcggttactgggatttaaaaaaaaaaattgaagaacacaaagaggagggaaaatggtgggatcgtgga

SEQ ID NO: 294253 - DNA, 559 bp, Cannabis indica
gtacatgctaataagatgtatgttatatatatcttttttatatataaatatataaaataagtctaaaaaaaataagatgaatggcacagggaattgttgtgactgctgtgacatattacttacaatcgtgggttattgagaagaagggacctgttttcctagccatgtcaactcccttagctttaattattacaatcttttgttctgctattttcttgggccaggccatcaccttaggaaggtaatttctaatattatttttactcttattatttaattaatttgaatacttcgcttatctatcttccttttgttttatgatttacgttcttattgtaaactgtcacgaatattttcaaacattctttatatttttctttcctaaagggaataattttcatcattcagcattttttcattttatatctactaattttaatttatttattatttattatttatttttgcggggtagggattggctgtaggtaagcagtattaattataaataccatacagatatattatgaccacatttagataattatgataaaaaata

SEQ ID NO: 294254 - DNA, 1035 bp, Cannabis indica
aattttaagtaatttttttttttaaattttctttatatatatatatattttatttttgtttgaattgctaaaaactagtaataatctagttggaggttatgttaaatgtttaaaaatacatatttttatatgtaaaaataaaaattaaattaaattcatctaatatttttataaattaatatgatatatttttatttgaaaatattttttgtgttagttatttttatacataaaaaaaaatcaataacatttatgatacattttcaaaaaaaaaaaaaaaaaaaaaaaaagatatgagatatttctttagaattaaaataaagacttacggtacaaaaaaaagtaaagatttttttcaagaaaataaaatagtaaaatctgtaaagaatttttttctttctccaattacttttttaattttttctaaaacaaaattctgacattgctcactaagtgacatcccaacgcgacaaatggggcgtcctctcccatcagcagcaggcgaggcccacacacatcagccattctctctcctaaagtacctgacaccgtataaaagtaaaagaagaaaagagtaaaataaaaaagaaaaaaaaatgtatccaaataaaaaagtaaatcaagagactttttagtcaacttttgtaaatttcccaattaaataatattaataacagtaaatatttgttattttaactaaaaaaaagctaaagattaggtggagaatcgcatccacttgcgatgataaatataatgaaaaatcttcatctcagaaagttcacaaatatcatcacgtaaatatttttgaactgctccaaacatcctctaagcaaattgtaatatccagattaaaatagtatttaatttttttttttaggatattaattgagcgaggataattatcttgtttctttgtgttgttagtgagttgatattattgcttagagtagttgtaccaattttctagagagagttaaagttgtattaactacgaaagtaaaatattatggtattttttacagagttaagtaatcg

SEQ ID NO: 294255 - DNA, 778 bp, Cannabis indica
gatttactaacaaatatatttttaacatcctgagtatgaatatcgaaaacgataaaaataaacacataaaaggtatgagaaaccttacattagttacagcagaattaaatgactccttccgctcaaatctctaacccttgtatcctttttgtagcagagtatcaccaagatctgagcccgaaactccttctgttgttttgattctgcacactcttacacactatgattgaggactaacttgctatgggtgggcatgcactcaatcactaaaggctaaattttgttttatgaagaacactaaggatttcgaaaattacagaacaaaagaagaagaagagtctcaaaagtcactagttgtctctcaagaagaaaactaggtcaagagttaatatttgcattagtaggataatgagacctttttttttttttttatactaattcaattagggctaggcttgatttatttggaataaaaaaatgataaaaatggggaaaaaataaggaatagtggccgaccattagtgggcccaacactagttagatttttgccatttttcttaaccatttatctatttttcacaaataccactttttgcaatttcattcctataaatgccaaaactatttatttaataattaaaataattatcaaataaaaatttttcaattttataatatttattaaattagtactccacaaaagtctcttaaatcaataataaaacactaaaaattctaatttcttctacaaatcaagccataacatagtgaaaaattc

SEQ ID NO: 294256 - DNA, 651 bp, Cannabis indica
acattcgataaaatacatcccttaaatgtgatgcacctataaataaatacattacaaattattaacaattattatttaaatataaattatcttttaattattattttatatagtttattgtaaaatttaataattaaaaaaactaccttgagtaaatgattgtaaaatattattacactacactaaaaaaaaaaaaaaaaaaaaaaaaaaaaactaaccttgagttgcatctggaaggcgcccttcttctacgggtttatttgaatcctgagttgaaaagaaattaaacaatataaaatgttagctttaataatatttggattataatttttagaaataattaggtcatgtaaggcggaattttcgctttctgcttttggcttctcggaaagaagggcaagttattaaacatggttcctgttaaaagagttttttaaaagtaacagttgaaattcagtgacaacaaaggtgttttcgaagcttcaaaagccccaaaataacttttaaaagcctaaccaaacagagccttaacaattttcaatgtaaattgcatattttccgttgttggagaacaagaaatagaaaaattacataaactatcatttttaataaaaaaaaatcacattttttttacatttttacagtatttta

SEQ ID NO: 294257 - DNA, 612 bp, Cannabis indica
atatttgtatcattatacatagtaaaataaaaaaaaataaataaatatcatctagtaataataatatagggataattacataaaacactaatttttgtaaaaattttacatttttacgtttaaagtttttttttttttttttacatttttacggtattttgtaaaaatacaagaaaataacataaaagtaatgagaaaacaacatcaaaataacaacaaaacaacatcaaaaataatatacagataaaaaaaatcaacaacaaaataataagagtacaatataaaaatcaaatacaccaaaagaccatattttatataaataaaatttaaaaaactgtaaaaatgttaaaaattccgtacaaaccgtattttttgtaagtttttttattatttttggattttttttttaaattatcccaataatataccatacaaaatagaaatatattgtacaataaaatatatataccaacaacctcaacaacccataaaaaacttaaaaaaaaaaaatacaacataactttaaaataaacaaaaaaaattaaacaaaacatatactatgatctttaagtaatttacttctaattctaaaatatatatatgaaaaaaaaa

SEQ ID NO: 294258 - DNA, 690 bp, Cannabis indica
aatttaattttcaattctaaaaatattttatttcgattcatagtgaaaaatttaagcaaattttgggtttttacggaacgtcaaatctgagtaaaaaaattgaaaaaagttagtgaaagggttttgaaaaaaattcgggggtcccaaaaggtggtcccagatagtgcatcgaaaagcaccaagcactcagacaagccaagcatccgctcacgcatgacagggacaatttctatctgaagcgcacgtcagccttgctcagacacaataggccgcaactcgcctgcccaggaggctgcatgtgaccgaggtttctcaatcagggaccttgcacgtcccttggttcgttcgcgtatagggctacgtgcagcctgttgcacggcaacctaagtgctttcaacccaaaatctaattttttggggatttttcacctaattttagatttttcaatttcaaaaccctaaatatctaaataaaatattattttttacatttgaaattaagtatcaattttttaaaattaatagtgtttcatttttaatagattattattaattttgatattttgaggtttaaatttaaaaattaattattttatattttaaattatggtcagattttaaaaatttgttgatttgttaatatttatatattatttaattataagattagatattttaacattggatatat

SEQ ID NO: 294259 - DNA, 553 bp, Cannabis indica
tagttttttacgtatttttttttatatttttaagttaatgttgaaatttaggtgtgtaattggatatccaattaaaaaaccgatccaatccaattagtaattggattggattttgaggtttaatcggattggatcggatgatgattttctaaatccaattactaattggattggatcggatgaggaaaaaaaaattggattagatcggatgccacctgtaatctcaaccaagtaaacaatgccattataaccttgtccaagtagttgacctcgtttccatttacctgtattaattataaagtaaatattttgttcttcgcaatgatcactttcattaacattgctatgaaaatcactctctctacgtaatctcttcattgtttcttttaattaatatatttgtattgtgttctcttttatttttatttttaatttatgaatatgtaatgaattatgtatcactttattatggtttaggggaatatatagtgccctactaatagtttcaaacagttaaaaatttgtagggaaatttacaaaaatattgaaattt

SEQ ID NO: 294260 - DNA, 725 bp, Cannabis indica
catgacactttgtacagaaagtggtagagctagctaattgctgaggaggctgagcatcaggtaataaaggagcagactgcaaaggatgttgtcacggcatcgaaccctcctgctagtagtaatatcagtaaagagatcggcagtggtaacactgatcacaaacaaaaggttgatgcttccggaacatcagggggtaacaggaagtttcggggaaacagaggtggccgccagggctgcggatcttcattccgatcttatcttgagtgtccaaaatgcaagaaacaccatcagggtgaatgtcgggccaagacttgtttccagtgtggcatggtgggccacttcatcagagattgtcctcggactaagaaagaggagcctaagaagaatgttactcagaacccgggacgactttttaccatgactcaggctgacactgatgctagtccgtcagttgtctataaatggttgttcttatactgtattgtttgattcgggagctacccactcttatgtttcaagtagagtaattgaaaatttcgataaaccatgtgatatttatgcttcggggtttggtacccttttaccttcgggagaccttatagtatccactaggtggattcggtccttgtccttctggattgacggttgtgaattaactgccaatctaatagaattgcaactgtctgattttgatataatcctgggaatggattttctgtctaagt

SEQ ID NO: 294261 - DNA, 378 bp, Cannabis indica
taaggcgccaaagccataaaaatggcgcaaatatagaacaaactaataacaaaaagattacaatatatcccattataacaattcaacattatagaaacaagaaattttcggacaacaaattctttgaagaaaactttatagtttgctccgtactctttcctcttacaactatcaaaacaagattatacaagaaaaataataaaattaaaaacagaatatacaaaatttaaaatgcaaaagaaaaaacttgatggtagatcttataagaaaacaacaccatataaaactttaaagatttttttccatatattttgacattgattagaacagaacaaacctacacgaattcattgatgaaaaaaatgacaaaaagactaa

SEQ ID NO: 294262 - DNA, 677 bp, Cannabis indica
atttgtatatattattagtaactataatacatgaaaaaaaaaacttaataaattaatatatatatatgtataacggtcggtttcagttttttcggtcggtttattaccaaaaaaaaccgactgttcaatggcggtttaaaacgttagcggttttttcggttttcggtttcgtcggtttcggttccaacgattttcggtaggtcggtttgaacggtttttcagttttctggattttatgctcacccctagttgtaatatcccaataagcctaatgatagataattatgatttatatttatattatgggttaatcaggtaatatcctactaatctatttcagtataaaatttaaattttgttataagtgagtaaataagcgtaacgtaatttataaattacggagatttatatagcatgtgtgaatgtaatatgagttatgtgtggaataaaaatattttcaaattcggcaaccctgaagactcgataagtggataaataagcgtaatttattaattacagagatctatttaaaatacatggatataatatgagttatttgtgaaataaattttttttcaggttttacaatcttggagacccgattggaggccaaaaatatcacaacggttttagttagaaatattgacgggattattaggataagttgattttagaaa

SEQ ID NO: 294263 - DNA, 752 bp, Cannabis indica
ggtgtgatgacatattgggtgagaaaacatctaggtgattttgtttaacttctgttaaaaataggctcaacaaatcccttttctttggtgtggtaggaaggctcagttgtggtttgaaccatgggttgtggtttgtgaagcttttcatatttggtgacacacaatttgggtaaaagttttatgagtttttcagtggtcatttgctttatgacatgtgtgtagatcggtacttgtttgtaatcaactgagatgagtaaagtgtcttgtgtttgatggatgttaagatcaagaacattatcttggagtcaatatgccatataataatggagtgtggcgccaagagaagttgggtcttagtctattcctattgtttgcacttccactttgaaagcattagttagccaattgtctctaagagacatgttgaaattaggatacaaagtgatgagcactgttctagtacttaaagtattttcaatagtagctatatttgcattctgatatttcctcattcaaagtatctagaaagaacaaatacgagcggtaaactggaagtctcttctgtcataataatttagagcaaagcgaaatagtatcaaaagtggatgtgggtgtaaccctgtgccatccatgtgagggagttcgagtgaaatttcatgagtcacaaaatttataacttttgtatataagggtgtaaagtgggaacacgtgctgaaatttgaaggcttgaatgtatcttttgaagctttgaa

SEQ ID NO: 294264 - DNA, 508 bp, Cannabis indica
cccctattgcaactagcgctgcaactactttagaaactcaaacagtaaatttgaaaaaaaagttaaaaaataatctatgaggtaattcccctatatatatcattatatatacaactatacaagtgaaggagccggaaaatgaaacatcagactccttaaagatggctttttaaaagtaatttttcagtttatgaagcttcaaaacacgttgtttggagtttaaacacttccctggaaaacccttttaacaaaaaaaaaacctgatataacagctttttgagaaagttgaacaatgattatgttgtgaaagagacattaaaaataaatgatgagtatccgattgaattgatcaagttatgtaggaacaaagttcaagtctaccgatttgttaggacgcctcagctacatacatcagtttctagtttcaacatttagctgaaaaaattattttaaaagaaatctgctttaacagctatttgacaaacatgacttgtgttttaaaaacttc

SEQ ID NO: 294265 - DNA, 641 bp, Cannabis indica
acgctcatattttcccactgggtcaggtgggtgaactctttcctcttggcacttctgactgcctcgttataatattttgcgttgaagagttcctggaacctttcccaggtcatggtggtgacgtcctgaatctgagacaccatgtcccacaaaactagagcgtcttcttggaactggaaagtggcacacaccaccctatcattcccggttgacgcccataaaattcagaatcttggttatcaccgttagccattgctcggctttcatgacatctggacctcccagaaaaactggaggtgcctgcttctggaacttctggcacaggaacttctggcacaggcactgcaggagcaccctgctgcctcaatctctgtatctcaagatcttgttcctctatcctggcttgcatttcagcaaacctagtctcccaattctgggcttcttgctcggcttgggcagcctgggcagcctgtggcgggttatcatcaccccgaccacgagccctgcccctgggacctctaccacggcccctagcatgcgggggaaactgggctccctgaccctgattcgaccctactgagttgccctggctcctggtatttcgcctggcgtccatctagtcggaaccgcctgcgaaacca

SEQ ID NO: 294266 - DNA, 793 bp, Cannabis indica
  modified_base (749)..(749): a, c, t, g, unknown or other
ctttgaaaagtcaaataaattattattaagagaatatgatattttgataattctcattgtacagtaataaaaagacaaatttaatattttgtcttttactaactcatctactttttaaaacacttaaccataataaacaaaaaaactttcttattttaacttttatccttattattttgttttattattattacacaattaaaaactctattagttctacctttttaattgaaaattttattaatttcatttttttattttctcttggatgcttattatataaaataaataaatctaatacttatctaataattttaaaatatttgtttttttttttaatttttatatatcagttaatataaaaattatgtacaaattatataaatagtgtgtaaaatggattaaaatattgatcgtcttttatatatggctatatttgtatataactaaaatattcaatttaaaaattttgttcttactcttgtacaacaataaaatatattttgtaatttataatttttaatttgtactataagatgtcaaatttaaatttttattataattatttataaaattaaaattatgcaaataaaaataaaaaataaaatataaataattgcacgtgctataactttacctagtattgataaaaagtagaactttttacagactatcttccacctttttggtatttataaatttgtgttaaattttggcctaaaaatattataaaactaatgctttatatntttagtcttactttttaaatttttttttaaaaaaactaaaaaat

SEQ ID NO: 294267 - DNA, 623 bp, Cannabis indica
acctggaaaacacacaacaaaaggcaaactagatacatacactctgatctctggggggcttcaagaactcaaacactaggaggtgcaagttatttcatgagtatagttgatgactataccagaaaagtttgggttttcttactcaaaaccaagaatgaggcctttaatacctttgtcacttggaaaaggctcattgaaaaccaaactggaaggaaaataaagaaactaagaacagataatggacttgagttctgctctgatgagttcaatagattctgtcaattagaagggattgacagacacaaaactgttgtgaagaatccacagcaaaatggacttgctgaaaggatgaatagaactctattggaaagagtaaggtgcatgctaaagggtgctgcacttgacaagaaattttggggagaggcattgaaaactgcttgctatctaattaatagatgtccatccacagccctgaaatttaaaacaccacaagaagtctggactggacatgttccaagtgttgaccatctcaaagtgtttggttgtacagcctttgcacataccagacaagacaaactagagccaagagctctcaagtgcttgttccttggttaccctgaagg

SEQ ID NO: 294268 - DNA, 695 bp, Cannabis indica
taacatgaaatttacggtacaacacatttttgtgttgtattcgtgcattacttttttaaaaaacatatgagcctattttttttgtttgttaagtattcacaatagtcacggatcttatttgttaacttttaaaattgaataatttacagtaataaaataaaatttaaatcagttatttttacaaatatataataataagaattaaaaagaacattattatgaggtactaaggtccttagtcaaggtcgagcttgaaatttagtgggaaaaaaaatatttttgagccttatgatatttttcaaaattagtaataaaatatgtatttttaaaagaataatattcttttaggcctataaactaggtaaactctaaatacagatatagtttgcttatgcccaggaccgagcctgttcctagtatatcactatgagatgacatcttataattagttatcggttctctataatttttattacaataaaatataagagacccgatattaaattgcactaataataatagggattatttcacaaaaacataaaaacaacaaaaaaattacaaaaatacaatttcacggaattttaaacatttttacaattttttgattttatttacagaaaacacggtctttttatgttataatcttgttaatttgttcttgattttttgttatctgtatgttatttgttgtt

SEQ ID NO: 294269 - DNA, 977 bp, Cannabis indica
aaacatctgagattctctctccaagccacgaccatcatggcatctcaaactctttctccaacccacaaccagaccattgcaatgtcgaaagtaagatttcgggtcctctctttttcatttcatttcattgtatgtttggattaaaatgtatgaatttattgatttaggattaaaatgtatgatgaatctttgtgatctgttatgttagatttaaggttggatttggtcggatctatgttttgggcaaaaaactaatttttacaccaagttgatgtaggtctgatgctggtttgatacaggtccgatgccattttgttgttaaaatgagtgaaacgaatggttattaattttccaaaatagttattaagataaaaatatgtgaaatctaatattaaattacaccagcaacaatatgaaaccttacggcagggccgaccctagactacgtcaggttaggcccgcgcctagggtccatcttaaaaataccacattttttaaagggaaatttgcggcaaaagtccccaaaaagttcacgttgatacagattagtccccaaggtccgaaaatagcggcaatagtcctcaaggtcacactttttatttgtccgtcgatacccagtttgacagcctcgttaagtactggcaagaatgccacgtgttgaagtattattggtccaaatttttaattttaattaaaaataattaaaaataaaaaaaaaattaaaaaataaataaataaaaagtttaatattatttttattttcttatttaaaattaatttcttttttctttttcttttttttttctttttccttttttttttttattttttcttttctttttcttctttcaatcttcttcgtcctcttctccttcttctcactcccaacctttaaccccaaaccagctgcaccaccaccttcaaataatttccaatgcattaataaatttctactgcacaaataaaaaatcccaaaa

SEQ ID NO: 294270 - DNA, 525 bp, Cannabis indica
gggtttctaaagtggttgcagcgctagttgcaataggagtttctatacgattttttgttacaatttaggttacagcgctagttgcaatagagatttttatgtggaattccgtaaaaatgcaaaaaaaaaaaaaaaaaaactagtttagaagtgtaaaaaatgaaaaaggcccttaaagtttatgttgttatacaaaaatatatatgtgtatattaaaattaacattaaaattttactctattttttttaagattgtatggatccaattcaatccaatacatattgtatctaaaatattagatagatctgatctgatccaaaaaatattaaataaacttaatttagtttttcccattagtcttgtcttttgacatggttctttggtcttttccttttagtttttcccattaatcttgtcttttgacatggttttttagtcttttccttttagttttttttggtttcgagttcttgtcttttggctatgggttgtgtagttcagatcatcatggcgttatggtagaa

SEQ ID NO: 294271 - DNA, 511 bp, Cannabis indica
agtgtttggtttcatatcgctaaagcaccgcgaacatgtcgttaaaatgtcgatagtacaatcatgttttgactcttcagttgatgtcgttaacatgtcgcaagtatgtcgcgaaacgtcggtacaaaagacgtttccacattaaatggtaattaatgtgacatttattatcccgcctaaccaactacttgattatgtcgctaacatgtcgctatgtgtcgcgacatgtcgcgaaaattgcccagattgctttttgcatgacaaacatgtgtacaattgtgtaattcaatttttacatttattatcccaccttcccaactactagttttctctataaaagccaattgtctatctcataagttacatattttcttaattttttccctcttaagataattctcttagcaatgtctactagaaggaacaagggcaaatatccgattcttactcctgaagagatcaagcaggagcctgattgtggggaaattacgcctcaaatgcaaaaagtgct

SEQ ID NO: 294272 - DNA, 660 bp, Cannabis indica
ctaatctgccacaaacatattccgctctaataaaaaataaaaaatttgtagtgatcttatatcttagttactcccgagtataaagagtatagtgtagtatgaaactcatttagaaccttctattcaatatccttatcagactgatacaccaaccttgtctttatatcataaaattccttcaaacaaaatcaaaaagttctttgtcaatccggttccaagcctttccttgtacttctaaagttcagagtcactctgctcggccactctatttctttccaacataataaactacaatgtaagattaactagttctccaatcatgaacttaatccctattctggttacatttctagcaacctttagtgagatcttttcgttttacaaacttgtcctagacctctttggtttaaggtatctactactaatttacttcccagagtggtagaaaatcacaccgttaaaaatttcaatcaactttaaccgtcaccactgcctcccatctaaattcttccaaaagaaaagtatttgaggctttcgtgatctgtatagacttcacattttcaccatatagaaaatggtgccaaactttcagtgcaaaacgattactgccaattcaatatcatgactaaaatatcacttctcatactccttcaattggtc

SEQ ID NO: 294273 - DNA, 422 bp, Cannabis indica
atattttatttttaaaattaattttgtggaattttcatagatcatatccttctctttttcatagctaaggatcttaaaggtcagtttgacacaattgtgctatgaaaaaaaataattgtaagttgtaactgtattgtaaaaaaaaataactgtagtagaattgtagaaaaaaactaaactaaatatttggtaaactataaattttaaattttgattgtagttttacatgttgtgtttataaaatatttaattcaatctaattggtaagattcaattggaaaatttaaaattcatacttataatagaaatagaaattaattaatatgtctaatctaagcatatttatatttattttaaaaaaagttatagtggtccaaccaattcaactcaactaagttgagtagctttgctcaacaacattt

SEQ ID NO: 294274 - DNA, 1176 bp, Cannabis indica
ctctaatgttttttctctgtgtaagctagtctaaagttggcttaaacctattctcaagctaagtctgccgcctccaagaatgttgccatgtccaacaccatgagggcggagctggacttggccaggaaggacgctgatgacgtcagggtagaagtcggagctgtccgaatggagttgggtgaagtcaacaagaagctttttactgtgaagaggaagatagtcgagttgacaaaggacctcgaggttttcgaccagcttgaagctaccatcggcaccttgtcggcagaagtgaatagtcttcaagaggaaaggggagttcttcagactgtcttccctcaactagaagaggagaagaagtctaaagaggaggagcttacagctgaggtcgagaagtataaatcggaggtgatgaggctggaagagaaagtacatgccctagagactgctgatctcgagattttttatgacttttcgaaggctaaccctcaggcgaatttttgattacctgggcgaggccaaagacatgtatctcgagtactatgcttcccaagtggcttatggtgaacctgaggcgactactactactttggccagaacgttgatgtaccttctgctcagacaacagatcctccagctcctaccgacccaaaagacccaaatcaagagcctaggactccagctctttaaatacttgtgtttttatctttcttggtttttatatatctattcggccacaacgcctttttctaagacatcatgaccggccaagtggtctttaaactttgaattatttttattttacagacaacaggctgaccgagaagcttttaatcccgatattacatgcttttgtcacctttaatgaatttcattctctgtttataatcattgtgcaactgtgtttgttttatctttaccaaatgctttgtataggtataggtgcccccaagtgactgagcagacttatgactcttggtcacttgtttttcgtaagtatactttatttttgtctgatcgaagtttgggtttgaccaaaacttttgtacgcactggatagtaaattaacaacatgttagtaatttcgactcaatttgaattttgaagtaaacatctttgttcatttattgatcaaaaatgtgtttgttaccgtagtaacttacatcagggctatttgat

SEQ ID NO: 294275 - DNA, 1053 bp, Cannabis indica
ttaagattgtaacaatgaataatcataacgtatctatatcgtggtacatatagagcgttctatataactgagagtgtatacaattccaaatctatagtggcgcaaggcggaattataagttagggaatttacttggtgaattctatacctacttattaaaagctcggttatataggcccatggtcccctcactagttgagatagtactgcttgcagactcagttaattgattttaattaatcaattataattctaaaattagactatgtcttatttaagaattttcactaagcaatggcataattgtgaagaaaagaagttttggggtcaatttgttaattaagagactttgtatggtctaattaataaattgggttaattgcggtaacccccaatacttttactttgcttgcacttaactcccaaaactcaaattttggcggttaaaacccccaaaattaggaaaccgttagcaatttacagcttccatccattttaagtgttaaatgccatattggattgtccatgtgtacatctatgtggatacagtgtacacatggcacaattttattggtgcacataaaaaaattatttaaaaaaaataaaaaaaaataatttaaaattaaaaaaattatttaattggcattttgtttttacatcagatgtttaaaaatctaaaaaatatatatattttttttctttctttttttttcctttttcaaaaaaaataaaacactaaaataaataaaaattgatctcaactatagatgttgttttttttttcagaaattaaaccttgttttttttttttatttaaactactatttgttttttgtttgttacaagctaattatttcattagaagcagcgggaaaaaaaaaaccagtttcatcaacatcatttaggaaaaaaaataatataaaaattatagtctaaaaataatacaaactttaaaaatcaatttcatcaacagtgaaagaaactaataattttattaaaagaataaaaaaattgtttcatacaagataatgaaaaaattataatttaaaaatg

SEQ ID NO: 294276 - DNA, 710 bp, Cannabis indica
gacgataattttttattaattctaccactgtcggaattttttaatgagttatttcaaaaatttgactaaccatagagtatcgcataccattttataaataattatcaaaattgaaccatattacaaaaaatctatatttttttttaaaacaattttttttaaatactaattttgccaattattttatagaataatgtatgttatatataggatcagcaaagacttttgccgccatacgtgcacaaacctacccattatttttttttaatatatattatatgatcacatttgaatgatttattaataaataagacaaatatgcaacatataataattatataaaaataaaatgctatatatatatcctgaaaaatatgccagaaatcatcgaggcaattaagttggtccccatcattaatttgtttaatattttttgtaacaagaatcatttatttaatattatgtgttttataattcttaattattgtaatacgtaaaattgaggatcaaaattggtcatgttagaaagttctttctagtgagaaagcgctattgagaatttcataacgacaaacaggttttgttgggctatgtcgcgcaaaaataaatgtgcttatcaaggccggccttgagttaaaatagctaatagaataaaaaaatattttgggctcttaatataaaaataaatggtatttttaaaattattaaaa

SEQ ID NO: 294277 - DNA, 537 bp, Cannabis indica
tccaatttttggtcacggggtacgggtttgggtccacttttgggtttggaactcggttcaggtccaggtgtgggttcaggtccttgtaagggttcgggtccagggctaggtcccaaatcaagacactgactatgggttttgtccaagccctgggtccagatccggatcccaatctcgggtcctagtctggttccatttctggtgctgggtcatgagctgggtcctaggttcaagttcaggtctgggtcgagtactaggtcccgatcctagttttgtttcccaggtctctgtcctgattcatcgtccaggccccggttattgtgtgggtttgggtcccggtctaggttcgggttcgagtcctagtctcggtttgggtttaggtctctgtctgggttttgatctggattcgggttagggtttaggtccttgtcctggtcctagtccttgttcagttctagttccctttgtgattatgatttcgagtttgggtttgagttcgggtcagagttcgagtcctggtctgagtttgggttcggg

SEQ ID NO: 294278 - DNA, 566 bp, Cannabis indica
attgcttagtatctatctatctatatgtataaaggagaagtatgagacagtgacattgcgttttagaattactccaaatacatttatttattttctccttaattctctcactttttaattttttattaaggtaaaattatttaaaatacatttatttattttaaaatgatttattttttctctaacagatatttgtttcagtaaaataagctagcacgtattaaatttttaataattattaattaataatttttttttttaaaaaaaaaattaaatctcatatataactatcatttatttgtatctattatgactgtttggtaattgtgagcaaatactctgttatgcaacaaagctttattttgatgggtatgagacttttgagttatttaatttataattttatttcaccatacatataatcattatttataattattatgattagttttgtgtttgccttgatttggtgttgctttgtttgatttgtagttttttttcgcaaggacctatttcaagacaatacaattgtgaagagtttaattattcttctaattattatcata

SEQ ID NO: 294279 - DNA, 586 bp, Cannabis indica
attgaattttgaaattgacatccaataaccgatccaatccaattagaatctaacttttagcatctaatcaaatccaattgtaattggatatccaactttttgtaattggatttgattggaacggtttagttcaattagattggattggataatgtccacccctgcctagcactttctagacatgtcgtgttgcgattgattagcgatactccctaaaagctattattttaaattatataggaactaatacttagttgaatcaatggtgatattgacatataggagtgtgttaggcaccactggtgccttttagcaaatagaattcattatctattcccttggaaaatgtaatgtaagaaaagaaaagtattcactttcttttatttccaacttaaccaagtttcttatttttatcgtgtaattggcgacgtatccttcttatgttttaattttataagctttaaccccttaatttttttatgtggtaaaattcctttaactttactttttttagtcaatttttaaagcgttcagttaaatctcactcgttaaatactaattgaattacatatcatatggtcgtctc

SEQ ID NO: 294280 - DNA, 389 bp, Cannabis indica
atgcttaactaactttagctattatgattggagtttttttttgatagtttttcattttaatacttcaaaatatttttttatgtatatatttttacagaaatccatatagaaactcacgtatcaactaacagaacaactcacataaaactactggtgcaactaccaaaataacgcaaaccataaatttgtaaaaaaaaaaaatagtatactaagtaattcttttattattattattattattattatttcttttgaagaaacttttttagttaagtgttgtatatattgagtattattatggcaaatgtgtaaaattctgaaagaaggtgaagtaatttaaaagccttgcccgatcagcaccattgccattcttgcccaggctctgctac

SEQ ID NO: 294281 - DNA, 516 bp, Cannabis indica
cacaacaaaaaattacttgtgaatagtatttagatacaagttgtcactaatttagttttagttacaacacgtattgtgtctaaaaatacatttagtcacaacaaattgtgatttttgtgactaatacttttagccacagacattttagtcacaacataagaatgatgatttataataagtcccgggccaccggatggggaggcggcagagcttcactccaccttaacctgcccccatcagttggagaacatcgtggaggtggctggaaacaagccttccacatccgggacgtaccatcagccgcctcgagatgcggagaagcccaaccatagctatggcggtttcggggcttggagccagacgcacttgatgtccggggctatgcttcctctccaggattactttgttaattttttagtttttgtcggcctcgcgccataccaactgattccccaagcataccgcctgctctcaggcttatttattttttactccgtccggggatggggctctccc

SEQ ID NO: 294282 - DNA, 516 bp, Cannabis indica
cttgattaaaacaccaacaagagtttgaattcacaagaaaaaattccaaagatccttgctgcacaaggaggccgaaagagagaggagcttgagaggaaactttggttttttctaacttttctaatcttctaaccttttttccaattttgtaaaatgaaagtaaaaaggtttcaaaagttcatttcagccaataaatcaataataaaccaaatattttcacaacactaagtccactgaaggacaaaataacattggggtaaaatgaccattttgcccctccacactaaaataacataaaggggtactaaagggcattttgggaaattctaaattcctgaccactcccgacattcccaatgtctaaaaaaaaccgtcccaatatagtaacatactaagttgtgattttactgagccaaacaccgagttccacgttactgggcaccagaaatgcaaaattatgaaatttactatatgacataaaatgcatttcagaattcaataataacagcataaata

SEQ ID NO: 294283 - DNA, 512 bp, Cannabis indica
gattagaaaaatgttagttttgacattttatcttattgttaatttatttaattaaaaatttatattttttgtgaaagtaacatgaaattttgaaaagttgttaattttggtttgaatagatattttagggttgtgcaaccataaaattttaaaacttagaatattttattttatttctatttaataaaattgataatatcctaaccttcaaaatatcttatttttaattttatttattttgttaaatttattttattaaattaaaagattagaaatatactatcagaaatatctcaattttcaaattaagatactaaattatattatcttattagatatttaactaatttaagttatttcaataaactaaaatttttggaaattagttggatatttgattttcatatttgaattttagatatttaggagatttttttagattttaaatattttaaaaaaaattctaacaacctaaatttaaactctagttaagatattttttaaaaaatttt

SEQ ID NO: 294284 - DNA, 490 bp, Cannabis indica
gaaaacctcgatcaatattttggtgctttcattgagagctgaaaggaagcgtctgaaagtagacaaatcacattacaaaacaacaataggtggagactcgaaacacacgtcaacctcgtcctcttcaagattctcaagacccaaacgatgaggacgtggcctcaagagcgaatgtgggctctgaggaggaagaaggaacccacgacgatgaatatgaaggaaacttcgatgaatacgatgcctacgatgaaggcagctacacagagctggtactcttgagacaaaaggctgccaatcacgaagctgaaattgcagcccaaaaggaacaaaaccaaaggatgcaagaggtggtgctggccatgcaaaaagccatggaggcagcaggaatccacatgcaccttaaagccatccctgaaggacttggggaaagaccagaagagtcctctccaagtacccaaaagcagaaatctagggaacctagccccataag

SEQ ID NO: 294285 - DNA, 828 bp, Cannabis indica
caaagcagggtgatttgagctaacatatgtccattcttcaattatataaaaacttgatataatctttttaacaagtgcccctcatctaaattaaatataattagctaattttttcaccatatatatgtatcaaatttttctcttggttttgacatctatcgccgtttagtgtcgttatttctctctcttaggttaaggttcattgactcttttctgggtttggtttgaggccatcggtgattggtttgttcggccttcgagagttgggtttaatgattgctattattatgggtttatttttcgttccttcgatgtctttgttggtctgtgatatctctttggctgggtcgtattgattctcgagccatgggtcacgttacttttctagattgttctgcagtgtcggcactgagatgggtcgttttgagaggggcttttcttctttggtggtctatttcatattggatttttaatcagtggttttgatggatctttgggaggaccttatggcgtgtatctgggtttcggggatctctcaggttgtggttaatgacagttggggtgtggtcagtgaggcaaggatcattggtgtggtccccttggtgattagtaccattgatttttcctctcaattgtgtcttgtctttctttatgtaagggtcttggtattttttttttctaataacaatgtttttaccttcctgtttgatctctattttgttttagatttagatgcacagagtattctaaaattttgatcggtgtcttttgacacagttttatgattctatgatatttattgtcgagaatttaaacatagtttgtcat

SEQ ID NO: 294286 - DNA, 515 bp, Cannabis indica
tgtcatttctccctacatgaaaccaaacctcatcctccttttctgtgtccactttcatttttcgtaagaggaggccgtggaccaacgcgccggagaaaagtcaactctccagcttcccaaaagtgtccgaaaggactagcctttactgtgtcaaccaaatccatctcagtaaacttggccttgatatatctaaacctatctgtaccccgataggtaagacgtcccgtgaaatgcgaggaaattggaagtttaagttcaggagccatctgcaaaattgtcaacaaatttgttagaagtatgtcgtgaaacatgtcgcagtatgtcgctatacatcgtgaaacataatcctaagttattgttgatcatatcgccaaatatgtcgctaatatatcgctaattcatcgctaaacacaaaaactagtcctctgtacaactgttatatatcgctaatcatgtcgcatatcatcgcaaacatgtcgccaaacacacatacaagtcgataaaaaatcatgaaa

SEQ ID NO: 294287 - DNA, 645 bp, Cannabis indica
atataaatataaatgatgtgatagaaataaaaggaaaagattaaaaaatatatgtttaggtaagaagtcaccaacattgtaatgtgtcatttattcacagtctaaatccttaaaaacttctaaagttttcataacagagaggcttgatttccaattactttcctctaaaaaaatttaaaaagaaaaaaatatatatttccaattacttgtggacaaatgttattatttttttttctcataaaacccaaatatatatagtaaagaataaaaataaaaatcatcaagaataaagaaatagaataaagtatgtcgaaataatttgtttttccagtaaaataagttaattaaacggtggaagtcgaaaagttcaaattctaaacatttataatggagtgctaaataagtagcggtgtattgttatttattttagcactttttataaaagattactgtgacatctgattggaagaaatgaaaatataagaataagaatgggaataggaatagaatagaacaaaatttaaaatagtataaaaaaaataaatcaataaattttttttcttttaaaaatggtaataatcattctttcaaaatagtggaaagagcattacattgaaatgatattcaaatactttaaaatataac

SEQ ID NO: 294288 - DNA, 568 bp, Cannabis indica
agatcctggtaaaataaattccaacacgtatgcccctaataggcaacatcaacctgaaaatccaccccaaaggggtaggaatgaccaagtaccaccccggctgatggaagggctgatagtcagaacgctggaggaaggccaagaactgggtcagtttttgaacgggtaggcccccgagggggtagagacctgcgggacgccctcaacagaaatagagacaatcgtggttccaacatagtgaacccacctgagccagaccaaggcgaccaagcgaatgttggtgccaatattgctcaacctcaaacaaccacagatccggtgatccaagctcggttggacgagttaacccgattggtcaaggaccttaccgcaccaaaacccactgatttggacctggaaaggaggagagggtctgccttctcccaaatgattaatgacctccctattccagcaaagttcaagatgcccacttgcaagtacatgggtagtgaagacccactaactcatgtggagaacttcaaaatccaaatggaccttcaagaaatcagggatgaccttaggtgtcgaa

SEQ ID NO: 294289 - DNA, 617 bp, Cannabis indica
agtcaaactatattgtctacataaagtcgagctagcctagtaagcttgtaatcctttcttataggaataaaaatgagtagacttagacaaacgatcaacaatcacccaaacaatggcatgcttcaaaggtgtcaatggcaatccggtactaaagtccattgtaatcttgtcccacttccattctggtataggtaaaggttgaagtaaacctgaaggtctctgatgctcaaccttaacttgctgacaaactatacacttagctacaaagctagccacatctcttttcataccttcccaccaaaactatctctttaaatcttggtacatcttcgtacttccaggatgtataacaaacttggacctacaggcctcaattaaaatggactccttaagatcagggatatctgtaacaactagcctttccgtatggtataggtacccttcaccgtcaactgtccacccatctagttgctcactatcctggattcggttccaaataagtcttagctttgcatcttgccactaacgttgcttaacttgttgaagtagcactagtgtagccactatgttagagatacaagctacttcttccccttaatagtattgtgagttataat

SEQ ID NO: 294290 - DNA, 604 bp, Cannabis indica
aggctggggagccagttgatgctgacggagatgttctggttgagggcgtggactacgtcagtgaggagcttaccgcggcggttcctcataaaggcagggtgccttgggcaccaggtgggtaagttctccctccaagattacggaggcgcgccttcgaactcttgaccagggcagatgcctgggcgaactggactgctacattgcaacccacaataatcgtgccacaaaccctgacaaggggatgtgcgcctggtcgggagcccatggtcagcaaggagcgttgatgcccttatataagtacttcaaggatgtggcggacttcttcagcctcctctcggcccagttcactcctaagggcattaagtatttatctaccctcttcatcctctatgcttcccaagggttgggtactccttctccacacgaagttgcctggttctttgatttgaagtccacccccaaacagggcaggtcggggtacttctatttctctcaaccaggcttcaagtggttgaccggcacgaacgacaaggccatcagcaagatagggcattttgttgatgagtacttcatggtgaacgacaggctgttgggttttgtgccc

SEQ ID NO: 294291 - DNA, 750 bp, Cannabis indica
tccttggtttgaaaccctggtgctgcgacccgcctcctgttggtgtcctgggattcgaacccaagtgtcgcggccccatgtgggggtgttgcggcccgccccttgtttttgggtagattcgaatgcaattttagaatattcataactttgtgatccggactccgttttgggagttatatatattgttagaaagcttgttccgagctctatgtgattatttatattttgaatgccaattttatattatgagatagtggatttagggattaaccctatacttgtgaatctcaaaaagtgtgactaggattaccagcacttggttaggagcacctaaggatttggaatctctacgtttgcgggacatgagataagacagtagttagcacgtagagttatgcacagtggcgcttatatgaaaaagatatatgtgagtaattaggaatcggggttagggtcattaccctaacatgagcggtttaattgtctagggttattaccctaatgattattaatgtgtaaatgctatgtcatgttatatatgtattgagattaaggattatacgtttaatatataattgggttggactcagtaactagaaccaagatgaaccgttctaaggccttattgtatttagacgtgtgagcgtaatacgtaattctatgccacatagacataaataagcgtgtgagcgtaacatgcgggtctgtgtcatacaaacaaatgtgaaatggcattaaagtttatgtgat

SEQ ID NO: 294292 - DNA, 501 bp, Cannabis indica
gtcccttccaatgtatactccatacatccgatactagtaaactttgccaatgccctggaaaggacataacacttatccaaggtgtaagtatacctatcgctgaatatcatgccagtctaaatctagtgaactgacaaatcggagaattaaactttcgaacatataaacatgattatattccaatgtgctgacaacactataatcacgaacaaaaacatatgttctggaattaatagaatttatacattaaagataatcatgaaataaattatatgaaccatgccacataagatgtgatttctgatctttattaattagtaaatctgatctttaatcattcgaagttgcattttttttcaatttttcattatattttaattttagaccaacttaaattgttatattttattttgaatgatgcatgaatatcactttggaaaaatgtggtttgtaaatggcataggaatatgttatttaccatgtatgacttgaaggaattgt

SEQ ID NO: 294293 - DNA, 536 bp, Cannabis indica
aatcgtttaatatttttaaaattgatatttatagttaatttatttagtaatcatcaatgggtaatactaattaagaagtgtatatatgagtgcattcttaatgtgtatatctataatggataaattagaaatttagagttttatgcttaattttctatttaaattaaaaaaaaatctctcatttttatatcatatgggctgagattgttccataacggtaaaaaaaaattaaaaaaagttttttagcaaagaaaaataagaaaagaaaaagttgagtttgagttaaattattttgtatgaacatattttgatatagtgtaaaaagagatattttttgatatattttttttaattaagtagttaaattaagcatagaaattcaaatttgtgatttcattattcgttattagatcaaaattcgatagtttgatatttttaaaattaatatttatagttaaatttgtttagtaaccattcatgggtaatacccattaaaaagtgttccatatatataacattgtgtgtggaaatcaatt

SEQ ID NO: 294294 - DNA, 614 bp, Cannabis indica
ttacattctatacccactttactatacttttttaattttacctctattttctatatttttaatatacccactttatagatgatgtccccattagaccccttaggttatgtaaattatatgttatatacttaagtagagagtgagggtatcttaggcaatccactcaaaaaataggtatattttaataaaaaaaataacatgagggtatttttaaataatggaatcaaaaaaaaaaatatttttcaacttatccctaaaaaaataatatacggtgtaattttgacctaaataaatttataagtatgagtcctctactacattttgagaaatatagtcacatgcaaatttaccaggacttgttccgaagcgaaaagtcggacaattgagtacaattgtaaagcgaacgtagttgtagtgtatgtaactttggatcaaagtccacattctacagttagtggactttggatccatgagaattctagcccatatgtacatggcatttttcaaaaatatacataaaatgcaaattaataaaaaactttaaaaaaaatctcaattacaataataccttattacattattaaaagatactttaattctaaactaatatgcct

SEQ ID NO: 294295 - DNA, 759 bp, Cannabis indica
ataatttttatataattaagcatatatatatatatatataagttgaatatataacttcatgagtttgtgtggtgtgggaacattttgcagagaaattgttttttttaaatttaatgttcatctcagtcttcagtgggtttggtggaatcttcctttttctttctcatttgtatatattacaagacaaatattatttgtctatatctttaatttattcataattataaatagcattaattagaattatgtatattatcttattttgaaacatatccatcacactaattaatttttaatgttaagttattagttgtttttttcctatatcatttctcacaatttttattttatttattcaaacggtttaaattttttttctatataacggctattaaacgtacatccatcccagaagcgattggaagcgattctgggattggcatcaaggaagctcttagttgaatcaaaaacaagcagtgacatgatgtacagctggaaaccgattgtcttgtggttgttcaagctgtacactcttcagttcttctacgttccccttttggcgtggtgattcaagagtgcaaagagttgcttgattctttaaaatctgtccagattcaatttgttaaacgttctgctaacaaggctgcccattatatggctcgcagctcttgttttcactcagatcgtatgtttaccgagcgtactgctccggatgatcttttaaagattgtaatggttgattcagtttgctaataaaat

SEQ ID NO: 294296 - DNA, 146 bp, Cannabis indica
taaaaaaaaaatatcactaagtgataatacaaatacaattgttaatcctatctttagtgtataaccaaagagatcaaggaaagataatacaaatttaattttatgctaatttacaatatcttatcatatactttataatatcttat

SEQ ID NO: 294297 - DNA, 825 bp, Cannabis indica
atcagtaaaagactcattgaagctgaaggccggtatccattgatagaatagctcacttattgcctaattctagcaacaagaaagctaaggccctactttcaggctcatcctattcgggtatacactaaccaaccattatgccaaatattgcaaaaaccagacgcctctggacggttactcaaatgggcagtgagttgggccagtatgagattatctttcaaccccgaacagcgattaagggtcaggccttggcagattttgtagttgaatgtacgagtaaagaagagagcattttagaaaacaacccagagcgagtacaaatacctcagccgaataatagtgaaaacaagccgacttggaagctacatgtggacgagtcggccacagatcaactatccggtgcaggaatcacccttatcacgcctggggggcaacacctgcacgctgcagtgaaatttggattcaaggcatctaataatgaggccaaatatgaagctctgatcaccggcctaaaactagcccgggagataaacgccgaacacattgagatctgcagcgattcacagctggtggtaaatcatgtatccgaagagtacgaggctcgagggaaaaagatgatagcctatctgagcaaaatacacgatctgctcacacagttaaaaagctatgctctcaggcaagttccaagggaagaaaatacgactgctgatgcattaacgcaacttgtgagcaataatgtaaatgataaagcaaatttgattcctatccagtttctcaaaaaaacctagtatcaccggcacataagaggttgaaatgattgataca

SEQ ID NO: 294298 - DNA, 713 bp, Cannabis indica
atgaaattattgcacaacacgacacgagttagattttttttatggggacaccacaagatgtccctatatcttttttatggccccgacacaacacgaccaaatatttttaaaaaaatctcgaaaaaatggggtcggactagcacgatacacatgtatttacacccgtatttttttagattttatacgtaaaaagaaaattatgctcaccctaaaacttagtcctaagttcaccactgacgacatctttggaataaaacaacctatttatacgattttgttatgcaccaaacgaaatcgctatatcacaccctaaaatacttgctctcataaatattgtaatttaaagaagaaaatttttttagtgtaaaaaatatgcattcattcaatgtaggatgactataacaaatatcattattatgggctaaacaacccccctaaatatataagattcagttggtaaaagtattaccaagagagcttgttgataataaaagcttactattaatcattaatatcagtggattaatagcccgctgatatttagtacggttatgaattttatttcttaattaattattttcctttaaaagagctgaaaagttttatcattaaaatgaatccttaaaccattttgtttgcaaattaataaaagggaagttattgaaaaaaaaaattaagagagaagatatttaaatccaattaattgcaagacg

SEQ ID NO: 294299 - DNA, 87 bp, Cannabis indica
tcttagcgagttggtttagaaagctggaaaaaggggtggacttcgtccaagaaaaaaatgaagctcatttatttatttacttttgaa

SEQ ID NO: 294300 - DNA, 509 bp, Cannabis indica
agtaattcacagaataaaccatcacaactcaagttgccattaatgaacaaagctttgaactttaaacctaaaattgcataaaaaccatctacacccattaaaaccagcagctaggacttagaatcaactcaactaaaccctaaaattcgaaccttaaacactttaaaacctaacagccacttactcccaaaatcacatgctcaaactaagtaaaaagctcaaaaattacataagcaagagttctagggcttaccttagataaaaccactttgaatcctagcttagattcacagaaatggaaggaaaaactctggtttgatccttgattgcctcagccgaatagaaagagagagagagagttcaagaggaaatgttttcttttaatttcttttcttttctttgattttccaaattgggaaaaggattgattaatccttggctgaaaattaaggtgctaggtgtcaataacttgggcagccacctcactcaaccataaacaaaagaccaaa

SEQ ID NO: 294301 - DNA, 369 bp, Cannabis indica
cgacgcccccctcgagtccctactactcgcacagacaaccctcaggtaaaaaattctagacgtcgtaataaccgtgttcgcagggaacgaagagccaaccctgagggtctggacctgaataagccaacatcgagagaccaatccgtgagatatcctaaccaaggaacacaggctgacgaagatcctgaacgacgcaatcctcgcagtcgaccatcgagagacaatgacgcagaatccgcctcctcatcttcgcatggtcgtacaccaagcagatacacaaggtccggctctgtagaaacgcaggcagagaggacactatcaagtacatcgaggtgatctgcatgatcacctcaacgcagttttcagagc

SEQ ID NO: 294302 - DNA, 524 bp, Cannabis indica
atcagctacagggaaagaccgtcttctccaagatcgatcttcttatcaccaattgaggattcaggaagaggatattcccaagacagctttccggacccagtatggacattatgaatttctggtaatgtccttcagattaacaaatgccccagtggcatttatggatttgatgaaccgagtattcaaagacttcctggatgattttgttatcgtctttattgataatattctaatttattctgacacagaagagactcacggaagacatctttggatggtgttactgttggaatatgttttaccaagatctagatttactaccatgtatgttatttaacatcataaatatgaatatctaaaacaatgtaaataaacaaaaaaaaaagttaagaaaccttacattgggtgcagcagaatattaatgcctccttccactcagatttctaacccttatatcttgtctgtagcaaagtatcaccagatctgagcctgaatgtccttctcttgattctggattcttcaca

SEQ ID NO: 294303 - DNA, 552 bp, Cannabis indica
gtaatttaaaaacttaattacacctttaaacttcactacaacaaatatttccattctaaaatattttttttttttgaaaaggcataacatatattataaaatacataataatttatcaatataaaaaaatattaattataattaattatttagcctatattgtaataacatatttttcttataaattttttagtttaaattttagaaatttaagtttctataataatattataattaattttgttttataagataggaaaacaatttttttttcttacttatttttataattaagtaattcttgtattaaatgaaaattttaagagtttgtaatttttggggtggttagtcttacatcattatttgttaatctatattaattattgcattaggtaaactataaaaaagagaatttatctatatattaaaaagtacaaaagagaggaataaaataaagtggtagtgctataaaatttggatcatcgtacattggatatttgtaatagcaacaaatgtcttttacttttttatttaacttttcttatttggttt

SEQ ID NO: 294304 - DNA, 1077 bp, Cannabis indica
tgtggtcgacgaggacgtcggaccccgtaagggggggtgattgtgacagtcagtagtcccgtgatccgtaaggggaaataccgggtaagctgtgcaatcccacaccgcctggggaaggtcaagtgggatgattctgagactgtgtaggtatgggactacacagttgaagagagcttaaatggattgattggtactacctatgtcaacaaggtgcatcttgtttttcggtagcccatctcgaaagaactccacagttaagcgtgcttggcctggagcaatttcaaggatgggtgacctcctgggaagttttcccaggatgcgtgtgagtgaggacaaagcacgctgaaaacactcgtgttggtctgtagggtcagtcatcaatccaggaagcagccagagtggcgtactcgtgtataagagccattagtccgtgggtgtaagggcccaatggaggcttgaagcggggacgttacaagtttaatttgggtttatttgatattttattagacctagctattattattagattggatcagatccatctagatgttttagatccaatatctattggattgaattggtattattcaaatcctaaaaaaaaaagtaaattttaaatgtaaatttttcatatatacatatattaaaatttttacgtataacaacatacactacaaaaaagtctcacttttagtcaaaacaaaatttgtgactaaacgtaaaaaagttgtgactaattataaaataccattcttatgttgtgactaaaaggtgcggggctaaaggtattagtcacaaaaattataatttattgtgactaaaatgtgttacaatttgttgtgactaaatgtgtttttagtcacaatacttgttgtgactaaaattaaattagtgacaaattgtaactaaatgctatattttaatctcaagtaatatttttttgtaactaaaagtcacatttaatcgcaaaaaatttagggcttttttcataaatgtacaacaaaaataacataattacaaaaaatgtgcaaaaaaatattatttaaaaaaattatacattttgaaaacttattacat

SEQ ID NO: 294305 - DNA, 706 bp, Cannabis indica
agcggcggctacggcttgatgagagagtttttcaaagtaaggaaacctatacagaaaatcactgattttgattacttacaaagagaaaaacaaaatctttcattcaatctgaactaatccaaaaaaattatccaatacaagtgaaaaacgaaacagaaaactcaaatcatagttcaaacaaaaagaacaaaaacctggttacagtatacaattatatatttaaagaaaatggtgtagaatctttgatcaaatcttccaaattgaatacatttgcaccaagaaaaaagctaaaagcttcaatgttaagagaactcacagttggaggttggaggtaagaagagagaaacgaagacactgtcagaagtggcaacgaacggcaaaagtggggatgagccggcgccgatgtgagatcagaggagtagagtgttgtcgagagagagagagaagagttggatttaagattttgggctagaaagaatagatgagtataagagaaatgatatatattattcatcaaataaacaaaaaaaaataaagattatatcattaacttttagaaaaaaaatctctccataaatcaattgtaatttttgtaactaatacttttagtgatggacctattttagtcacaacataataatgatgatttataattagttacaacttttttacttttagtcacaaattttattgtgattaaaaataa

SEQ ID NO: 294306 - DNA, 692 bp, Cannabis indica
actctacaccacctccaccgtctcctccacgtgcaccgcccgcagttccagatgggtctggtgttgacccatctccagcttcagttcctgatgggtctggtgttgacccatctgcagcttcagttcctgatgggtctggtgttgacccacttgcagcgtcacagggtcctcctgttcccccgtcagcttccattcccagcacctcggaggctcgcgatccagtataccctgccattttggcaaggttggagactgtggagagggggcaggccgctctgctaagaggacaaacagcgattatggatcagttgaagaccataatgacgctcctgcaagatcctggaaggccggcagcagattcacagccacagccacaaccggaagaggaggctcggacaccggaagatgacttcattctcccaaatgattaccaaccggatgatgatgacatgttctgtacacctgagaagacgaatatcaccagcatcggggatactcaggattctgaggtgcaggtgttagagacagctccagaagtcatggagaaccggaggaagagaaggcggcctaggtggttcgctgagtacactgaaatgaagaagaaggctagggctacctcgacactcgtgaatgcggacccacttagagtggtgatcggaagctgctcaagacttttcacaattgggtactcg

SEQ ID NO: 294307 - DNA, 517 bp, Cannabis indica
tttattattatttttatttaaaagattatttacttttttccttcagtaaaaagaaacaaatacaaaaaaaaattaatattattattctaaatcaatattattgaagtagagtgttcaaaaaatatgattgaagtagaataattgtttttgctcgaataactatacttgtgtaaaaaatacacatatatatagattataaacttgtattatatcaataaaagaagtttgtatttaattgttaataatacataaattttgttacaggaaatttatatattatacctaatctataaattaaaatatttttttaatgaatgatcataatcgaaaatagcataaataaatataagaaatactgatttatatacatgtttttcaaagcaaattgaaaaataaagtgaaagaggtcatataaaattaaaatctcagttgaaaatatatttatttatatatatacatgtatgtctaatatcgtagcacaaaatgataagagtgatgattttaaaagaaatcttaa

SEQ ID NO: 294308 - DNA, 831 bp, Cannabis indica
gtttgagtgggcgacatagcgcgaaaagcctcggccatctcagcggcttctgctccgaggatcgagaagtcgaagtctgggactttggaaagagtggtgtaaatataatcagaaactgcctgatcatattgtttcttcccattctctttctcgacctccaagtcgcgagtcatctcctcgatcttcgcccgagagttcttggcatcgagctcagcctgctccttagccttgcaaatttcttcaagctctttatcctttctagccgcctcttgcttcagcctcttcatgttctcctgaagctgggcattgtgcctcttcagcgagtcagcttccttcgaaccagcggcaacagctttcaggaacagggtcatcgactgcgaagccaactccacagaacgcggaacaagctcctcagaagggatcttctccgccttggatatgaactcctcgcctacgaacttctcctgcatagccaggaagtcgcgggctcggacggttggctcgatcaaaactttcttccccttgtcctgcgtggtcttagccagcttcttggaagaatttgcggcaagagtagccaccacatcgctcttcctcttctgggcgacaacgggcgatgtcgtcgctgttccactcttcggcttgattttaaggacgggcgcggacttcagaaaagtcatctctgcgaagataaataaaagataagtataaataaaattcaaggcatcagtttataacacgagataaattacctgagactggtcgagaagtttgcttggagtaggcgtttgtctatccgctcttgttgtctctcagacggtctctttgtatact

SEQ ID NO: 294309 - DNA, 580 bp, Cannabis indica
tgttgggcctttaactttgggcctgaaatagaaatagtaatattgtgtgagttataatattaacactattattttgtggatacataaaataataaatttttgaaaaataccaatttgcataacatagtattattttacttctttaagtgtgttggttagaacaaataatttccaacaaaacattaatgactctacaccaaaaatcacaattagtgacatttttttaatgacatttgttaaaaaatgtaagaataaatgacatttgaattagtgacttttttttttaaatgtaactattgatatattttagtgacattttgtaaaaagtgtcattaattggtcaatatttaaatttagtaacatttttaaaaatgtcactagaataaattaatagtggcatttataaaaatgacatcaaatattagatatatatatatctaattaaattgtaacgtatgtgtttttttatgtgacatcattaattattttatacataattagtacataaataaaatggtaaataccatttttgaccctgtgttttgcaaaagttacatattggaccatgtgttttgttaaa

SEQ ID NO: 294310 - DNA, 1091 bp, Cannabis indica
gtacacattttattttattttcgtttctttaaaattaaaaaaaaaaatatataaaaaaaagagggaggcgtagtgacttaattcatgggctaaggaaattttgtgcttaattggtaagtatcaatatttattcttctttgatttgtttccatttaaagattgatcttttatatgataatgtgtttttaatcttgaaagattgtcttatttttggaaatattgatggtaattctagtttcctttttaaaaggggaaaggagttgcaagagagtgggtggtttcctttttgttcatgggctggcggttattgttcaaattttcaaaattggtttccttttctcttctagcttccatatttatttaaaccaatctttatcatttatctcaccacctacccgaacctattttcttgtttctcttgttgttactgttcatcttccctttcagatcgaaaatggtgagaactaagaacctagggcatcccaaaaagttggtggaaaccgatgcaaccccttccaatgtacctcctgctgcttcaaccattcctcctgctgctacaaaaaataggagattcatcgcttcctcagcgtgaatctcaggcctagaagccaaaacgacttcctaaacaagtggctcaaaaatctgtgcgcccagtttggacctcttcatcgtcttcatctttgaaggcatctcctccacctgctgcagttcctcctcctgctgcatcagttcctgcctctaccccatctggtccttctactcgaactcgtgcccagcaagcttctgtcgagaaggaactttgatcatctcgaagtcgtgataagccagtgcctccagccaagaagaagcctaaaacgaatccaccttcggtttcttcaagttcagaagaagaagatccaacgaaagtctcctctgacaaatctatttctcttcattctgagaaggaaattccagaggacatgggaggttcctcagacagtgaggacactgaactcgagccagagccacaattgaccaaatctgctccaactcctgctcgatcctcttcagcaccaaaggcttctgctgcttgccaaaggcaagcagccaat

SEQ ID NO: 294311 - DNA, 1076 bp, Cannabis indica
tgtaagattaattattataacattaatgtcttgttgacaaagacatttaacttaaattcatattcacatttcacacacacatcctaacttttatttctaccattatattcatttaatttgggttaacatttatttattaccaaattaaacatgctaatataactacctatattagcacctaaataattgggagtgaaggctatgaattaattgtcaagttatccatactacatatagaaatattatataaatgtgtatatatatatatatatcacagttactattaataaagagttgttattgatgaaaataaattactcttgctaagcttcatatacataaatatataaatgtaaaatgtaaagtaggcatctttttttctttttcttaaatacctaatttatacaagaaaaattatatcttttctttaaattttattttcccattctgattaattttctgtgaatgaatcgccctttaaaaaaaaaatatccattgaaaattaaattcatataataattttttttgcttggagaaaattcatataataattaattgactgaatgttttccttatatatatgcatataaatatactaataagagggcattttcatacattttcaaaatgaaattaaatgaccatataataaattttagaggttttttttatttttatattttaaaatagttttttttttttttgtgtatttttacaaaatttcacataaaaatttatattgcaactaatagagcaatctaaattgcaacaaaaattcgtataacaacccacataaaaattacaggagaaaacactttagaaatccaaaccgtaaatttaaaaaaaaaaaaagtaatgaaataattatggagtaattccctaaattttattaacaattaaattgtcatgtttttttttctttcaatttatgtttttaggttactgtgtgtatgtttactcatatttaatgtttgaaaaaaaaacacatatactctatctaataaatttaaatatgattctatatgaataaataaatagtctttttttttacttaatagtacaacaaatactgttaa

SEQ ID NO: 294312 - DNA, 557 bp, Cannabis indica
ggcataaatacctaatattttcaaattttatacacttaaataccttatctttatttttggaggcaaaaatactcaatgttacaattctcttacatctgttactaccactcccgttaacacataaatatggacacgtgaagggttcagatgcattacatttattttttttttaattttaaaacttaatattcttaatatcagaaactaaatgctacttgtttaaaaaaaatcagttctcataataattttcacatgatattgacacttcaattcgataatcatgttccatatactgcactggttcactcagttatggtaatttggtattgcatctctcttattattattttttaaacaagtgtcatttagtttttgaaattaagaatattaaattttaaaataaaataaagggatatttcgacataaatactaatggcacgtttactaaagcataattgttatcggaataaattaatgagagaaatgaaagggaataaaatgtaatgaaatcaaaatcattatttcgacatgttgtttactaaactgtccgaaaatgg

SEQ ID NO: 294313 - DNA, 508 bp, Cannabis indica
atttttaggcacaagttattgggtcctcattgatggccattaaaaaacctactttggggcacataatttcttttcttatctccattatgtgatgactttgaacttttcttgttggcagctcctcttttccaccaagcttcacatggaagtccagaaccatcatctttgccatctttcaaaggccttggtgaaagagtcaagtccccagcatctaagttttgttctgatgtttcaacatattcacgaatagctatctcctcaccgtatggtgctaagccaactaatttgtttcagtttgaaaagaactatacttggcagcactatacacatttcgctcttcaatagatttaatcctgaatatttgtgccttcttcaagttctgtaccatgaaaaagtggcatattacccttctcatcaaataggaaagtcaagtcagtttatttctgaaatagattagtcacatgttggtattctgttttggcagatgggtaatgtttatgttcaattt

SEQ ID NO: 294314 - DNA, 566 bp, Cannabis indica
ttttaataaaaaaataattagtttatgaattgtcttgatagatattttataggtagacttttggtattttcctagatatatttattaattgtagaaaactaatatttaagttgattttattcaagacacttaaatatttgatatttttcttagaaatttaattaaataagaaaattatatttatgttagttaattttagaccaacatgaattagaataatttttccagttttattttattttattgtttttgatgaatttcgaaaatgtatttatttttttaatacattggatttcaaattccaatatatgtttatagaaaaattaaattttagttgaaagttaatttttattaattttgaatcaacttaaattaagtaattttcataatatttattggaaaatttatactatggaaaataaattttatttttcagatcttcctaaagtataattttataggcaaaagggtaactgtacataaaggaaccttagatgcctcggcttcccgccttaaaagcaaatatgggaaatcaaaagtaatcgagtgcaaccgtcagtcgtgga

SEQ ID NO: 294315 - DNA, 642 bp, Cannabis indica
aaaaaaaaaaaatttaaaattttcaattttaaaatctatataataaaaataacttgattgtattgataaaaatttatttgcaccgaaatgtagacttaaattaattatttgaatcacttattgattaataatatagttaactaagttaaggggataattcgatataaataattaaactcctattttagatgcctttaaattaaggtagtcctaagaaaagttgaatattaatttttcacaaggggtgaatcttactttttcaatgcatacatacttacagggtgtttggaatgggttaatgttaacaagagaatggtaatgtgaaacattatcttgtttgttttgagtgtttagctttagaatgttattcccttagtaatataactacccttgaggaaggtaatgttgatactttaaaaaagggtaaaattgaatcattcccttctattatattaatttgaatagtatttttgaattaataaataaatttaaatactaataatattatcatttattataaataaaatattacaatatatattaagtttgtgagatcggtttcttttaactgagttatttttatattattagcaataatatatgtatattcattatacataaattttatgcgaatggtgtaca

SEQ ID NO: 294316 - DNA, 1069 bp, Cannabis indica
gcttgattgtggaatccaattgtcttaatattattcatgctcttaaaaataaaacgctacaatacttcttagttcttacttagggtatcattgttagagaaatattattatcatctaatgatttttttgacattaccatgcatcattctcctagaataactaatgaggtgttgttcattatttatattattaggattggaagatgataatcttgtctaggggtcaagtataattttttgtgctgaaattcttgtgttggcaattgccattattcaataatgtttatgacactttttttcttcgttcattttttttgttaaaattttcttcattggttttgttcttatagattttatctatatatataaagcatagacataaagcggtgacatgatattctaaaatttctttaaaattatttttcttttctctctttaattatctcatttttttaatttttaatttcatataaaattgctctaaaactattttttttcttttctccttaattctctcacttttttaattttaattctataaaaaaatatagactccataaaactcaaattatagtaataataatacaatatacaaccttaacgcttttggcttttattttaaaataatatattataataatagtaataatataataatataaaaaatgataattctaatgtgtacgtttttagctttttttaaaaaaaaaaaaacaatttaagatataataataataataaaataagacattaattattcatatatatatatatttacaagattatatccaaacacacattttattattaaatatagtgtaattactaaagtaatgaccgaccttttatttttgatatagatttatatattaaaaaactcagtacagttttttaattgttattactattccatataaatcagttaaatttaatttgaattttacatataaaacattaattagaataaacataagggtattacatttcaatttaaaaattgatgtattatataaagaataattacaattgttaacatatgtataataataataataaaaaaaacaaaataa

SEQ ID NO: 294317 - DNA, 534 bp, Cannabis indica
ataaacaaaccttttcgttttgagggaaaccattttaaaagatggaaacagaactcacacatcggaccaccccacacgcgcgcgcgccgccgtccgaccgactgtgccgagcgggtgggtggggtgtcatttatttcttaaattattatttatttaattaattaaaacagttttcttttttaaataaaaatgtgtttgattaattagtaaacagagatgcttcctgatttatagcatcttcctgattttttgcatcgtttacacgatcccatgttccaacgttctcatccggtaacgtatttcttcccgttactactatcagcgcattgcctatataatgcgactgaacagtgggagaaaaacactacgatatatacacactactattttatatttatattttcgtttcgagcagtagtcagttttgggtgtttaatttcgacggtcttctatcgtgcaatagagttccgatacagtgtgttcgactgggctgttttatcctggggacgacgaggctgatagtctgcttgcaca

SEQ ID NO: 294318 - DNA, 593 bp, Cannabis indica
aattattatttttttttttatcctgtaacgtaaaggatgagtaaaaataggggagtggggagttgagatcctattttctctctatttgactgatattattttttctattattattattttagaaaaccaataatgaaataataataaatttatttattcctcttcttttttttttatcgttcaacataaacattataactttattagagagataattttataaatacacagaaataataaataaaaaaaattaataaaaatataattgtacgaaattttaaatatttttacagtttttaaaattttatttacaaaaatagtcttttggtattatttttttttatggtgtactcatgttactttgttatttaatttttttgttatttgcatatttatttttttacgttgttctgatattgttttgttgttatttttttgttactttaatgtaattttcttgtatttttatagaatatcataaaaaattttaaaaagaaaattgaatgtaaaaacataaaatttttaccaaaaataacagtttatgcaattttaccaaggagcatgatttagtacatgttaaagtttgatggaca

SEQ ID NO: 294319 - DNA, 826 bp, Cannabis indica
gtcgtctggaacgagcctcagttcgccagggatctattgcccaagtatttcaagcacaataacttctcaagcttcgtcaggcagttgaatacttatatgacagctttcaagtaaggatccagttttgctaattacttagttccatcattaattaaaaactaccaagacgcattgttgtgttgcatgggtggtgtctacaccacagtccagaggtttgtttctttccttttttttttcttcacatcactagaactttagttttattcgtctagtttagtgtctcagtgagtgtggtgcaaaaactctggagttggattactaagcagcttgaattctgcaagaacaacaagtgatttattttgcccgatttaaggccaggagtatggaagttctcgtgcaagttatttataaaacgttgtgattttcaagtgactaaagcttggggtctgctattcatttttacctaaacaattttggttaatatagtatatattttaatggaagacgttttaatgaaagagaagagatggtaacatgtaggaaaggagggaggatggattagggtggggccacggattggtactgcaactgatcagtaagcggctctaagaagaagtacattgttttattcaatgtgtttgatggcatttaattttgctgttattattattattattagaaattacaaatatatttacttgttttgtttgtttaggaatggagtaaagaaaagggaaatattatagattaaaaaattaaaacaaagaacaggggtttattattggtattcattcataagtgagtggagagtgagagagagagagag

SEQ ID NO: 294320 - DNA, 246 bp, Cannabis indica
tttatctgtatgttattttttgttgttgttttgatgttgtttagatattattttcttgttatttttatatagtattcttgttattattgtgttgttttcataaaaaattgtataaatagtaaaaaaaaaaaaaaaattaaaaaggtaaaaatataatttctagtaaaaaaaagaaaatactattttatgtaactatcctatttatataatatatgagactacactttggcctaatttcttctcctt

SEQ ID NO: 294321 - DNA, 599 bp, Cannabis indica
taacaagttatattttaaatggacaattatttaacaaaattagtgatataaatcctaaaatttagtaattgaattaaaaagattttttgtatatttataaaaaatagtaataaataattaaataattataaataactttaattagttgaatataaataattaataattgagtaagtgataaattttataattaataaatccttgtaatgttaagtctggaatgttaagtcctgagcaatttcacagtcaaatgtaccagtcatacttgcagtttgtgtttcagtcgccaaacaattcgcaagtattgttgaatatgatgacgcagttgcctcagacgtctcatgtgtcagagcctcggatgccacaaatgtcacagatgctgcaaaatgttcagatgtcgacacaagggcagcaatatcagaacacatcgcagacgatgccgacacaaccatgggagcagacatctcaaatgatgccgacacatctaggacaacagacttctcagatgatgccgacacaacaagggcaacagacatctcaaatgatgtcgacactacatgggcagcagacatctcagatgatgacaagttcgcaaatgc

SEQ ID NO: 294322 - DNA, 793 bp, Cannabis indica
acccacgcaatctttcttttatcattctgagtaccccaccaaaattgcaaaataattgagcgaagcttatcacaagtggccaccggcaactggaatatactcatcaaatagtttggaaccgcctgcagaatagccttgattagaatctccctaccacccgcagaaaagaaactccttttccaacctcgaacccgtttctgaaccttgtcacaaatacttgcaaaggtccgctttttattcctcccaataacagttggcaaccccaagtacttatcatgagtagcaactgaccccaagcctaaaattcccaatacacttgtacgatctgctggcaaaacattcggactgaatgtaatagcagatttttcaaaattcacttgctggccagaagcattctcataacactgaagaatccgacgaatagactccgcctccctcccattagctctcccaaaaattaaactatcatcagcaaagaaaagatgagacacccgaggcccagcccgggaacaccgaaaacccatcaaatcaccagcagcctcagcctgttgaagcatggtagatagcgcctcagcacaaaatagaaataagtagggggaaagaggacacccctgccttaaacccctcgaaggcaccacacaacctctaggtcttccatttaccaaaaagctgtactccggcgtagtaacacaatccataatcagatccacccatcgacaaggaaacccgaacttactcataattgcccgcaagaaactccactccactctatcatacgccttactcatatcca

SEQ ID NO: 294323 - DNA, 515 bp, Cannabis indica
aagcctaatgaactattgattaaaccatatggatctataaagacaattcatgatgctgatccattgcatggccaacaatatatgtggtaagttcaatatgattttagaataatagtttactattcattaaatattattttaaatgtgcaaaagtattacatgtttggtattttttagcagatttcatgtaaattggatatacccaacttgatgactcgatgctgtgatttcattactatagaatttgaaaacttttgtaaatatttccgtttcagttggtatttatttcaatgtttgtaatagaagattcacaatactattttttgtgtttatttctttggtgttgtcattgtttatataattagtgtttattaaatattacttgttttattattgtgtaagaaataatttgggatatatgtattattttacaatatttattatagatatttagactatatttatttataataagtgaaattgtattaatataaatttaaaattaattaattata

SEQ ID NO: 294324 - DNA, 179 bp, Cannabis indica
tgtcgacagtttgtcgacagcatgtcgacaaaaagcatttatcctttttgagaaattgtcgatattttgtcgacaccatgtcgacaaaatatcgatgcaaatgaaaaaagccataaataaaacataacataacattaaaataacataaaataaaataacataaaaaacattaaaaaaca

SEQ ID NO: 294325 - DNA, 623 bp, Cannabis indica
ggtgctctaagttgatgccacgtgtcaccattcttgtgatgccacgtcagagtgccaattttgggataacatttgccccccaagtctgtgcgggacctccgaggttgcgtatagacttattccgagctggctctgcctttgaaaggggacacgtgtcgagcatgaccgttcgagactcgatgtgaagctgactgggcgtcccttcggttttcggctaattaatgctctgacaattaatattttgaaaatccgaatttctctctccacggctgacggttgcactcgattattttgatttcccatatttgctttcaaggcgggaagtcgaggcgtctaaggttcctttacgtacagttacccttttgcctataaatacttggagtactggcacattacctcatttcatcacccttcgttgttaagcaaacttcagagcaaaaagagagagttttcaggcttcaaagttgctgaagagcttacagacgatttcaggcttgcttgaatccggacactcgaatctttgagtaagtttctgatcccctttatgtttttcctttgcatgcttgtgctttgaatgtaactttgctgtagaaagaacactgtaggaaaccctagggtttgaa

SEQ ID NO: 294326 - DNA, 510 bp, Cannabis indica
gatgattttggagcaaaaggaaggggccaagatgacacgatggtatgtatatgttcaaactaaagtagtataacattattgacaaaatgtttcaaagtttgaaaagacctgttgttgttgttgttgttgcaggcatttgagaaggcatggcagaaggcttgttcatctaatgttcctattgtactagtggtgccttctcaaaacacctatcttgttaagccaattgtgttccgcggtccatgcaaatccaaagttacagttcagattgatgggactatagaagcaccctccgatccatcagactacaatggacacgaaagcaactggcttatgtttgaaaatattaatgatttagtagtccaaggtggtggaaccattaacggtaatggaaattcttggtggaagctctcctgcaacattgatacatcactcgtaagtactactcaataatatatatatgcttatatatatgcttatatactccacacacatatatactaatcatgtttt

SEQ ID NO: 294327 - DNA, 526 bp, Cannabis indica
ataaaatttttaaacttaggatattttgtttcatttaattattaaataaaattgataatatcttaaccataaaatatcttatttttcaaaaagtttatttttgttatatttaatttattaaattaaaagattaagaatataatattagaaatatctaaaattttaaattaagatattatattatattatcttattagatatttaattaatttaaattatttaaataaactgaaaaatttgaaaattagttagatatttgaatttcatttagaatttaggatatttaggagatttgttatattttaaatattttctaacaacccaaattttaaattctagtgaaggtatattttaaatttttattttaaaatagaaatatcttaacctactttccaatgatctgttacatgtttgtattgtttgtttatttatttattcaaaaaatttttacaaacctattatttatttgatctaaattgttatgattacttgttgacaaatctaataatctaattttaatcatagt

SEQ ID NO: 294328 - DNA, 536 bp, Cannabis indica
attataaaatacactcagcaaaaagtaaaaaaattactaaaagacaacaagaattaatcaacctcgcaacaattataaattataaataaactataaaacaattagaaaaataacttcatgacaactataatacaactataaataaattaaaaaataactaaaaaaatagtttattatttttactgaaaatgtatttttgtaaataaaaaaaaagtttaaagagtaaaaataatttttaaaatttttggtttataatttttttatttataaatatttacaattattactactactttatgtattattattcaaaaattaataataattcatgtaattttgtttggtttgattttttatatatatagaattgtgaacgtgtggaagaaatcaaaaagatgttgatgagtaagaagacaatttaatttaatatattggctaatatttggtataaaacgtttcctttcacatataattaaaaaataaccaaaaataaaaaagaaaaaaaaaaaagaaaaaataaaagaagataatctaaa

SEQ ID NO: 294329 - DNA, 774 bp, Cannabis indica
aaagttaatgaattggagtttcatatatttaatctaccactagaagatcaataaaaaatatttgtgaaacaaatagtttaatatcaaattcaggaaataattaaagcatatatatttttgttgctaactattttgaaaagccaaaataaatagagaaaaaaaaatcttattcctagtaaaataaatttaattaaagaatgatttgtgtgtgtatgtgtgtgagtgaagtctttttcgttctttaaagtcttaaaaaaataaatgtctattaaatgatagaagatagaaagtaaaaaaataaacaaaatacttgacatatttaatataaaattattaaatgtttacctttaagtaaaataaaaaaatatatatttttattcttttcataaaatttaataatgtacattagttttttttcctaaggctaaggtcatttatatttaataaaaaatgcacaaatttttacaagtacaaacaaaaataaagccgcatcaattttatttagagatgacttaactgttcaccaatgacatcaagaataaaggagcaaaaagctcatagaaaagctgctaaaaggaccaacctcataaaaaaggcctaaagctaacactgctaagaacgtatagttcaaaggaataattacataagacactattttttgtaaaatatttacatttttccgttcaaacaatatttttttacatttttacggttttctaaaaaataacacgaaaataacataaaatcaacaagaaaacaacataaaagtaaaca

SEQ ID NO: 294330 - DNA, 742 bp, Cannabis indica
tgaataaattcattaaaaatataccaacttcatacaggctagttatgaaaactatacatcttatgtttatcaaataaatactatttttgttaagaaaatcaaaataatcctatacaccaacaaaaaatagggatattcatatctagtcaaacaagttaattattcatccgacagcatgcacaactaatctataagcaacacagattaaggacactcttagaaatctgaataacaaacttctaaaaacttctaaaaatgatcttaaaatcatttgagcgaaaactctgatagtaaaagcaatcatagttgtaaaatctttgtaacaaactgcaatccaaactcgctaccatttctctgaaagcttcaagggacagtaatgttttaactgcacataaacaaacaatatattagtgggatgaaaattaaaataatgagtaattagatattattgcaaatttatattttatttttactacaaataaaaaaaataagcattaacagaaaaaatttataaaaaatactaacaatagtcactataaagaaaatatttcaaacagaaaaattataaagaaatgaaaaataacttatcttgccaaatacaattggtgtctgaagtagatccacgagcactaatttaatcactaaaataactattataacttaaaaaaacatcaataactttataactcaaataatcgataatttaaaaataaatcttaaattatattgtaataatctaatt

SEQ ID NO: 294331 - DNA, 518 bp, Cannabis indica
aaattataaattaaagttggtctggtaaaaaaaaaatttaatttaatttaaaaaaaattccaactttaattaaatttccaattatttaattttcgaaaatatatatataaatatatataattcgaaattaaataattaattaaaatataataaaataaaaaatttgaaaaatatctaatttaagttgttctagaataactaaatttccaacttaaattattttgaaacaaaatttaattaaataacaaattaagttgtaaccacctaatttgaaaaatattctattttaagttgatctaaaatttaacaaattttcaacttaaaaaaaatatcctaagaatcttcaataactaattcctagaattcctcaacttaattttgaaattcaaaagatattcaaatttaagttgataaaaaaaattagttagaaataactaatttacaacttaaataggaatatttaatgaaatattaaaaaaaaataaagcttcagaaggaatctagttagttataattct

SEQ ID NO: 294332 - DNA, 604 bp, Cannabis indica
gtatatggaagactatgatttcactttgcagtagtcacccccgggaaagataatgtagtagcggatgcactaagtagaaagcctcatggtactttggcatgtttggctcttgaggactggaaaaggacaatcacaatgggtgattataacttacaatactatgaaggggaagaagtagcttgtatctctaacttagtggctacaacagtactacttcaacaagttaagcaacgtcagtggcaagatgaaaaactaagacttatttggaaccgaatccaggatggtgagcaactagatgggtggacagttaatagtgaatggtatctttaccatatggcaatactagttgttgcagatatccctgatcttagagagaccattttgattgaggctcatagatccaaatttgttgtacatcctggaagtacgaagatgtaccaagatttaaagagacaatattagtgggaaggtatgaaaagagatgtagccaactttgtagctaagtgtatagtatgtcagcaagttaaggctgagcatcagagaccctcaagtttacttcaacctttgcctataccagaatggaagtgggacaagattaccatgg

SEQ ID NO: 294333 - DNA, 669 bp, Cannabis indica
ttgagagagttatggccaaaatactatcagtcgtcgcagcaggaaatttctaaaaaaagatagcgaaaataaagataaattttcaagaagagttgcaatttttatcttttgtttaaaagatgagttatctttatccgagatatttcctaatactattataaatagaatcctaattctaagaggatttatctatccactataaatagaatcctaattctaataggattcaactaactttcccattactataaataagacctcttagactacaaaccaggtatttttttctctcaatattactcgaaattggacgattcaagatgttctagaaagctaagaacaagatctaaaactttcatgttgagctccaagtccaattttgcctttaagttcgtccgaatttgcaattaagttccgccttgtacaatcgagctcgccgacttccattattttctaccaaaatatgttaaaatccctctaaaagactctaaatggatgaatagtatttaaaataacctaacaaattaaaatcacactaatcaataatttaaagaatcaatttaagaatattaataaatgaattaatcatatttataagataaatatggacttatcacataatgaccatgttatcttggtcaatgacaacacagccagctactcaaacga

SEQ ID NO: 294334 - DNA, 678 bp, Cannabis indica
tactgtcacatgaaatttttttcaaaaatactgtgttttataaaataccagtagaacacaaaacagaataactcaaaacaacagtagaataactaaaaaacacaagtagaacaacagtgaaaacctaacacagtatactgcagtatgaaacttataaaaaaacacagtaaaaaataccgtctggcagtacttttagtaaaaaaaataacaaaagttagtataccatgtaaattttccttaaataatgctaatggtgtatggactttttgttttggaaataagttgaggaatacctattttttgtatccattaataaaaataccctcatattatattttattaaaatgtacccacttttgtgagtgagttggtcaatataccctcaccctctacttaagtctagcacataatttacattaacttaagggagtataatgaggacatcatctataaaaataggtatatcttaaagaatatgaaaataaatataaaaattaagacagattaagtaaaatgggtatacaatgtaattttctctttgttttgtttatatttttatgggctgtttttatgcatagttttgtaaaaaaaattagaataccatactttaagtttggagagttatatttgcaccccataaaatgataattacaccctattattaaaaacaaagcttaa

SEQ ID NO: 294335 - DNA, 1251 bp, Cannabis indica
ctttattttcttttataataatcatttaatactttttgtatattaaagaaagcatattaggtgtgactataattggcctaagacttgtgatgagttatgattgcatgaggatggtactataataactattttgtgtacttgttgctttaaacttaattgactttttgacttttgtttttctttgtgtaaattgatttactctaaacttaaatttgttattaaatcaaattaattttgttggtggatggtccttaattttttattatacttaaattttgaaaatttgttattttttttttttttagtttggtacaagtctttgtttatttttttttgtagataaaatggtgacaatttattagcaaattgcattaaccaatacaatgtttaaaagattctccggagcatttctctcggtgaacatacgaattgagtgaaaacaagaactacgagccatataatgggcaaccttattagtagaacgtttaacaaattgaatctgaacagatttaaaagaagcaagcaactccttacactcttgaatcaccacgccaaagggagaacgcagtagaaccgaagaatgcaatgcttagacagcgacaagacaatcggtttccagttgcacatcattcacctgcttgtctttgatccaactaagagcttccttaatgcctatcgcctccaccacaacaacctctaaacagcccagtttgctacaagaaagagctttgttattttaaatataagcaaattatgataatttggagactttagtaaaattgtattaataagtattttaaaagttaagaaagttatacatttttaactacttttattttaataagtacatattttttgtgactttttagagttgaggtcctagtttattattatttataagacttttattaggtttattgttgtgttttgttattctataaaatatacaataaaaactgtagttgaatgagatagtaagcgagttacatactttctactgtttcgttgaaagcctttatttaaaacttatgttatatttaatgattcaatatctttattttttatttattctttcaaataaaagttttcaatctatacttatcactcattttctattttccacattttaatttttttttctttgctagtggatttatttattatacttctctttttcttgtaaaattgtgaaacattcaaccacatacaaaaatgtgacttatatcataaagaagttgtgaagagttgtat

SEQ ID NO: 294336 - DNA, 556 bp, Cannabis indica
agaaaaagccttcaaaaactcttcctatatactatcattactgtgaacttactctgctacgtacaaactcacagtcacatacatatttataactcatacacaaatcgagagatgtggtacacaccagctactgtcacacccacacacacacacatatatatatgcacacatatcagaacaagcagccaatcactagtcaatgatctcagaaccagcagtgtcgttaaagcttgcaccagggttcattagcttagtagttttcagggcatttttcggcattatatatatgctttttcttctctttttacttttttgtaaaaggaaaacaaaaataggttgttatgtttttttatatgtaaatatatacactttctttacgttcttcaagaaatatacttaaaggaggggtttgcttggaagagaaaaaggagatccgtctcttgtgttgcagcacataaaaggcttaaactatcttcagaaaagtaatagttcacttattatgatccaaattttgagagagagagagagaaaggctctagcctcaagctacaaagct

SEQ ID NO: 294337 - DNA, 574 bp, Cannabis indica
aggcaatgtgaagaagaagaagaacgaaatgtgaagaagtgtgaagaagaacaaaatgtgccctaataacccacgaacccactatttagtgtattttcaaaattggtaactgtcacccgtacatcaaacgtcaaacgtcaatcgttgtcagtttttaaaaaattaattaattaaaattaacaaaaaacaaaccggttaccattttccccccctaaatatccctactttaacccaagtcattagatcatgccccaattcaatccaacagctacagtacaatcagggattgtattccctattttggcataacgggaccaaatccgatccctataaaaataatagtttttataattattacaaaaatacttttaattttgtgtacaaataaattaaattttaacaacatttacacaaaaatgggtggtaatgcgaaaaaaaaagaagaaataaaaattatcaaattttattgtcatttattattaataaatattattaaaatgatgaaaaatttgatataatattacctcaaatttcaaaagtatgaaccagttaattttaaataaaaaaaaaatag

SEQ ID NO: 294338 - DNA, 593 bp, Cannabis indica
  modified_base (66)..(66): a, c, t, g, unknown or other
ttactaccacctttatttgtcctatatatacatggtgaaatatttaatttaatttaagatatatanaacacatacaaacacacacaatattgtggtcttaagtctcttgactcttgttccaatccctccatgtcttactaacttaaaaaaacaatattaatttctaatagaataataagtgttaaatcggtgatgtaatactatatttatgtattttctgtaaagttagaaagaaataaaaaacttgtactaactttgttttttattggattattttgtaaaatatataaagttgacaaattttatatttaataaatttaatattatttttatatttttacgagttttttttacaaaaatgcagaatattatattttctttgttttcgaaactatattgctgttacaaagcaataggatttctttttatagcaatacatggtgtaattgtttgtagaataatgttgtttttaggttgttgctatgagaaaacaatgtaaaacatatatttttattttgtaaaaaaaaaataagtaaaaaaatgtaaaaaaaaattcgtaaaaaaaaaaaaaaattgtaaatatttaaaataaa

SEQ ID NO: 294339 - DNA, 466 bp, Cannabis indica
aagtactcaattgagtctaagtgttgaacacattacaaatcaaacctcacatggtagaagtcatctctaaggatgagcaattctacttttacaaccctcctatacactcacaaatctggtacacaaattagagagaaagagagagagaattctaggtgagagaggctcagattggactctttttgaatgaagcccttggagctttcttttataggcattggttgaatcaagtaggtaggtattacttaggtatcaagctagataactaacttaactaaccaatgaaaatagttgaatagaatgatgaggtggcattagctcattgggacaaaacctacaacaacttgtcttcttagttaattttcaactaagacttgtttggtataatcaaagagtaaaacatattaaatcatttattactctgtttaaaatatttatacatatatatagagataatagaaaaatg

SEQ ID NO: 294340 - DNA, 748 bp, Cannabis indica
aaccaaatttttggtttaacgatatttttgtagtttctttattaattttataatattattatatgtatttaaaaaataaaaattatgtagatattttatataaataaatttttattttaatttaaaataccaaaatattattgatatttttaattttatttttaaaattattgctttaaataaaaattatatagatattttatataaataaatttttattttaatttaaaatacattaaatattattgatatttttaatcttatttttaaatttattggtttaactttaaattaaaataaaatgaaaaattatgtaaatattttatataaagaaatttaaatttaaaatattataaatatttttaaccatatttttaattttattatcatttattttatattttaaattgaattcacacactacatattttttcgtaaagtttggaaataaaaaaacatttatatcaaatttacaaatataacatatatatagacacactcaaattgtgttatgtgagttttggttaagaatatgtaaattataatatatgcattatcagatacgttacctaattaaaaaaatttaaaaattttaaaaaaattaacatatacatataatcatatttaaatgacacaccaatgtagtcaataactaaaaaaaaaattcttaaagatcaaaatttcaaactccatttcaaaaattaaaaaacactactacaatattaggctttagaggcagttttttcaa

SEQ ID NO: 294341 - DNA, 626 bp, Cannabis indica
ttcaaacccttgtgtgcagcactgcagctactacaattcactacatggctccaatacctaaaaaaatatacattaacattattacataagatgtccaaaagggtcttcaaaattaatattgaaatattgtgataattttgttgcattatatatagaacctgtccatgagttgttctctaggaggggttggaggaagagcaccagagaatttgccaccccaatcaacttggccaccaccatacttgttaagccattttctaaaagcaaccacatgaacatctgattttgttggcacaaaacatgctttattccatttcccaactccaacttccattatcctacgctcctatattacattcaacaacaaacaaattatcgatttatttttcttcaatatttttgttttcctaattatcatgttggcaaacacacattgactaggggagtaatatccttattttttttaatatataattgcaatttaactcaataaaaaatcttactattagtcacaacaaaacttgtgactaaagtaaaacatttgtaacgaattataaattatcattactacgttgtgagtaaaaaaatctgtggctaaaaagtattagtcacaaaaaatcacaatt

SEQ ID NO: 294342 - DNA, 540 bp, Cannabis indica
catgaaaccatccaaatcaacacataatatcgttttaattcatattttatgaaagtaaatcattaccatggctctggtgccagttgttggaaatattttaccaggatctagatttactaccatgtatgtttcattacatcctaatatgaattctaaaacaatgaaataaacacatataaagtttaggaaaccttacattgggtgcagcggaatataatgagtcctttcgttcaggatctctagccctttgattcctttttgtagaagaacataatcaaggtctaaaccgggatctctttctctccttctttgatgctgattctccttcttgtttggattctacacaatctttcacaatatgattgagataccacttgatgtgtgtggacaatactctatcactaggttatttcgaaattgaagagaagaaaagagaagagagagtggcggctaggaggcttaggtttttctctgaaaaagaataagatgcattgcattgtttcttgaagccatcactttctatttatagaaagccatcta

SEQ ID NO: 294343 - DNA, 636 bp, Cannabis indica
ttgcttttatgagcttctattgggttacatgcatatctggagcaaaaaggatttggagtagttttttactttggcctatttggcaaaggtgttatacttttgttcatgatcacaagtttttgacagatactatggttagtccttgggccattaattatatgtggatgtaccaggatgctcaaagtggtggttctttcgagcactggtaagccactttcttgtctggggtcgagatctacttttgtcaccgttagggagttgacattgggtgaggttaatcttttgttgaacaaagctattgtgaaaacagattaattttcaatgagtctaattaattttgctctaaggaaaataaaataaaacttagggcataaaatgaaagttttgtatattatgaaaggcggcaaagtctagtttgctagatgagtaagagtaaaattaagagcaaaatagaaaaataatttggcagttgtttagaatgggaaatttgattttttatccttacatttaagggaaatttttttccttaaacctaaaataccttatattggtaaaataggacaatatttacttaattcccaccattaccccctcattcaaatctgactcaacacttgactatgaacccagcccccc

SEQ ID NO: 294344 - DNA, 156 bp, Cannabis indica
atcgtgtgagacacggggattagggttatgatcaggtgtatgggcgccaggttataacccgacgttagctgtatgtttattgttatgcttttctttactgagtttgtcgacagggcaaggctaaagctaaggaatcgtgaggacgagcagatgaag

SEQ ID NO: 294345 - DNA, 547 bp, Cannabis indica
aaatattatttcatgttacttttatgtaattttcttgttgttttcatgttacttgtataaaaagccataaaaatgtgaagaaaaaaaaaatgtaaacataaaaatttaagtttttttacaaaaaaaaattatggctcatgtaattacccaacgtttaaaaacagacttcaattgaccttggcaattaatcaaattgtattttaggtggtgccatgccagtggtgagactgaaagttgtccaaataataaattctgcaatgtactcctcacgccagacgcgaaaatcttatattttatttatttatttagtttttattttattttttttttttttttttgttggttggtaattggccttcccgacttaattacgaaagtaacaagctatcttatttctctctgtcttctgtctcacttggctttcgctcccaccaaatagagataagggaactaaggccaatggcaaaatttaaattggtgttaaattaacaccaaaaagataaatttttctataatttcatctacaatactaaaatttacaccaaaa

SEQ ID NO: 294346 - DNA, 635 bp, Cannabis indica
aaaaagttaataacattactgaattgttaattaaacactggaaaaggtatcttaacaactggggaaaaaaaaaaaacaagaaaaaataacagaaaaactataaggaaaaaaaatacataaaaagatgtgatgtgaaatgaaaatactaacaaatttaacataacaacttgtttatacataacaaaaagaaaaaaaaacatacagaaataaagattacatattgtccacaaaaaaatgtaaaaacataaaagaagaccaatgtttgtttccagaaacaacagtaaaaaaacataaaaacaacattaaaacaacataaaaacaatgacaatctgattgaaaaaggacaaatcatttcttgggaaggctgggaggggcctcagattcactttcaatgttctcaagttgcttcttcatgccataatgataaaataacacagccaaacgatcgcggtgaatttccacatcaaaaccagaggatgggatgggtttgccatcaatgaaatactcagcaaatgatgctacgaaaacaccacaatcactggaaaaagacaagaagaaaacaaaaacaaacactatgagaacactagtaaaaaccaaaatcacataacaaaaacataacaatacaaaaaagcagt

SEQ ID NO: 294347 - DNA, 667 bp, Cannabis indica
atgtatagggtggctcgatccgtggaatgaaaatgaatttctttttattcccatcaaccaaatacaatctaaggtagtgtttagttgaaatgaataaaaacatatgaacatgtaagaatggtaatataaagaatagaaattaatgtaacaaaatcaaatttaaaatgtatagaaaatttgataaaaatataaattttttcttatctagtatcaaaatagtagtcctgttattaattttaaaatgaaatagttattctactaaaatgatgtaaaaatactttaaaatataatgaaacaaagaaatgaaataaaacagagttttattttcctttgcatctcatcccaattttcatattttatgtttgttcacgaaaatatttaactagatataataacaacagtgtgagagagagatgatgagtccgccttagttatatatatttggttataatctagatcctctaccttgtgtttgaagacccatatatagtaggtgagagcttcaaaaaacacactcaaaaaaacttttctttaaaacccttcacatagaaaaagcttaaattccagtacaactgcatcgattttctttgagtcatggtaaagcaaagaaaaccctaaaacgtatcaaataaatctatatattgatctttctctctctctctctctc

SEQ ID NO: 294348 - DNA, 1019 bp, Cannabis indica
gtttttgcatgacttaaaatagtataattactttatttagtagtctagtgtgaatttttttaatcatgtaaaataaatcttatcttttaaatactgcactgatgaaaatgaagtgttgattattataatcataacttatcatatcataaaggtgattgaatgaaaaaataaaagtcatcaataattgttatatatattataaataattatttaaaggcaagcatctaatattgataaaccaaatttaaagtatcctatgatcatatatagggacttgattagaattaaaggcaccactacaaagactataataatattgattgtataatataaagcaatgaatatatgtttaaataatgatagatctaatttaaataacactccaattatataataatataatgatgttacgaatcacttaaagcaattaacaaaagtaggctttattacatatcacttaataatttcaacttgcaagtaacatgattattattaattaagctatttttttttttaaattagatgatttattaaagtttatatatggggcaatcttctatttgtttgttgctaattaatgtcttaattataaaagttatattataattatataccgtcgcatactcatatatttgtatgttttatagttatattattcccactatcgatctcttatttaattaaaaaaaaaatcatatattatatatatatatattaattaatatatatagttggtttggtttgaaaatgtgaatgtttagttagagtattattaggggacactaataatatatctaacattattataaggtgtattgttttgtaattgattaaagattttttataatttttattaaaatatagttaatattgaattacactactactaatattatatttcataagaatatgttaaacactatcatgaataccctataacatttctcgattaattatgtaacgaatcatatgttgaataataataattaataaattgagttaaatgatttcttgcatag

SEQ ID NO: 294349 - DNA, 923 bp, Cannabis indica
gagtgaagccaatattcatcctttcgatataagatattaactcaaaacaccaaagagaaatattatatatatccagaaagctaatttaattatttccaagtatctaaactcattacaactcacacattcatttctttttccttctacaaataaattcaaattattcattagaaatttctcaatcccattgttaattcaatacgagtctgcgagtcgcacgactccaactcatcatcaaaagaaaaagattacaaagttcatagacttataaaaagtaattggctctcccttcgtttattaatacgtgacacttacatttgttgtttagaaaggctatactttaaaacatatatactatatatttgaaataatttataatatactctcaaaaaaaaaaatttattttcatgtttgtttcgataattaaaatatttttttagtctatattattttacaaatacacaaaaattataaaaaaaaattacaaaaatacagttatacgtaattttaaatattttaaagatttttattattataaaaaatattatcttttgatgtatttttttatgttgtttagatgctattttcttgttatgtaatttttgttaagaatactgtaaaacttaagttagccctaattaattcaagagaatcaaacaataaaattaaggaatagcggaagcgtaccggagtccatagaatcgattttgtaataaccttagattggtatgatcttccaattttttgcatcagaacttttctctctggaacttttgttttcttgatgatggggattcaagaatacgatatgaagcgatgcaaaaaatggggaccaaatacctgtttaaaattaatcctttttagactatttccaatttggcccctcatcaaattagaaattgtctaattggtatccacatatt

SEQ ID NO: 294350 - DNA, 473 bp, Cannabis indica
tagtcaatgcacatcctcatagaatccatctttcttctttgaagaattaaaaccggggctccccagggtgatacactgggccgaatgaacccttatgtcaagcaaccccttggagctgtaatctttaattaccttaagttcagtctggagccattctattattggggctttggtaaaccggtttcaccacctggttgcctaagtctattcaaacgaaatctaatctcccgctgagggggtaaccctggaagttcttcgggaaaaaacgtctaaaaattcccgaacctactctgatgtcctctggccgaatggtatctggccgagtggtgtccaccacctacggccagtaaaccctaagcaaccgccgtgcaacaattctctagctgacatagccgagatcaccgggatccgagatccctgaactgaaccaacaaacacaaatggttacttcactttccggttggtaagaccta

SEQ ID NO: 294351 - DNA, 420 bp, Cannabis indica
aaaacaaacggttacttcaccttcaggttgaagattaccttcttcctcttacaatcaataatagctgagtatttggacaagaaataccactcccacgtataatatcaaaatccactaaattgatctctatcaaatcagcactcaactctctatcctctattctgattggcatagacctaatcaaccttttggagataactaactctctgccaggcagtagagttccaaaccttgattcatagttatcatgcggtctatccaatttactaaaaattatagctgccacatacgaatgagtggccccagagtcaaataacatagagaaataagagttgttgaccaagagccgacctgttaccacagaggggctggcttctgcatcagcctaagttatcgtgaacacccttgctagagtgggtt

SEQ ID NO: 294352 - DNA, 670 bp, Cannabis indica
caatctgtatcttgcgagatcgttgctagtatcatgttcaaaaccactgcccgtgaaatgtggacaaacctccatgcttgctttaatcaaagcaacagtcctcgtatttcacaactcgaaatcggtgttaacaacgttaaatagggtgataactcaatcaccacctacttcacccagttgtaagctctttggggtgagcttaacgaataccaaccaaatatcccctgtacttgtggctatacttacggtgccatgcaaaaagttcaagattattacacaagagaccaaatcctccagttcttgattggtctcaataaatcttactggggcatttgagctcatttgagcttttagggcaataaaagggcttcgagataaaggagatcgtgggatccaagtggacgttcccgatttccatggctgactacatcccgagaactttcttgatggctaagtagcgtggagaagttctttgattggaaagaaccccctccctcactataaaatgtgttctctatggttgttcaacaagagcactaacactgtcttggcaacactgatgttgttggctcttggatctattttagattttttagtagtctccgtttttttagctctacttcaatttcagttttttttttttaattcctacttttatgccactatatat

SEQ ID NO: 294353 - DNA, 547 bp, Cannabis indica
ttttgggcggtccgagagagtggggctgggtcggggtgttggtgcgggtggtcggaggtggcggtgagggtcggaggtcggaggatggaggtcggaggtggtggtgagggtgggcggttgggatgtgagatagagagagagatgatgcagagagagaattgtgaggggtatttttagggttttgaaaaaaaaggtatagtttttttaggcttataaatttttggtttaataataaatttttaatttttaagtatataaaatcaaaattcctattgtaaatatatatattaaaaaattgaaaataaggtggtaataagtataacttagtggtttcaaaacttttcttcactcccaagttcaaatcttcatcccatagcctcaaaaaagaaaaaaaaaaaaaagagtatttgcaagtacataaaataaatataaagaaaaccctttcaagcttcaaccctaaaaatttataagcctaaaaaattaggtgttattaattaaatacctgttcggtaacctttttgttttttattttttaaaatcacttaac

SEQ ID NO: 294354 - DNA, 670 bp, Cannabis indica
ttggaaattttggaagaattttatgttgatgcatgcttgattttgttatgttcttgctgctgtgagttgttgttattttcagagaattaatcttgttattttgagtagattagagctagttaatgcatggtatgtgctttgattcaagatttgaagtttttttagctcaaaaatatgattttcaaagaaatgtgttaaatctgttaattgcttgctgtagatggttgcttttgttttctgaggttattttatgcatgattaagttgatttgggctgaattgaatgcatgttagtggggtttgatcaagtttgagtttagaactcaaagcctgggctttaatggtgatttttgtttatgtgcaatctgggtgagtttgatgctttagaaatgttctaggggttatatagaacaggtctggaagttttggtttggtttggagttgatttgagcattgtgtgaatttttgaagttctgcctgcgaggaaccggaattccggttgtgcatccggaattccggatggggttctgaaatttcccagaaccggaattccggttgggcaaccggtctaccggttggggaaaattcaggaaccctagttttcctcgattttatgttttttggggtattgccatgctttttatcgatagggaaacttttagttcctagtt

SEQ ID NO: 294355 - DNA, 518 bp, Cannabis indica
tatgtagggatatataaaaaaaaagtaaattatgtattgttgttgcaccgaagtgaagatgtgtaaacaaaaggattggtatgcactacaaccgtgtgttgtaggtgcatcaagggaatttcagcaattcaatcaatcatctcattagaaatttcggtaataactccactatttacgtctatttttttaaaaattatattattacgaattgtttcttaaaaattttatgtatgtggtatatgtatattcaggaaacgttgacgaaggtttcggatgggtggagtagggtggaccgaacaacttccaatacgggtggacggaactacttccgatacggccacccaaatatgccatcctaccgaacctcaacctcccgagtcgacaaggccaccgtggaatgagtgttatcatatttgacacaacggtgcgccagactctcgaacaaaatgatacgcgggaggcaaatgtcagcgttttttacattcttaggtcaaattgcttcctcatgtaataagagt

SEQ ID NO: 294356 - DNA, 597 bp, Cannabis indica
ttaaatatatttatatttttttaaaagtcatagttaattaatatagtttgctgtgttggtagaatttctctagataaattaaaatagtaaaattatcataattactttttttagaaaaatacaaataaaagacggagaggcttaaaatttggcaatagatattttatatataaataatcaatatattaatatatcaattaatatcaatattaatatatatatatatataatggagatgtattaggcggtgacgtagctgttgtgataatttcaacacgcaactgtacgtgtcgtaacaagtagtaaactcaccaagagtgaggtcgatccaacgaagattgtagttaaatacgttaaaattaaactttttcttctatttggttgaataataattaagcaaggattaaaagtgaaaattaaaaagagtgaaagaataaacaattaaacgaatgaggaaattaagagttaataaaaactagggcttcgatttcaattgtttctattgattatggcctaatatgattatctccctattatcaatttatatgcaatagcaggtttaccaaggtaatttatagtcttctcagatatataaat

SEQ ID NO: 294357 - DNA, 712 bp, Cannabis indica
tactctagccatattgatgtgacacatcaatagtattttagccaacacacatttatcagtaatcagtacaactctatgtatactattaccgctatcaatgtaatctaacaggcataaacaacatctacgctaaatatgttattacatatgcatgatattatactaatcttaccttgattctgaatacaggtgtgccggccaacctgagtggaacaacaacccggcaaattacaggctcctaaatcacatcaatcataacatagataagtgacacgctaaatcactttccaaggacatatatttgaaactaaaagtttccctattgatgaatagcatggaaataccacaaacaacacaaaaatggaaaaaactagggttcccaaaaactgccccaacaggtagactggttcccaaccggaattccagttctgaggggtttcctggggaccaactggaattccggttcctacaggtccccctgaactgaaattctggttaagtacaggaaaggttcaaaaattcatatctcactaaaaataaccccaaatcataccaacctttccagacctgctccatatatatcccaaaaaacataatcaaagcaacaaaacgacaatcaaagctcaaaatcaagacttgccattaaactccaagtttgagttccaaaactaataactttgttaaactagtcaacaactactaaaacatgctc

SEQ ID NO: 294358 - DNA, 603 bp, Cannabis indica
aaatacttcaatactttgagatcccgatataaactgaaacctgatctgatccaaactagtaacctcgacccagtcctgacatcgaccccggacccaaaacccgaccttaaccttggttctagacccagacacgaactcggactccatgcttggatcccaaaccctacaaccgaacctagactcggaactagacctaagaccccacgcctagccccaaacctagactcgaactcggccatggaccctgaccccaaatccaaacctagatccaaaccttgacctcagctccaacctgatcctaaccctaacccggacccgaacatgaacctggactagggcccgattttggactctaaccccaaacctcgaactctagtcctagactcgatcatggacccatgactcatacacggacttggacatggaccccgaaccttgaccctaaaaactaatatgaaagacaatgtgcaaagagagagagaaaaaatgatgagagaaaaaataatataagaaaataataaagaaaaaaaatattgttagataaagtggaaaaaaaatattaacaaaagataaattgtttttaaaataaaaaataatatttta

SEQ ID NO: 294359 - DNA, 574 bp, Cannabis indica
cccaaatctagcttcggttttacccacgtaaaaccacacttcatcgtttttggcttcactcactttcttcttccttagtaacagttgatgcacaataaccccactgaatttcaaatcgctggcattccaaaaaacaccaaagggcgtctccttcaccttctgagtcaagttaaaagcttcaaatttagccttgattgatgcaaaatatccgttccctctgtatgttatacgccctggaaagtgctctgacactgggagaataagttctggagccatctgcatttacaaagattaattagactttatcgcataaacatcgcacaaaaatcgcccaaaaatcgcataaagattgccactgtgacatacaatcgcataaacatcgcacataaatcgcacaatattacaaaacaacgaaaaataagatcctgccagttacaatcgcacaaaaatcgcacataaatcgcataatattgttaaaatcgcacaacctaccccaatatgtcatacatcgcacacacatcgcctaatgtcgcctaaagtcgctaaacataccaaacagttataatctatgtaa

SEQ ID NO: 294360 - DNA, 553 bp, Cannabis indica
gttatgtcattttgtgttcctcataataatgtagtccacacactagtaaaaattattactaagtcatttagggatttaaatttctacaaatatttgttcttgattcttatgtacttttgtaaaaaataatctttaattaatgcacaactttagttaaaataaattacaagctataaacgtaaccaaattccgtccatattattatcattaataaatttttaaaatatttattatttgtatctttttttatgataaacatgacaaaattaaagagaataaatatcattataaaggtctgcctgtctaggaagaaatattgtcttaactcttaattgagtgtcaattgatggcaactaggacttaggatatgtttatttcataacccttcttttaagaaaaaagttctacttatagtctattttcttatggaaatttcactttttgtccctaataaaacccttaatatcaaaatttagacctttcactaatttgtacaaattaattccattgattacatgaacttcccattttaccctttttttaaaaaaataaa

SEQ ID NO: 294361 - DNA, 768 bp, Cannabis indica
cttgtgcgaaatgggcatttgtcaattaggtaagcattcagtcatctatcatggacatgcagttgcacatggacaacgtttttattttgggacaaccatggagccattaatccctcctcagggagtaggccatttataggcttaatagaatacaagctctaaatgtgcaagcccttcacgaaggcacaaaatgctactagtagcagcattaggtgtagccgtcggtcctggaaatttgtaccctctaagagcttctctgccagctttggatggtcatgttgcaaccatttctagtagacttcatattgcaggaagcacccaaaatgcgcaaaaaaagtacttgaatgaattgaaccaaaaggaagcttgccaccttgtataattgcctgctcaacgttcaagattgatgaatttgccaatgactttcacagaagatatgccaggcatgtacattttccacacaatgaccctctagcgatagaggctcaagtagaaaacaagagagtttccaaaattcttgtagataatggaagctctgtgaatatcattttcaaaggagccttcaaagccattggtctggtggaagccaatctgctgccatgtccaattcaaatccaaggcttcaatggagacacgctgatccccatgggaaaaatataacttctgatgataataaatggggaagtttccaaaagtaatacaatgtcttctttcaagtacaatacatacgtaatagttgatttccctactttttactaacaccattct

SEQ ID NO: 294362 - DNA, 542 bp, Cannabis indica
ctttgatggattacttttcagagttaaagaaaaaaataaattattatttgattttatggttggaaaaagaaaaaaaaattagtagctttatttattttttttttctctttgttcttattctaagaatattctattagatttagtgtttgaatttcttgtttgttggtggtaagtaaacaggtgattagtaaaaaatttgagtaatttgcggcgaaacccctttatgttttaatttttacaaacttaacctccttatcttttttttttgtgtggcaaaattcccttatgttttagttttaatacacttaacccccttatcttttttttttttgtggcaaaaccccccttatgttttaatttttatacacttaacccttctatattttgttttggtgacaaaacccccctttagtttacttttctttacaaatttaaagttttagttcgatatttctgttaaatactaactggattactattgtatcgactttcgaggtttttatcgttacatatacacaagtgtatacagtggtcatctagtt

SEQ ID NO: 294363 - DNA, 499 bp, Cannabis indica
tgtcttgaacaatctggagataggatgccatttttgaatttttggcctggtatgacccgttgagttggtttacgataagttgagaatctgacatgacttcaatggttttggcattcaactcaatggatagatctagcccagcgatcaacgcctcgtattcagcctcattgttggtaagtttgaagtcacatctgatcgcccgctggataacatctccttgaggggagataaggacgattcctaggccactccccttactattgcttgatccatctactgctagcatccatgtcgagttggtttgctcgtttaagcataataattccttttcagcttgtacctgtccaacacaagaaaagtcagcaataaaatctgccaatacctgtgacttgatggctgtcctcggttgatatgttatgtcgtattcactgagctcaacagcccatttggtcatgcgtccagaaagttccggtttgtgtagaatgctacggagtgggta

SEQ ID NO: 294364 - DNA, 417 bp, Cannabis indica
gaagaaagcatatcagaaggcaaccccgagccggtacaaacaccccagctaagtaacaagaaagataagccgacccggaaactgcatgtggacgggtcggctacagatcaactatctagtgcatgaatcgcccttgtcacacctaggggcaacacatgcacgctgcagtcaaatttggattcaaggcacctaataacgaagccaagtatgaagcttttatcgttgtcctaaaattagcccaggagatgaaatccgaacacattgaaatctgtagtgattcatagctggtggtaactcacgtatctggagaatacaaggattagagggaaaagatgatagcatatctgagcaaaatacatgacctactcgcacaattcaaaagctacggtctcagacaaattccaagggaagaaaaca

SEQ ID NO: 294365 - DNA, 596 bp, Cannabis indica
tttctgagcatttgaatttagatggcgagaagaaggcagaatttgtgaagaaattccatgagagggcccgactcaacatagaaaggaggactgaacaataccttaagcaggctaacaagggtcgtcacaagcaggtttttgaaccaggtgattgggtatggttacacatgaggaaagagagatttccaacacaaaggcgttctaaattgctgcctcgcggagatggtccatttcaagtacttgaacggatcaatgacaatgcctacaaactcgatttgccaggtgaatataatgttagtgctacatttaatgtttctgatttaagtccatttgatacaggtgaagatttgaggacaaatccttctaaagaaggggggaatgatgaggacatcaaggaccaagtatcaagtccaattccagtgggtccagtgactagggcacgagctaagagattcaaggaagagcttaacagcctagtacacaaagtcttaaatcaagaagagaccgtggtcaacacggaaggagaacaaagattggtcatactcatcaaagtggactgaattttgaagcttcattatatgtgtcacgttttattt

SEQ ID NO: 294366 - DNA, 662 bp, Cannabis indica
ccttgatcgtagttcttggtttatacttgatgtcgaattggcttaactccattgcccatttcaacaaccttcctgaggtctctggttttgctaagacttgcctcaaaggatagtttgtcaagacttcgatactgtgagcctggaaataaggtcgcaattttctcgacgatattaccaaggcgaacgccaatttttccatttggggatagcgggtctcagcatccagtaatcgtttactgacataatacaccgggtattgtcgcccttgatcttcgcgtattagtaccgaactaatcgcgtattctgacactgctaagtagatggataggacttcgccggtcatgggctttgataagattggaggttgccccaaatgcgtttttaaggcttgaaaagcctcctcgcatttttcggtccattggaacttcttattgccttttaaaatctgaaaaaactctttgcacttatcagaagatcgcgatataaagcgatttaaggcagcgactttacctgtgaggctttggacctcttttggcttagttggtgatggcatttccaccaacgccctgatcttcgcggggttggcttctattcctcgctggttaaccatgaatccaaggaatttcccggagccaactccaaagacgcactttagagggttt

SEQ ID NO: 294367 - DNA, 451 bp, Cannabis indica
atatataaacataggcagccgattttgtgcccatatatgcaaacacggattggaatccgtgtacggcaggggccccacgtacttttaaatgtttttaatttttgaaatgtaagtggtaaccggttgttgtaggtgtggttaccggttgggagttattttttaattaaaaaataattaggtacggaaaaagtacaaaatggtactgtttgtgttagttagagtacaaaaaggtacatcagtcttcactgttcctggcagttgatggtacgaaaacactgtaggcagtgggtccatgttgtcggattaaggctattttggtattttccttcattcataagatcatatgtatttgtgggatggtaattaagtacattatatagagtaccgtgtacattacttatttctgcgtgatgtttagtaaaattagtgtacataatatcacgtaccgagt

SEQ ID NO: 294368 - DNA, 605 bp, Cannabis indica
aactttgtgttgtttcttgtttttccatgaaattaatgagcttccaaggaaatacagaatccaattgttgatctccttgtattcacacaagcaacccagttagaattaggcttttgacttgattttggaacttaagcagagaagaacaatctatgttgaggagttcatttcacatattgtaatactctttgagcagctaccatgttagtcattcgaggtatccctaagaactgactcaagttgttaaccacaaaggacaggtttgacttggtgatcgtgaggtactacaacatcctaatcatttatctatacaaggttgcatcagcaagagcatcatctttgatgttttggctgagtttcaagttggcttccataggtgtgttcatatgcttgcaacctaagtagcatagatcttctaggacttgaagtgcataaggtctttgggagatgaccttgatctgatctagccactttctagaccaaagaaatatttcaactttcacaagtctttaatttgaatatgctattcaatttgactttcaaagttttaaactcatccaaattaatattgctaacagaatcacatcatcaacatatacaagtaa

SEQ ID NO: 294369 - DNA, 578 bp, Cannabis indica
ctccaactacgagtatggttttaagtttggattatatattggagatagtaaacaaaacattccattccaattgcagaaagccaaggaaactcgattgctttcatcattattgtaccagcgatgattggagatagaacatataaactctatttgtctgttttaattctttgtatccgcaatgttattgaatagcggacacgattattaaggtattggccgaagcttgtggaatgactgaactgaaacacaaggtatttgcattactgaggaataactgatggtaattactggtcctttaaatttagttatattatgtgtgttcttattcaatatttcttcgtgactttatgttcaattttttttttcgtaaagataattgttatttgtgttcataggaatatgaaatggaaagtaaacaattttcattctatttctgttgcattttaaagtattagaatggcattcgaatggaatgttctttccactattttggtggaatgactattctatttttaaaaaaaaagaatgatcattccaatgtatcaattttttttatgcattttaaatttcattccatt

SEQ ID NO: 294370 - DNA, 649 bp, Cannabis indica
actgatatggatgagtttgctctttttttggacaaatttaaactttctcctatggattttattggtaataagtttacttggaaacatggatccacttatgaacatttagattgggcagtgtgttctgactcttgggttgatatgtttcctagtgctattctgcatcatttaggctttttttggttctgatcatagagtattaaaagtagatattaagttagatactttttctattcctattcgttctaagaagagatttcaatttgagaatgtctggttggaaaatgaggaattttatcaaacagttcagcgttcttggttgaatccttcacattctaataattctaattttgctagttacatggataaacaagagtcttgcatttcttctttaaagtcttggaatgtctctactaatagtatgtttaaaaataaaatagttgctcttaataaacgtattgctgaccttcaaaatcatatccctttagaggaaagtcatgtggctgagattaagattttacaatctcagttggatgctttcttgtataaagaggaagtgtattggagacagcgtgctcgtgttaattggcttaatgctggggataaaaatactaagttttttcatagatttgcttctaaaaggaaaaaa

SEQ ID NO: 294371 - DNA, 559 bp, Cannabis indica
caaagatttaaaaagcagcaagaagatggtcaattcagattctttctaaacagctccacatcaacataccattagtggaagctttggagcaaatgcccaactatgtaaagtttttgaaggacattttgacaaagaaaaggaggctaggtgagtttgaaacagtggctttgacggaagggtgtagcgccatgttgaagagcaaaattcctcctaagttgaaagatcccggaagttttacaatcccatgtaccattggcggaagagatgtgggtagagccttatgtgacttgggagctagtattaatttaatgcccatgtctattttcaagaagttgggaattggagaagcaaggccaaccaccgtcactttgcaattggccgatcgttccatggcccatccggaaggaaaaattgaagatgtcttggtgcaagttgataagtttatttttccggccgatttcatcattcttgattatgaggcggatagagaagttcctattattttgggaaggccattccttgctaccgggaggaccttgattgatgtgcaaaaagggga

SEQ ID NO: 294372 - DNA, 572 bp, Cannabis indica
tgtacgttataaaatttatggaaatattattgggtttgtgcctaggttcaatatcaaattttgctcttacaataataacaaaaacatatatatcaactaatttatataagacattttctttacgaagaaaaagaaaaaaatgttcaaacacatcctaaaattctatctttatagactataataataataatacaagagagtaatgacaaaaaaagatttgtattagttagtaaaccctagttaataattttaataaaatgaaataaatctatatgtgttttgacttaattggctattcacacaatatttgttataccaactaaattaaatatcaaaattatagtttaaatgattaataaaagaaacgttgaaaataaatttagtgaaaatatgtgatttttttttgttaaaacacaaataaaaattggtcagatgtattggaaaaatgaataaattcatgagcactacatataatttaaattatctcattcatcatatttttatctaaatatttgtgcttagtatctctatcttaattatattaaaaaaaatatttacaaattactattttc

SEQ ID NO: 294373 - DNA, 599 bp, Cannabis indica
tttatactgtgaacagtaaaaaacacgggaaaacgacctgcttcgtgtgtggggagtcgccggagtcggagataaccaagaaaaaaccattaaatccggcgaagagtttttggtaaatggaagcataatcgaagaacaagaactacagaacattgtccccccaaataacagaggtaaacacaacaaaacccaaaattaatttaattcttaagaaactaaaaaaaaaaaaaacaaccccagatttagatctgaagtttaaaaaaaaacgaaaaacacaaatgtgatattctttaatttatgatgcaaaaagataaatgagggttgttctattgttaatttgacgtttgtaacacaaaatgattcgaaaaaaatagttgataaattactacaattattcatacaaaaaattagggttgttctaatgttgttttgcggttagtaatacaaaaacattcctacatatatgtatcagacaaatagaataataaaaactaataaaaaaatataatgggtagttttatttggttgtttttgtgttgttttattgttgttgtattatttttttgtttgattttttttttttgtttgttttgctattg

SEQ ID NO: 294374 - DNA, 685 bp, Cannabis indica
ttcaaatattgaagtgtggatcctcatggattcttattgaaacattgattgcataaacttcattacaaattaaagacaacgtaaagaaccatttcattccatgataatttattttctaggtaaagctctttggcgatattatgagcaagtttatttgcttccttaggtatataagaaaggcaaactttagggctgtaaaacaaatgtgaactactaagtcttaagagtaattccaacagcttctttattctattttttaaatactttattaaaattctatctttttttaattttacatcatataccaaattctctataattcgtcgacatcatttaaataatacattttgaaataattttataattaaataataataaaaataataaagaatacaaaaataataacttttttttttaaaaaaaaaaagtaagaaaacaaataaataaatacaaaaagaatagttaaacagtgtttatttcactctctctcacttcttagatcgctcccaacaacttttttacactattctttaaaatacctcattaaaactccattttatttttattttacctcattacatttacattacaccatacattaacttctctatatttttctctatatcatttaatattatatttttacatatataatattgatttaaacaaaaatatatataaaaaa

SEQ ID NO: 294375 - DNA, 525 bp, Cannabis indica
tatagggacaggttccgaagggatcctagcaagagatgcgaataccgcaacgacattggccatagtaccaatgaatgcaaaaacttgaggacgacatcgaaaacttaatctgattgggtcatttatatgaatggattaagaatcgactaccccatctccactcggttccagtaggaggcccgttacctcaaggggcgccaaggggtatacccggagcaccaggacccgttgtaccccccggaggagcaatccctcaacaggtccctaggttaccatcaagacctaatgggagagtggtcatgatctccggtgggccccatatgggggaaccaccaaaaaagagttaaagcgctttccctcaccatgaccctctggtcatagggactcccatcgccaataaatttgtggcaagaatatttataatatcccgataagtctaatggtaaataattagggtttatatttatattatgagttaatcaagtaataagtgggagtatgatcctactaatttatttcagcata

SEQ ID NO: 294376 - DNA, 615 bp, Cannabis indica
acttgactcattccattttttttttatatacttgaattaaattgttattgacaattttatatattgatgtaggttggaataaaaaatctaaaaatattggatcaccaaaagttaaataagatgcgtaaggcttatagagattgacagaagcatatatgaagaaaaaagattctccatacttgaaccattcatattggaagaaaaataatttattttgaaacttgattattatgttattatactatgaataaatgtctgtataaatttatttacattaaccaaataaataaaattagaaagttataaatttattattccttttctttctttttttggaaatagaaagatgcaaatcttaagatcgataatttttcttctatggtaatttacttttattatttgatttaacctaaataatattatataatattatttatcaaattaataattcatattttatcatctcacttgggtataaattaattgttagttgtattgggagtttcttttttaaaataaaaattaaaaaagtgaactaagagactatagttatcgtatttataataaatttatataaaggaaaataattataaggaggtgatagtatatgtatgt

SEQ ID NO: 294377 - DNA, 713 bp, Cannabis indica
tttcagactgattgaatcttgtattgaaatctttatggatgatttctcagtttttggttcttccttcgatcattgtttggaaaatttggaaaaagtgctaacaaggtgcgagaagtctaacttggtgttaaactgggagaagtgccactttatggtaacagaaggaattgttcttgggcacaaaatttcaaaggcaggaattgaggtggataaggctaaagtttcaacaatagagaatttgccacctccagtttctgtaaaaggagtgaggagtttcctaggacatgctggcttctaccgcagatttatcaaggacttctccaaaatctcaaaacctttatctagcttacttgtcaatggtgttccatttgagtttggagaagattgtttaaaagctttcaaggttctaaaggagagattgattacagcaccgatagtaacttcaccaaattgggaattgccgtttgagttgatgtgcgacgcaagtgactatgccattggagcggtcttgggtcaaagagttgacagagtattccacacaatctactatgctagtagaactctgaatgatgctcaattaaattacgccactacagagaaagaaatgctggcaatagtgtttgcttgtgacaaattccgaccctacctgattggaaataaggtaattgtctacacagatcattcagcaatcaaatacctatgaccaagaagga

SEQ ID NO: 294378 - DNA, 753 bp, Cannabis indica
agtgtacagtcaatgtccaatatcaatgtcctactttttgaggaatcaaatacccagttcaaaccctccaaagtccaaacgccatcatacagtacaggcacaaatacagatgaatctatcccaaagaaaaacaaacaaacttacatttaaaaataccatactatatcgcacacagtatcgcacaatatcgtacaataatcgctttacacaaatatgatataaaccagttatgatgtcgcacaaaaatcgcacaacaaaggaaagaaatcgcataaagtcgcacaatatcacatagtcaacaaaatcgcataacgatgcacaacatatcgcacacaaatcgccaaacatcattatcgcacataacatcgtataataatcgtacaaagtcgccaaaattaatcatgtcatccctaacctcagatttctcatgaaatcgcacaaaacatcgcatgatgtcgcataaaatcgcaaaaaacaaaaaaacccagaaaaccacagactgttagccacaaactctacctccatttcaaggacacaaaagtcacatattacaactaacaatgttcagatccatgcaattcaacaaaaaactagactatttactaagaaaaacacttacccattgctttgttgagtgaggtggaggttgagggtgaaaatggtggaggtggcagtcggccgggagagggtcgatcggcggcagtgacaaaaagggagtgtgtgtgaagagagagagagagtgcgtgaagagtg

SEQ ID NO: 294379 - DNA, 1144 bp, Cannabis indica
  modified_base (1087)..(1087): a, c, t, g, unknown or other
gtatcaaatcatatcatctaaactttcatttatattaaacttttttattaatatcagataaaaatcttaaacacaacaatcttaataattgaagagaatttttaaaagatttatgatttggtagatataaaaattacaaaaatcctaattaacctaaaaaaaaatcccaatttcttgaattgtctgctgttgccctaggtcaccaaacaatatcatcttcaacctctcttcctcgtatcgtcatcctcccacaacaggtacttctctctccttttccctttcaattacaaaactccaattagctgttacgagtccctaattgattgtatatgaaagattataaatttatggagtattgttcggtttaattttgtgatgaagatgagagtcttcaatttttttaattttggttgctaatttgatctaattagttgaacaattctcatagttgtcaataaaaatgtaatctttcttcttatataaacaaattagggcttttgtgcttcgagcagtgaaatgggaatggaagaggtgggagaaataggatcattacattcccaaatttgggagcaaattgagcttgctgaaaggtaattcaattcaattttctactttctttattttgatttgaacaactcttttgtttgctcttgtcaattgtatataattatatatctatgtatacagctaccttgtttgctccttgtatgaagaagcagcttcattagcttcttctattctgaaccaactttctacaattgtaactgggcatgatgatgatgatggtgttgaacttcatgacatgttagaatcagctggaatggtccttgtccaatccttgaatgagcttggcaggtagctagctacatacatgattttcttttctttttttgctctgctctgcaatttctctgacttgttttgatggatttgcaagcagggtatcagaaattctgaatgaactcaacaatcatttcttcagttggagccattccccttcaagttctcttgctgggtactttcaattttatatcatagcacatcatatctatctggggtgtctatttgtagtttacacgaatcaacncgagagttttcgggtcacaccacacgtaaatatgctgtcgtgttcgtgtttgtcatc

SEQ ID NO: 294380 - DNA, 677 bp, Cannabis indica
aaagaagttctccttaaagcggtagtccaatctattccaacttatgctatgagttgctttcgcttgcctgtgtctttttgcaatcaagttgagtccatgatggctaacttttggtggggactaaatgaaaatggctccaaaatacattggcgatcttggaaacttttatgcaaaaggaaagatgagggtggtatgggattccgatcgtttgtgcattttaaccaagctctccttgccaagcaagcttggcggctgcattcccaaccggattcactccttgataaacttctcaaatgccgatactactccaacaactccttccttgaagcttctcttggacattccccctccttaacttggcaaggcattcattggggtaagaagcttctaattttgggtttaagatggaagattggagaagggtgccgtatactttgtggacaagacccttggatcccggggcactctaccttccttccttttcactataatggaccaataaatggtgttgtctcaaatcttatcaaggataatagggagtgggatcttgaccttcttcaacaatggtttttgcagcccgatgttgaacgcatacttacaataccactgagttttttccggaataatgactcattaatatggcaccatcacacttcgggtctttatacagtccaaac

SEQ ID NO: 294381 - DNA, 600 bp, Cannabis indica
ttcttgaaaattagttattcagatattctttaaaatatttttaagttgaaaatttgttaattttgaatcaacttaaatagggatatttttcaaatcaaggtgattagttccagatactaaattaatatttaattaaattttgaaaaattatttaagttggaaaattttgttattttagaataacttaaattagatattttttagaaatttattttaatatattttatataatttcgaaatttatattaaattataaatggattttcaaaattattatttgaaaattaatttaaagttgaaaataattttttttattaattttggatcaacttaaattaagtaattttcattattaaaataaatgattaattaaaatacattattttaaataatgagctttaatcaaagagatattcgatctccattgttggtcttacaatagttaaatgttttcaatataacctcgagacgctagacttcgtccccctatggatggttattcgttgaacgcatttaacaccgtaagatctcatttgataagtgttttgtaagttttcgtctctattagactctcccctacggtgactactaagagataaa

SEQ ID NO: 294382 - DNA, 590 bp, Cannabis indica
gtgaatagcgatcagcccaattcgtacgtgtttggtagagaaagaagatttatatatacaaggaagagagaagagagtagtataaatacataatcaatcctgaaagtgaaatctatctctagtttgaatctaaatataaatatacaatatttttctaaattatataaaagataaataaaacaatctatctttttttttttatttatttatttatcttttatattttatatagtttttatttattttttaatttttgttaaagatattttatatatagatgtttctttaaataatattttatatagtttttttttattgaagaatatattatatagaattttagaattaagaagcattttaaaaatatgttgcaaatgtggcaatgaagcgtctggattaatgactatatttttagttccaagtctacaatttgaatatagaactttatattttttttaacaaaaaaaaattaaaaaagtcaacagagtttggccatgacgtgtggtattaataatttacatgtatcaaaaaaatttagatatttttacattcaaaaaatataaatttactattttatttactagaaatat

SEQ ID NO: 294383 - DNA, 696 bp, Cannabis indica
ctatatttgatgttcatgtaaaatagtacttattcaataatgtgctaataaaacaataaaacttttgccaaatttgatgtacttattttatttaatgatgtgttaaaatttgtgttaaatttagtacgtaattaatgaatatatttttattttatttatattattatcatttaatattaattaatatatttttaatatattttttaattataatattatcattatttgttgaaaaatatatttaatttattaattattattaataataattactttttattataatttacatcttaatatattatatattagagtgcaattacaaaaatgcctcaaatgcatggtttaaaaatatgctaaatttgacaaggaaaaaaataagtaaatgttgtaaatactattttggaccctgtattttgtaaaagttactgattggaccttttattttgttaaatgacaaaatggaccctatattttccaaaatggtaaaaaataggactctaaactgtttttttttgttcaaaataaatttattaattatccgatctaaaggtattatgacaaaattgtttacattttctatatctatttgtattttcaagttggttatattaaaaaaaaaattaatcaaaaattaaagttcagagtcctatttgtactatttaaaaatataaaatctatttatcatttaacaaa

SEQ ID NO: 294384 - DNA, 883 bp, Cannabis indica
ttttttttttccaaaaaaaaaagaaaaaagatttacatagtttggtagtggacactgttagggctacaatatcagctcatgactcatgagacataaatatgaagtctaggcccatcgttttggtgaatatgaagtctagggcccaacgttttgttgaatatgaaattcaggcccaagagttggacgttgtatttcggtggcccatgatattttttaaaaaataatgacaatattgtcttctttaataacaattttatgtttattaaaaatgaaaaatgacataaaatgttatttttactaaaattttacacttttacatttaaaggttttttaaattttttacggttattttataaagacataagaaataataagaaaaccacataaagttacagaaaaacaaataacaaaataacaatcaaaacaacataaaaaataatatacaaaaataacaaaaaatacaaaaatacaaaaaatgcgattgtgcagaagtttaaatatttttacagttttaaagattttatttacataaaatataggtttttgatgtattttttatgttgtactcttatttttttattattgattttttgttatttgtatattgttttttatgttgttttaatgtttttcttctgttatttttgtgttattttataaacaccgtaaaaatataaaaaaaattctttaaacgtaaaacagtaatttttttttaccaaaaataattgttttatgtaaatttcttattaaattatgtgtgatcggatacttaattatagcaataacaatagagtcggtcctgagttgaaataggccttaaaaaaaaattatacccttatgataagaacaaatggtatttttaaaaattattaaaattaaagat

SEQ ID NO: 294385 - DNA, 532 bp, Cannabis indica
aagtttgattttttcttcaaaaaattgtaatttatttaaattatttattagattgtcaataattttgatttgattttgtttataaataaaataaagtttgaaaatattttttggcgaataatttaatttttttaagtaaaattaatatttgttaattaatttaatattattgtcaagtttttttaataatttttattattttttgaaaattaatagaatattataattgcttaaaaatagaatattataatttttaaaataattttttaatataagagggcacaattttatattagtcaaagttttggggataaaaatgctaatttttaacaataaggataacactaacttaacagaatggacataattatgtaactattatttttaacaagccatatattttaggggacaaaattaaataattctgagtttaagaggaaaaaatgttaattattctctttaggatagattcatgaagataatcattgtgtacaatgttactttttctataacattaggttaagtattaaac

SEQ ID NO: 294386 - DNA, 536 bp, Cannabis indica
aatttagaatttcccaatattacccctttagtgattattatgtggtttcagtgtggaggggcaaaatggtctttttgccccattagtattttgtcttttagtgaatttgttatttggaaattaaatgtttaattatgttttagttggctgaaattaagtgttatttgccttaaaagtcttttttcttctcactttctacacttagtcaaattagagaaaacatttcaaaatcacacactcaaagctctctctctctctctcggcttggtgtgagctgctagggctgggagtttttcttagcatttcaatcacttttcaaccattctaagtgttcttcaaatccttggtaaagtttctaaccttttctttttgtaattttagaaaaaatgtgtgaaatgatgatgaattgcatgctttcttgatatgttgttgctgctgtgtttgtaatataattttagaggtttaatcttgtttaatggagtagaatagagatggttttgatgcatgctagttgtgttgttcaaagttttgaattt

SEQ ID NO: 294387 - DNA, 643 bp, Cannabis indica
aggagaacgaggatgatatcttgccttaagaatgtgagcaaccaaagaaattggctaggtaaggagatgccatgcttgcttggaaagcatggtctgattgaagtgaaccagggatgtgaagccaagactacaatttttcttcgatttgcaaagcattgccaactacgccaatgatttttaggtctgttttgagcatttgtgccccactagaaattggcaatcatagattcaagagacttgtaaatactatctgggagccgaaagccagacatggcataggagaggatagattacattaccgctttgataaggatttcttttccccttttcatgaaaaatttgtgagcctaattggagatgtggttctaagctctctctctgatgtaatttaaagcttgttttttagttcttccgaagcattggggaaggcccagatatttctcaaactcattttgtacaagcatgcccatgtagtttgagataagagtttgatcccttagggcagtgttttgtgagaagtaaagagatgatctattaagataacacattgccctgtggcctgtttgtactgcaggagaatcgtcttttaccacatttgcaacattgggtatacttggcatgacaaaacaaaactactgtcatc

SEQ ID NO: 294388 - DNA, 950 bp, Cannabis indica
ttaccaaagtaatatgtttactaaaatttaatataaaattaaaaaaaaaatatatacaaacatatttataaattttatttatattttataaataatacatatttattaaatatttgattagtattattaatgtttataatgctattattaatctagtatgtttattatgataataaatataatttatttgttaaaataatataataagtttaaaaatagaacacttaactttatttatttatttatttatttaaataaacactttaaataacactcatgtttattagttattgaaaaatgtgttttaaaaaataaacgaaattgtaattaaatgtagtcttatgtataaacactatgtttatattattattgataatatttattaattattaatctaatatatttattatgataatgtttgtgatgagatgagatgttgatacaatgtgtttattaaaatttataaataaaacatccatgtttattactttttttttttttaccgttatatagtttataaataaaaattaagaatatgtttctcataattaataaaatgtacaataaattataaataattttgtatgcacatataatgtaattaagtactattatatacataaaattataaattcccttttttctccctatttgtataggggtttttctattttgggttaatattaccttaaataaacatttatactgccataagcaaaaataaacatttatattgtttattaatttcaaatatactattctcaaagtttcttatttacaaaaatacagtaaataaatccccccagatgcacaaagagatgtgtgacacacatgtggctatgtgggcgagtgagactcacacgcgagtgagggacaaagcatttagacttccctgacactcacaaactgtagcgtcagaacgcagcagtagttgccacgtggcgaattcg

SEQ ID NO: 294389 - DNA, 659 bp, Cannabis indica
ataacaacaaaaaataaagcaaaaaaactactaaatcataaattaatcacaaacacattaaagaccaaaaaaatacactaaaaaatctaaaaactaaatatatatacattcattaagaaactgtacagtgaactataacatgtgaataacaaaaaaaaatacctaaaaaataaactactcagtaaactactcagaaacaaattcccaaacagttggtgtgcacaaaataaaaactaagtaaaacacaagtaaatagaaaggaagactactaaatcataaacacattaaaaacaaagaaactaaatataccatacattaagaaactgtacagtaaaagtaacatttgaataacaatacaaaataccaaaaaaataaactactcagtaaattatagaactcggtaaacaaaaaaactactaaaaaaaccaagaaactatactaacatataaaatattcacttaaaaggctacacatagatctctaaacaacacacaaacaaaatgtgaacaacttagtatactaaacaactctgtatacaaaaaaaacaactaccatataaatgtgcatccacattaacaagaatcaaaatcagaatatagaaacaatatactaaccttcaatttttttggcaacacaataggtgcttcatcacattctga

SEQ ID NO: 294390 - DNA, 872 bp, Cannabis indica
catagactatgaacaatgccatggtgtgactattgattgataacaagctcaatggagctaactttatcaaatggagagagaacattaacattgctctcattggtgaaaatgccttgtttgtgttgactgaagaggctcctgagcatccaggtgagaatgcaaccaaggcagttaaagaaaagttcaagcattggaaaaatgctaacaacaaacctcgataatttatgtcgtctagcatggttgacaccttgaaaacaagatttgcaaacactctcacggctgcagaaatcatgaaccaattaactgaactgttcgggatggcatctattcaagctcgctttgaagcgactaagaatttcatcaatgcatggatgaaacctcatcagagcttgcgtgatcaccttctcgaatgactagttacttccaggaagttgagaatcatggagctgttatagatcaaacaactcaagtgagtttgatcttgaacagtttgactccagcctttctacccttcacttcaaattatgtcatgaacaagttggagctttactttcacgagttgatcaacaaccttcaaaactttgaaaatttgattggaggaccacagaaaggaggagctaaagctcctaaatccgggactgctaatggtgcggctaaggctgaggcaaatattgcctctacttcaaaacctaataacaagaagaagtggaagaatagcaagaaccttttcaagctgtgaaaacagcttaaaagaataaggctgcaaattccaatggaaagccataaggaaaatacttctattgcaatgaaaagggtcactggaaaccccaatgccttaagtttctagcaaagaaacaaggtatttctttcta

SEQ ID NO: 294391 - DNA, 525 bp, Cannabis indica
gatattttgctaacttttaaattttggttatttcttatttaaattaagttataaaatcagaaaaagatctttaattatcattttattttattgaatatttaatttacaaaataacatgaaaatttaaaagatggttagcaaaaaaaatttgaaatgatatttaggttagttgaaacctaatttttcaaaagtttaggtttaattttaaatattaatttatttttttaaattccaaattttttttatttaattattttcgattttttttatttcaaaattaaataaaatcctacttccaactatccaattcaacttgttgcaggagtatgtgttttagcttgtgtgtaagttttacattcttctttcatctgtgtataacctagtaacatgataggatacatccaaatctgtgtgcctgtgtgagcctatatgtttactttatgtttagatgcatatagactgttgctttgtttgacagatccaatgatctgattttacccatggttcaattgtcataggtcaagt

SEQ ID NO: 294392 - DNA, 440 bp, Cannabis indica
aataaaaccataccttaagctttcctttttcaaagattttctatcctgctactaccggagcttagatcactaggtttcgggttgaaaatctaagaaaatggatataggaggaaaatgtttgtcgaaaggagagaatgagggtttcattcgttcgttcgttctgtttcactgataacttaatatatatatataaataagcttaagttaacatatatataaataatattataataatatattaataataaaatataatattaataaaaactttattattaatagttatctttatttctaaggtatttggtcaaattcgagtaaccctaaaataccccgatatttttaaaatcaacttatcctaataatcccatcaatatttctaactaaaactgctgtgatatttttggcctccaatcaggtctttagggtcgccgaaaatg

SEQ ID NO: 294393 - DNA, 634 bp, Cannabis indica
cattattattttgatcttctacatgagtgtgcatcctttcacaacatattagttatcattctctttttcttgtgcatcaaaaaataaaacataaaaaaatctaatttttttaacttaattcttgtttgagcaaaagtcactaggagtacgagacaaccgagtgctttggagtaaatttgagcaaattctaagataattgttccaatattaaattgtgataaattaaactgtcaagtgaaaagcatggctaaggaattaacaaatgagattattataacaaattctaagataaccgagtgctttcggctgtcatcgaagtttttttctctcaagtgagagtgttggaacttccaacttaacttaatgtcaaatcactaaacctactgttcttatgccttttcgaccgttgtggctactttaaccactctgttttttcaaatcaatgcattttgttccataatcttttctcaccttactgcatcctgttccttctttcaagctttttgtcatcaaagtaaagtaaagttttgtcctttctttcttcaagtcatggaggacaacaatggtaacccacgtgaggatatgatggaggatattgttcatgctaatgggtcccttggagttagacgttggc

SEQ ID NO: 294394 - DNA, 927 bp, Cannabis indica
aggccttaaccattgtttccccttaaataaaaacagctatataaataaaattgtcttaaatgtaagagaattggctgtaaataaaaaaaaaaaagataagaaaaatctgggtcaaattcacaacggcctagtcaattcgcggaggaaggcgaggaccaatgcgcgcctccagcatggcgtcaagtttcttcttcttctcccggaatttagcaatcatctccgcgggtttggggtagaagtcgagcttgatgttctggccatttgtagaccaggccatgtagacgccatcgtcgaaacgcttgacgcaccggctgcaagagacgggagaaaggagctcatctttcttagccttcttcaaggcttggtctttgaagtccttgagctccttcagctccacggccaagttggccctagactccaagtctgcctggtgaacttcctctagggacttcaccttggcagccatttcatctaaggcttccctagcctcccgaagctcacgtttggccttggcagtagcctcgccctccgccctcagctcctcctggtgcttggcctccagcctatccctccgaagggcctcatcccggatcatcgcctccgcttgtgcctccctccgcctggcctcttcctcgaacttggccttggcaagggcctcccgtcgctcagcatcctcctggtacgtccgcctttcagcagtcagatcctgaagaatcttcatgactttgtccatgcccccaaattcggacaagacaaagccatggttgattatgtttttggaaaggcggccggccttggcagcaagctggaaaaggatgcagagtgagtaaaatccttaagaaaaataatgaggaaaaagtaaactagaaatacttaccacagtcaaggaagtggctgagatcctgaacttgaaagatggagttcgaa

SEQ ID NO: 294395 - DNA, 610 bp, Cannabis indica
gaataatataaaattatttatcttaaacactaatttaatataaatattaatttttaaaaatatttatataaaatttttagtaatttaaaaataatatataattttattatcatattgtttctcttagaatcaattttagtaactattgtttaattaataatattttaaattttaaaaacgtatatttcataattcaaaattatacattttcactaattttaatgaataatttttttataaaaaaatgtataaataaatgtgtgataattctttcatttaaattcttattaaatttaaaatatattaataaaattaaaattataaaataataaaaaaaatctcacctacatgagattatttatcccaccctgctggataagataaatattcccaaacagatgagattaactggattagtttgttgggttttatgccctaaataaaactctatttcaatgtaatctttatcttttaaatatcaataaagaaacagaagtattttatcacctatttgtgtgtcatttggttcatgttatcatttatatgtttatttgatttataaatctatccaaaatccttatcacatatatattcttgtttattgtgtcgt

SEQ ID NO: 294396 - DNA, 620 bp, Cannabis indica
ttacatacaaattaattaaagcattgttattaggcattagtggtgcttagcactttctccacatgttgagttgcgattggttagcgatacttcctaaaagttattatattaaattatatgagatccgatatttagttggactaatagtgatattaacacataagataataggagaatgctaggcactattgatgccctttaacaattcgatggatgaaaagcaaaaccttctctcactcaaataattgaagcaataagtgccatgagagagaggaaaaataaacatatacgtacaaaggcttacttccatggtctctcttataaccgaataaaaacaataactaatgtttttaattaaaaaaaaaacgcaaatagtgttattttcttcggtaggatataattttattttttaaaaaaagtaatgttatttatttattgtgaaaataataatcttagctgtctactgaacaaagaataaacagattctttgaccatggaataatccattcatcatgatctactatttttctgtaagctataattaatgtccaaaatatttatttaaagtctaaactcaacatccttattaattatattgaacttgtatatatatatatata

SEQ ID NO: 294397 - DNA, 566 bp, Cannabis indica
tttaaggcgcaaaacccaacaaactcccacttgcactaatataaaacaaaaagtgcatttgaaataatctcaacatcttgatatccaaatcaagtgtagtatgtagtgtattctccgtaataggatctgacaggttgtactaaacacaacctttcctccaccattacttttccttaatcacaaaatacttggtattgtgaaattcctctctatatgtctactctcttgggatactggattctttacttttcggcaactacttttgcgttaatcaggaagtaacactagtagttaataaatgttggaacaatgccaaaaatgtatagaactttccttagactgaataagtacctttcctgctactttaacattcagtctctccccgggaaaactaaaaaactcaaaaaaggtttttacacttctccaaaatcactactccacccccagagtaatcaccatctcatcagcagaccttctagcactaaggtaagtctagaaatctgatttggtgtagtctaagagtatcaaatccaccctttacttgactacatgtagttcctcttctt

SEQ ID NO: 294398 - DNA, 543 bp, Cannabis indica
agtgatacgggatgctgcgagtgtagtttggctggtttggtcatttggtgttttaggtgatttttctgttaatgtgggggaactgcttgcaattaggctgggattctcttgcacattaattcagtttcaatatttctattattaatagtaattctacctggttattggttgaattaataattctaacttaaattttatttttagtgtgttttattaaatattaatttttgattagttaatgttggtggtaatttttatagtgctattttgtagtctgtaaatggtgttgtctatataaattaaggctgttcatccgatccaatccgcacttttttggtcaaacaacatccaatccgcactaagtgcggatttcattttttggatccaatccaatccgcacaatagctcaaatccaatccaatccgcaaaagcgcggattggatcggttactttggattggttactttttaatattgaattatttaatatttatgaaaaaatatttttttttcacataactagcaacaaataaacaaattatag

SEQ ID NO: 294399 - DNA, 523 bp, Cannabis indica
cttgctgaattttttcaaaaactgggcagttttgctgtgataatgctacagcattatgagcagcaataaatgttgaccaacttggaatgcttgcttccttatcttttttttcactactttggattgaagtgagctcttgtaattgctcaaaattttccccaagtatctccaactcattaccactcctcaaaatgacattttcactttcttctttctcccttgaattttccatatcaatacccaaagtttcatgggatttatcatgcaactcattcaccaaaagctcaaattggttctccaatttcctcaaggatgaagcttggccttgaattaaggcatcatttttagccatgaactccatcatcaacacttcaagtgagcttgattgagccatttgatgaagatcttcttctatgttgaacttttgtaaatcttctaaaatctcatcatttggtccttgagtgtaagtgtcaaaatttggctccaaattgttgtaattgtcctcccaaacatggtcattgtt

SEQ ID NO: 294400 - DNA, 916 bp, Cannabis indica
cagaggttgtcgctcacgccatcgctaccatgcaaagcacgcgtgccttatgtactgtgccaaacaatccaacggctaggatagggaattcaaatagaacaaccctggaatgacacacatccaaaagcaccactagtatagccagtacaatctaacatcggtaaagatcacatgaaaaatatgccacctaccaatcgtaacgtgggggttcattcctatgaagatccatccaaggtggtccatacaaagggatcggcctataaatacccctgaagacacacaaggcaggggacttcttttttcctccttttggctcttcgcatggaatttgaagactaattctttgaaaaacacattactataactccattattaacttcaaaatattcctactgagcttcctcttcttcaagaggaacacagtaaagaggagtaacaggtcattatttttgtatttgtataaacaatcaccgtccaaagaacctaataaaatagacctgtggcgccaccaactactttcctctcttctcttctctctttccctctccttggcgccatctaccctattcccttttctttttttatttttactattttctctctccttggcgccaaggagatctttggtgccaagaaggcttgaatccccttctcttcctttattttccaatgcaataagataacaaaatacaagtctcatgtcatgaaggggatggactaggtaccaagcagtaaagaagcaaggagcactaaaaggatcaacaaatatccttatgagcgtgctgtgtacccacctgacctctgcacccaacaagtagtagtgacgaagtaattgtacacaagaaccaactgctgggaccatcaagtaccccgacaattacacctttgcaatcacaactctaacatctgagggtta

SEQ ID NO: 294401 - DNA, 1031 bp, Cannabis indica
tgcgattcctgtgcgattttgtttgttaaatgtttatttggctttctttcagatggttgtgcttcaaattttgtatcctcggaattgggaggtcgactactggaaggaaacttgtgagggtaaggtccccacagcggaatggggttggatgaggtcgaagaaacacaagtcggggtgcaagattcgaccgcattcgagacccaagcccaacgggtggcagaatatgttaaaaggtccaaaattattccaccatccccacccaaagaaacagcagacgcctccacatctgcaactgtgcccccagcatctgccactgtgcccccaagctctgctccagccaatgactccgactacctcttgttggctaagagattggagaaggtagaagcgcaacaacttgcgattctcactgcccagactgagatgaaggctgacttcaagagaagtcagaaagagatgaagaatcttatcatggatcaaattgcgaccgtgataagtttgttacagaagcagccttcggagccgacacaaccatcagggccggcacatcaatcatcgccaacacatccatcagccacggcagagccattacagacggtacatccatcaccgccgagagatgatgatgatgatgatgtctacccagaagattggcaacctgacgtatgtgaggttccttctactcctgcaaacgccattgtgatttccctgggtgatacagaatctcaggatgtggaagagttgcaggggccaccagctggggtggacttctgcagggttaggcgaaagcggaagccggttttcttgaaggactacacagctgggaagaagaaacaacgacatgggcccgtggtagtagacacagtgaaaccggcggactcccgactgttaaaatttttccagaagtggatcacttacgctagggacaacgaccgtcctagggatgttcacactggcctagccactcgattctggtttgtcaaactgatggtgctgggagaatggctcgatgatgctgtaagttatttctt

SEQ ID NO: 294402 - DNA, 620 bp, Cannabis indica
atagtaatttaaaaatctaacagatataaatatatttcaaaatatgaaagatcaaatatatatttcatccttatttataaaaaaaaatataaattaaaacaaaatcaaacatctttatacagattaacttttttactttgtaattttgtttttttttttttattttatttattttaatttgttgttagagatataaaacaataataatttgttttattttgttgttagttacgcctaatttttattttttaacaattattaaataatttaatattaaaaagcaaccaatctaaaataactgatccaattcgtacttttgcggattggatttgagttactatgctaattgaatttagggctgaacattttgaacgggtttgacccgaacccgagcaacccgcccgaacccgaactagtgaacccgcaaaaaaaaaatttaaaaaagtttcgggcgggttgggttcaacccggtacccttcgggtgggttggcgggttgagattttaggggtaccgggtttcgggttgaacccgcgaacccgcccgccaacccggtttataaatatattatatatatttcttttattactctttttatatatatatataatatatatataat

SEQ ID NO: 294403 - DNA, 558 bp, Cannabis indica
aagtacaagataattagctagtaaataaaaaaaaaagagaaagaaagaagaaaaatcttggttgtactgggtggaactcagggtggcctagtcgatacgaggaggaaggcgaggaccaatgcgcgcctccagcatggcatcaagcttcttcttcttctcccggaattttgcaatcatctccgcgggtttgggatagaagttaagcttgatattctggtcatttgtagaccaggccatgtaaacgccatcgtcgaaacgcttgacgcaccggctgcaggaagtgggagaaaggagctcatccttctttgccttcttcaaggcttggtctttgaagtccttgagctccttcagctccacggccaggctggccctagactccaagtttgcctggtgaacttcctctaaggacttcaccttggcagccatttcatccaaggcttccctagcctcccgaaactcacgcctggccttagcagcagcttcgccctccgctctcagctcctcctggtgcctagcctccagcctatccctccgaagggcctcctcccgaatcatcgc

SEQ ID NO: 294404 - DNA, 513 bp, Cannabis indica
cccaaatcataccaaatcctccaaacctgctatttagacccccaagaacatttccaagcaacaaaactaagcttcatgcataattacaaaactaccattaaagctccaagctttgagttcaaaactcaagcttggttaaatcccactaacatgcatcaaaacctgttttaatctactcaatcaagcataattaagcctctgaaaacaacaacaatcaactacaacaagcacagcaagtgatttatcattttaccataaaaaccaaagttttgagtctaaagctttacacatggttaaatcccaccaactaacaacaaaaccagcttagatcaccttaaataaaacatatctaaacttcagaaaataacaacaaccatacacagcagctaccatcatcaaaatcagcaagcatgcaaatatttttccttaaaattcaagaacacatcaagaaggttactagaacttataccttagcttgaatcacacctagaattgctgaaaatacttgaattg

SEQ ID NO: 294405 - DNA, 784 bp, Cannabis indica
taatagttatataacttggtaatttacaccaataattatttcctatagctaatcatttagggctcgtttggaacatcgtattaagttatattgtattatattgtatattacattgaattggattacatatcatatttttatataataataagttaaactttaatttatactaaaatattatatatttagatgcctataaaagttaataccacatagttttacataaaaatattgcataaaatacaatttaatataatattatacaatacaatatggtgtaatacaacgtaccaaacaaaccctaaggtggcgtttggttggaggtaatgaaatgaaatggaatggaaaggaaacaatcttcattccattcttttctttagttgcatattaaagtattggaatgtcattctaatgaaatggtctttctaccattttggtggaatgattattccattttaaaatggaaggaaagatcattcccatgcatgatgagaaaaaatttaataatttttttatgtattttaaattttattccattctattcctattcacattcacattcctattcctatgttggacaaatgatgtgtacctttaattctttgatggtatctgcttacaaattacaattgatcaagatggcctcaattataatatcttaatgtgagactttaaatagaaataaaaagatattagttagatatatatgtagagatatttaacatattttacacataataatatatatatatatatatatatgagtaactaaaggtggatatag

SEQ ID NO: 294406 - DNA, 519 bp, Cannabis indica
tctctgaagcttctaccgacaaggacaaagaggctgaatgcgagaagcaacaaaaggatttggactcctaggtcgaaaacgacttcctctataagaattttattcttaacggtttatctgacgatctgtatgactattataattcagataaatcggcaaacgaaatatgggatgctctgcaaaagaaatacgatactgaagaagctagaactaaaaagtacgctgtcagtcgctacctcaagtatcaaatggtggacgacaaacctgtggaagcccaatctcacgagcttcagaaaattgcacatgagatcatctcagaaggtatgactttagatgaacagtttcaagttgctgtattaattgataagctacccccttcctggaaagatttcaaaagtactctcaggcacaaactaaggaattttccttagaaagtttgatcacccgccttcgtatagaggaggaagcaagaaacaagaccagaaagatgaagtgcttgttgtttcaaacaacaacact

SEQ ID NO: 294407 - DNA, 264 bp, Cannabis indica
taatatttggagggaaaaaaataacatatttgtattaaaaagttactaaagtgtcgaataaattcaggttacaaccataattgatgtttatatacgtacctactcaaataaaagtagagatgatttgttttttatatatgataatagtaattataaatgactccttatttaaccccttctctaacgttttccttgatcattgaactactttattagtctctcttcctttttcaaccaatctttctcaattatgatcagattcat

SEQ ID NO: 294408 - DNA, 680 bp, Cannabis indica
atgtaggtttgtttaaaaaaaaacatgtttacttagagttgtattagagttgttattatctaattattaatttaaataacaataataattaaatctaaaacattaattatatttttaaaatatataaactaattttaaatttatttataaaaactatctaatttaattttttgagctaatgatctaactaattataataaaaaaaataagtaaataattttagatattttaaataatataactaataaatttattataaagaatgattaattaattgaattaacatttaattcaaatttaaatttaaatatatatatataataaaaagtaataatatctaattttgttaattcatttaaattaaatttaaatattgaaagcttaatttttttttaaaaaaaataattaattgattgatttaagagtgtaagttttaaccattaactttaaataaaaaaaaataaaaaaaaaaaaatactttaaacccacaatttttattaggtaacaaaatttagatgtatatctatatttatatgcataccactattaactatcattggcattaaactttttagtgacaaccttttagtcacaacaatttttttttttttttttttttgtttgtattaaattgagatttttagtcacaataaaaatgttacttgtgactaaacatagta

SEQ ID NO: 294409 - DNA, 644 bp, Cannabis indica
tgaactcataagagctaaacaggctttagagtttatccctccaggaacggctgccatcaatcaaactcttcaatttcaaaaaccttaatggtgatcgaacctctatcggatacaagatgttgtataagtaaggagataacttgggggtagaagagtccattacaccagtgatcaaggatgacaagcaatcatcatttccctcaacacttgagtcctcagaccccactggaaaattccatgttccatctggacctaccaaggtgaagttagaaggaagaagaattaccccaaataatatatcttagatggagagattcatcccagtgtgtcacttctgtaataggaggggtcatattcgaccaagatggtataagctgcagaactacttgaaagctatgatcaatcgacctaagagtttttaaaaacccaataaaactcgaaaggaaggatctcaatgtgagtggagattgaggtctgatcgtgaattgaatgttgggttggttgctcaagtttcactgtctgcatttctggaaggacaatggtacttggatagtggttgctctcgacacatgactggcaacaagaaattgttagtcaattacaaagaagcaaaggagggagctgtcacttttggtgatggaaat

SEQ ID NO: 294410 - DNA, 552 bp, Cannabis indica
gcaaattatttttaatgtaaaaactatatgcggtacttacttttatggacacctaaaatatacaattattttagtaataaattaaaaatttaacatagtatatataaaaatatgattatataatccaaattcaatataatacaatacaatacaatacgacttaatatgacgtccaaacgagcccaaaatgaatttattttacgaaggaaatttgttacttttgaaaaactactaacaatgaaatgttaatagaaaaaaatattataatcgaattaggaattaatataaatcttagaagagtatatggaaatattttttttattcttcacaaaatcgtattgatgttactatttaagttaagattagtagtaaagataatttaatgagcaaaagtcaatagacaaccaaataaataagaaaattgcctaaactatttgatgattacataatacacaaccttttaagtgactcctcaccttctaaattaatgttatttttatattataagtgttattaggatgatatatacatatatctatatactagcaaaaa

SEQ ID NO: 294411 - DNA, 632 bp, Cannabis indica
agttaagagttattttaaaatccaagacatgaattcttaatttaattattgaatgttaagttctaatttccattatatcaaattgtttctattcttctatgttcaatgttatgattattgttttaatcttgtttagacgaccgctaaattaggttttactttaatctaccgtcatcttaggattactattcacctaatagtctaggattctaagtgtttgtgacaaattgcaatttttatttgtgatgaagaatagaacctaggttaaatgaattatatgcttcattgatttgttgcctagattagtctatctccataaatctcaatgctttatctaagttaaataaattgcatgcttcatggatttactgctttaggtaaaagagttaattattgagcgcttcgccttgattacatacaatagggagattgggataattgactgcttcagcgttatctgcgggattaatagtttgattgaaaactgaaaattacattctttaataggaattaggaatgattgttgagggtggcgaataacctttaactagtttctcatatcgtattctttatttaaatttgttttctttttaatttttattattgctattctgatcatcaaaactcccctt

SEQ ID NO: 294412 - DNA, 496 bp, Cannabis indica
cctcttgtcaagaagaggagtttcttcaacaagaattggattatcttcaacaagttgaatattagaatcaacatagacacatgttgtacccatctaagaataaataaaaaaaagggaaaacatagagtcagtgttaatacagaaattgttgagcaactaaaaaaaaacgataaaacaaccatacctcaacacaaacaacatgacaatccgtaggctcaacattttcagaaactggaacatggttaccagaatcaccaccaattccccctgaagacatctgtttatatatcttaaaaaaaaattagaaaaaatctaaacaatcacaaccattaaacaaccaaaaacaacaaacaatcaatattaccataatctgaactgctttgacaccagactgaacagttgcctcaacatctatttgagtagctccgtcattgaaatcaacaaaattcttgataaagaaaaaataaaagcaaaaaaaaggaaaaaaaaaaaacat

SEQ ID NO: 294413 - DNA, 505 bp, Cannabis indica
tatacattaaacataatcatgaaataaattatgtgaaccatgcaaaataaaagtgatttttgatcttttattaattagtaaatctgattatattgaaatgagttttatttagggcacaaaacccaatatttacatccttctagaataatttctccaccccccgagtaaccaccatctctaataagttatgagttggtctagataacaggtttctaatatacagccctatcatctaacatataggtcactttcatagatactttcttgattgtctcctaatgttccttgtttgattacatcttagatggctcccactcaacagtaggagtctagttaagttcgtacacaagtgtacacttagcctcttactattggttcccatggacatcttgttgttacatattatcttagtctgaaactaataagtttcttctagactaagtcatcaacatagcattatagtataaacattaatgtaaaatacttgtttaagattaagtaatca

SEQ ID NO: 294414 - DNA, 531 bp, Cannabis indica
ataactgaaattggacctagatccagaaccgtaaccggaccaggaccctgactccaaatcagacctagacccgaattgagagccggacccggatccaaacccaaacctggactcgggacccgaacccaaacctgaactcagacccaaacatggaaccagactagggacacaaaaccagggtcgggacctagaaccgcaccccagtctcgctcccgaacccaaactctgaaatgggacctgggacctgaactagaaccagacccaaagctagcaccggacccggacccggacccaaactcgaaccaagaccaggatcagaagaaaggacttagacccagagctgaatccagacgaagatcggtattggaacttgggactcggacccaacctagaccaaaacccaggacgcaaacccacacccggagcctgatctggacctagactgaaatccggacccaaacccaaactcagaccaggactcgaactccgaccctaactcaaacccaaactcgaactcagaatcacaaatgg

SEQ ID NO: 294415 - DNA, 610 bp, Cannabis indica
gacattatcctccatggatgagttccaaccaccattgatcgtctgtaagtgattacaggagcttttaaccgtgattatatgattattttattaatacctaaaaatgataaaaaaaattatattattacgaattaaaattttttctttatatttttgtgaattttaatttttttacgaaaatatgaagtgttattttttaattttttaaacaaagttatttttatgttgccgatacacacaaaaataacattttttttcgactaagaaaaataaacaagtgaaaaatctaataaaaaaaaaaagtatgtttttaagtgcattgttaaatttttttattttatattctaaaaattaaatattaaataaaatttaggtagtttttattatatgattattatttttttggtaatgtatataaatatatatatatatatatttaaaaaaaattatctgatgtgataaattgaaaaattatatatatttagaagaaaatatgtagaattacatgggataagcaattattttatacttcttttaaaaattaaaaaaaaataaaaaaaggtatatatttggtacaaattatataaaaacctataaaatatataaattt

SEQ ID NO: 294416 - DNA, 570 bp, Cannabis indica
aacccaaaaccccaaaccctaaaccctaacctggacacgggcctagaccaatacccataccgagattggaacccaagaccaagacccagacccggatccaaacccaaacctagacctaaactcaggacctaaacgaagaccttaacccagaccagaacctggtctgggatctagaccttgagtgggacccggatcgtgcctccgacccggacacaaatagggacttggactcagatcaagacccggacccaaactcaaacttgaacccatactgggacctagactcagtcccaaactttggagccaaactcgaacctgaacttggaccttgatcgggacctaggatccggacctagatgggggacttgggccctaaacccgaacctggacccagatctggaccagggatcaagacctagatgaggcacttggacttgaaactatgccctaaaaccgggacggagacccaaaacttgaccctagactcgagacacgggacctgaccttggacccaaaactgaggacctgactacagggacacaacaccccgaacccagacccaaacccaaa

SEQ ID NO: 294417 - DNA, 628 bp, Cannabis indica
ttggagttagtatgctcaaagaggctgtggaagattggcacagattcttacaggtaattaattaatacttttattttacattaattttattttgtaggtggcacattaatattacctgaatcagcaaattttaatgattcatagtggttgtttttttttttttttggttcagatcttgcgagtgtatttaagatatttgtgaaaatttctaggttacattgcttttttttaaacaatttctctaatgagacatgtattttcgacctgttttgagattttcaatgtcatcaaatgaaaatatgtattaagattgtccctttcaagagttcatgaggggttatgcttgagcttttttgtaaccaaaatatttatattgtatttatataaagagttaattttgtctttttccctttaaaaaatggtttaaatatttataaaaaattaataaaactcaaagatacattttgataaagtggggaaaaaggtgcccgtttttagtgataataaggttttataaaaattaaaaaaaaattgctatatgtgaaaacggtcttttttaaaaaaacttcttaattggtctaatgacataacattctatatgttaatgaatagaaaaaaaaaaaaagaa

SEQ ID NO: 294418 - DNA, 579 bp, Cannabis indica
gccattaggagaacgtgatcacgcacattctgatggggttccatccgtgcattgatgaatttcttagtcgcgtcaaagcgagactgaatagatgccataccgaatagctcagttaacttcgtcataatttctgcagccgtgtcggtttttgcaaaccttgtttttaaggtgtcaaccatgctggaaagcatgaagtatcgagctttattgttagcattctgccaacgctcgaacttctctttaacagctttagttgcattgtcacccggctgttcaggagacggctcagttaacacaaacagggcactttcacctatgagagcaatattaatgttctcattccattttgggaagttagatccatttagcttattttcagtcaagagtgataacatgggatttgacatggctatacaggatactacaaaataataaatagaaatcaattatggtttaacacaaaatccaattcagaaattattagcacatagcaagtaggaatgacaagagaaaatactaaaaaatacaatcctaaataatttccaaggttttcaacaaactgatatcagtgtcccgttt

SEQ ID NO: 294419 - DNA, 848 bp, Cannabis indica
ttggtttttacttctgtaatgaagtttgtttttttttgaaatgttttcaggttttgaattaattagtttaattaatttgttatattaatttgttttatttctttttttaggttttatttatttttttaattaatacttttatattttaggggaaaaaaaaaagggattaaatctggtgcgtccacgtgtcccgttagtctcactaacggactgagtatgaacggacaaacaactttgcccaccttgggtattttcaccgccaatttttgaggttgaggactaatcggcatcaacctcaagtttttggggacttttgccgcaattatccctaaaaaaaatacacaccaaaatgaccaaacacgtgaatccaaaacactttcacaataaaattacgaaattaccaaacaaaattgattttcgaaaataattatttttcagcaacactgtacataccaatgtttacattgcttttctttctttcattacattcttttgttaaaattgtttcactgtattaggattattaatccttctgttcatgattcaagaatcatggcagtgacaatggtgaaaacagagaatgaaatgcaatcttcaccaactgaatatattgagtattattgcatatattcagagtacaatagaagagtactttatatattgagtacacaccataaccaaaaaaaatgaaaatgcaaatcttcactaactgaaaaaataacaaccacttacagtgatgaactaaactctaacagactctgaaacaaagaccccaaatacacagggtataaaataaactacaaaaacactttacaaaacaaaaaaaaaaaaacaaaaaacaaaaaacg

SEQ ID NO: 294420 - DNA, 468 bp, Cannabis indica
aggttagggatgacatgattaattttggcgacattgtacgatttttgtgcgattgtgtttgcgattttgatgctaggcgatttgtgtgcggtatttttacagcattatgtgattttgttatgtatgttatcttgtgcgacattatgcgatattgtttctttgttgtgcgattattgtgcgacatgatacttgtttatattgtttttgtattaggcgacattgtgcgacattcatagtagcttgtgcgacatagtatgctgatttttttctgtttatttgtttgtatttccttgggacagattcaactgtatttgtgcttgtactgtatgatggcgtttggagtgtggagtcaactgggtatttgattcctcaaaaaagtaagacattgatgtttgacattgactctacactgaaaaaggtgagtgaagttttgcatgaggagttgggaggtggacccattggtgtatg

SEQ ID NO: 294421 - DNA, 750 bp, Cannabis indica
ttactcttggattatcttcattcgggagccacggatccaacactatattaattcgagaaccatcaccaactctgcatctcgccccttttcgaacgatctcttgagtttcataaatacttcgccacacgaaacttggattgctccccaattcagcatctaaaaaggtaccattacggtagtacctagctttaaaaatcttgctgacaaatgagtccggacgactaaacaatctccatccttgtttacaaagcaaactcaagttaaagtcatgcaagttgggaaatcccataccacctttagacttatgtaccatcaatctatcccactttttccaatggattccttcgttgttcttcgacgaacgccaccaaaacttacacatcaattgctccatctcactgtaagtttccacaggtagcaagaacacatttattgcataactagaaagagattgagccacattcaattttggtctactggtaaaaatataaaaaataagattaatttagatttttgccttaaactttgatacatgtcaaattataattttttatttttttaagagtaaaaaaagaaatgttaaaaaaaggagtaatataaaaattagtttagaggaaaaaaaataaagaagagaagttgaaaaaaaataaaaaagaaaaatagagagaaagaagaaaaaaaaagtacaagaaaactacacttaaaaaaaagtacaactaaaattagactaaaaaataataaaaaaaaaag

SEQ ID NO: 294422 - DNA, 624 bp, Cannabis indica
ctcaatcgttcttggtttggtcacactctctctctttctcgatctctctctcctctcaatctctcaatcgtattcttttattttcttttaaaaccaatcctatattcaatctattcctctctgattagaggttagtttttaaaaatttaatttaataaaatacttaagtttatgtgtatttaatttgtaattttctaatttaaaaataagtttattttatttttaaactagttaatatatatttttattttaaatgattttaataagtttaataatttaaatgaaaataaaagtaatgatgtggactaataaaggatgacacgtggacacttacctagaagaaaacggagaggtacctacggaagttccagaagtgtgacggaaggtattttaccgctaaaaatatgacttaggtatttatcagctattcgggataaaacttaagtatttttgccgcaaattactcttttaataatgagagaatgtcaaagtttaaatatggtaattagcctaattaaacattcatatttttataagtaaaaagaaagaaagaaaagaagtgtctgcgatagccgcagctgcacaaaaagggacagagagtgagctaagcataaaggcaaagag

SEQ ID NO: 294423 - DNA, 975 bp, Cannabis indica
aaggagagagagagagagagagagagcttgtagattttctaattttctaagttttgaaatttttgaataaatgagagtgaaatgcaaataacaaaccttcatttcaagccaaaaataataaattaaaataacaatttaatttccatttaaaagtacacaaaaagacaaaaagtcattggggcaaaaagaccattttgcccctccaccataaaatcacataaatcatactaaaggggtatttttgggacattctaaattcccggccattcccgacattcccaatgtctaaaacccgtccccaaaatactaacatactaagttgtgatttctactgagccaaacgccgcgttccaaaataccggacaccggaaatgcgaaatataaaagctactgataacatactcatgcatatctgaattccataaatatccataataaattatttaaatggctataaataatttcatgattaaacataaacaactgctaatttccaaattaactaagcgggctttacacaataagattataacaatggttaaatgagatagtatattggtatcgtgaaacatacaatatgctctatataagtctgagagtgcaattctaagttctaagagtggattcaacgaagaattaataagtaggaatttacttggtaaatttggttcacttattggaagcttcagcatatagatccatggtccccattctagttgagatgatattgacttgtagactcagttaattgattttaattaaccaattagaattctaaattaaacaatgtcttatttataaattttcactaagcaagagcttaatagagaaaaagaaattttagggtttatttgataattaagagattttgtaaggtctaattaataaattagttaaatcattaatcatatttctcaatcatgttaaaaaatttatcatataatttttttgaaacaatttttttcctatcattag

SEQ ID NO: 294424 - DNA, 650 bp, Cannabis indica
gttgaagagtttgattgatggcagccgttcctggagggataaactctaaagcctgtttagctcttatgagttcagctgaaagcttgtagatctcattgtccttctcatcaagaagtttgttgagattcttaacagtgtcctccagcttgactttttcagactctatctgctccttggcactattcagacctctaatctgcttggtcatatattcccattgagcaaacatctcttcatatgcattttgtcttccattactgtcgacttcagacacagtggagactccatcatcctcagattcaacagactgatgactttgagccatgaaagccactacctgtttatcctcattagaacttttgcttgcaatagaatctttttcttcgtcactatcgctccaggtggcaacaagggctttcttctttttgagagtgttggcacactcggcctgaatgtgtccgaacccatcacattctctacactgaatgcccatgctcttattgtcactgggttgctgaccatgccagaagttcccaagaggatttcttttgggaacattttcctaccctcagaacacagtttcttgtacttctttttcaagaattttgcatagttcttggtcagcaaatctacagcttcatctgagaaac

SEQ ID NO: 294425 - DNA, 698 bp, Cannabis indica
gggtcgctgttaggaaggggatcgctggggttgggggtcactgtgaggaagggggtcactggggtttctgggctgtgaggaagggggtcgatgggtacgatttgggcgaatggggtttggtagctgctggtgaaggtggttcgtcatggtggctgggggtttgttgatctggggctgggcggagatggagggtcgaggttagggggttctgtacgagaagaaagagaaaggagaaagagaaagaaaagaagaaaaaaaaaagaaaaaaaatattttttttaaaaaattttataaattgtttttttttaatttttaaattatttttagtatatttaaaattaaaattacgtggaccactaaaaatttaccacgtgtacaagtgtgtacacgtggacagtccaccgtgacacttaatggtaatttttagacggaggtgtgtagagcaaaacagaaccaagatttaggtagtttagccgccaaaaattcggtttttgtggttaagtgttacaaaccgtaaagttcaggtggtttagccgccaatatcaaaaaaaaaaaaaaaaataacatactaagaaaatatttatttgctataatactttctacactatagtaaataataatgattggattgatgaaagtggcaaagtatagcttatttatagtttggatatagaaaaccacactacttctaaacaatg

SEQ ID NO: 294426 - DNA, 639 bp, Cannabis indica
agtactctttttatttagggcactactatggatgaggatttataattggtttaatgattctataacttttattaaattaaaatacataaaattcaatattaaattacattaataacaatattatacacgaataccacttaatatttatttattattattatttttaattttatttacattaaataaaattttattataagcatatcttattttattaatttttattttatgtaaaatatatgtttttaatttatactagacttttttttttattttttcttccttgtcataaaagagtatacctgtaaaataaatataaaatatattttaaatattaagataaaaaaaaattataaaattttatgtaaaaaaatttatacatgatttaagaaaattaaaataaaattaactattattattaaaagaaaataaatgtgaaaaaaaattctaaaaaaaaatattaaaatgtaatttttaaaaattaatttaagttaattattattatttttatttttacaaaatgtgcaaagtactcttttaaacttttagataggtctcctgtattaccgttggctccctccttcgaatattcaatttcccgcttacccgtttttttttttttatttttattattatata

SEQ ID NO: 294427 - DNA, 620 bp, Cannabis indica
agaaagatataaaaaagaaaaaaaatgtaaataaagatagttagttgggtgtaaggcttaaagatattgaagttggctcaactagaatgaagaaagatagccaaatggtcttgaaagcaaagttatggtcttagctcaagtgggtccttttgggaatttcttttactataagattgcagggttgttatccttttcatcattattatcattttttcaatggtcttctgctacactaaaaagagaaacctgcttttttggactactaaataggagaaagaaataataagaaaaaaggtatggctgctttttggggtggttgccctctgccaggttggtttaatttttttatgttctttcattttgcagtgaaaaataatagtactttctttacccacaatgatggagttgagagtaaattattgtaccatgccaaaacagctgataaatttgaatctctgactgttaaaaaaaaatgctaatgtttcaaaattggatatatatatatatatagggatatgattttgtcccgttattgtactttcacggattgtaattcgtgatatacggcagccgtcagatgagagagttatttgattttgtaaagtcctttttggcaagtt

SEQ ID NO: 294428 - DNA, 683 bp, Cannabis indica
tagggttaataccattttaaattatgtgttttgcaaaaattatcgattggaccatctgttttgtaaatgacaaatcagaccatgtattttctaaaattgtacaaaatagtatcctgaactcaatttttaataattttttttaaaatataatcaacttgaagataatttttagcacgaataaatgcagaaaatgtatccagttttgtcgtaacaactctagatcgggttattattaacttttatgttgacaaaaaatcaattcagggtaatattttgtattattttagaaaatataaggttcaatttgccatttaacaaaacaaatggtcttatcgataatttttacaaaatacatggtccaaaatagtatttgtccttattgttatgattattattattatcatcatcaaaatataagaatttttaatgtgtcgtgcttttggactagtctatttgtgcttacttatcatgccttcggtcttgtcgtgttgtgcttaaacttattttttctcgtctcgtgtcgcgacaatttacaacatcgtgttgtgttgtattgtgcctaaacttatatttttttgtgtctagttgggctcattccgatttcgtaccatgttgaaaagcccaacttgtatttacattactagttccaactagtgttgtaaatagtgggccgtaattatttt

SEQ ID NO: 294429 - DNA, 682 bp, Cannabis indica
ctgtctaaacatcctatagaacaattctaaagcatcaatacagcccagaaagcacagaattaaaaatcaccatgtgagctccaaactttgagttcaaactcaaacttggctaaagctcacttacaagcctcaaaactagcttagaactacataatcaagcataaaaacactgcagaaaacaaaccctaattcatgcaataactacagccaccaaatcctcaattttcactttgaaaaccatagctttttaacaagaaaattatccaactaaagcaagaacaactagcatgcatttcaacctaactaaacatatttaattcaacattttaaacatagaaacaacaacaacaactagcagcagcaacatcatcaaaatcatccatgcattactcatttttttcatcatttttcaagaagacaaaagtaaagaagttagacaagaattacctcaactagaatcactctaacttgctgaaaatcacttgaaattgaagaggaaaatccacttttcttgctgcctcaaatggccgaaaaagagagaggaaaagagagagagttttccaacttttttctaattttctaactttgtaatttttaaactttggaaaatgaaattaaatgcatataaaccatttacttcagccaacaaaacataatacaacacatataattaaccaaataa

SEQ ID NO: 294430 - DNA, 758 bp, Cannabis indica
aacatgcaaattgaaggttcaggttctattaattttaaaatgtttgatggcattattagaaccttaaccaatgttagatatgttcctgatttatctagaaacttaatttctattagtgtacttgatgatcttggtgttgttagcaaaattgaggcaggtacaataaagttggcaaaaggttctatgactatcatcaaaggacacaaaaaatggtctatactacttgcaaggaagccccgtagcttgctgccacaacaccaaggagcatgtgacggaagacactaaggctatcctatggcataggaggttgggacacattagtgaaagagggctacaacttatgagtgaacaaaagctacttggtaaggacaaggtaaccaaggtagatttttgtgaattttgtgtactaggaaagcatcatagacttaaatttcaaactagcacacacaaatcacaaggtatcttagattatgttcattcggatttgtggggtcctgagaaaaccctaacttttgggggtagtgcctatttcttgtctattgttgatgattattctaggaaggttggtttatctgttaaagcataaaaatgaggcttttcaaaaatttgtacattggaaattacttgttgaaaacctaactaaccggaaattgaaaaccctaagaacagataatggcctagaattttgtaatgatgagtttacaggttactgtcaagacaatggaatccaaaggcataggacactgagaaaaactcct

SEQ ID NO: 294431 - DNA, 527 bp, Cannabis indica
ttggaaccaaaaaaagaagttggtcgggactggaactaggacttggactttgaatcataattgaaattggacctagatcgagaaccgtaaccggaccaagacccggactccaaatcagacctacacatgcattaggagccggaaccggatcccaaccaaaacatggactgaggacccgaacccgaacctgaactcaggcccaaacatagcaccaaaatagggacacagaactatggttgggacctagaaccgcaccctagtctcgatcctgaacccaaactcagaatagggacctgggaccttaagcagaacaagaccgagacccgtgacagttatccagatcttgactcgggatttgggtaacagggcctagaacaaaccaatagtcggtgtctagatatgggactcagactaggaccagaacccagacgaagaaccaaacccgaacccaaacctagacctgggacccaaaattagaacctgaacaagaatcgccgagccaggaccctagaacaagactaggaccg

SEQ ID NO: 294432 - DNA, 669 bp, Cannabis indica
gacccgatccaaaacacagacttggaccttgatagggatccggatacgaacctggactcggaccaagacctagactgggatcgaaatgctggacctagctctggaccgagaccctgacccagaccaaaacttgatcccgcactcgagacctaaacttggacgtggacccgaacctaaacctagacctggctccagacctgacacaaacctggacacagactcggacctgaactcaaacccacacctagaattagacccaaagctagacccggacccgaacccagaccaggatcagaaccaactacttagacccagaactcaatccagactcagatcgatattggaacttgggacttggaccgaacctagaccaagacccaggaggcgaacccacacccggagcttgatctggacctagactgaaatccgacccgaacaaaaactcagaccaggactcgaactccgacccgaactcaaacccaaactcgaactcagaatcgcaaatggaactagaaccgaacaaggactaggacaaggagcaggacctaaacccaaacccgaaccttgatcaaaacccagatagagacctaaacccgaaccgagactatgactcgaacccaaacctagaacgagacccaaacccacacaataaccgggacctggacccag

SEQ ID NO: 294433 - DNA, 668 bp, Cannabis indica
caattgtgtacatagtgaaagaaattaagtgtatgatgcattacagattgtatagcactaaaggaaaaaatatgaactccttttaacaactactaattactcaaatcttaaattgagtaaaaggagttgtttttttaggtcttctttttagtctttactgatttgtttgtttgtattctgttcaattgatttttcttgataaaaaaaggtaggtgaacataattaaattattaaagcactagtattgtccaacactacctaaataaattacattttagtttaaaagctattataaaaaacagctaaactctacctcatagcagtctcataatataagtatatgacagttggtcaaggcaccaaactctagcggaaagaaaaataaagagctaacttagtaagagaataagccacaaaattagctaatacattatgatgcacaatccaaatattagttgattccttgcacaagtgtgatatgtcttctaggacaagcctcacagtgttattgatgacatcgaccactataagactaatccgtttttactttttaggatcacagaaagatatcattgtcgaacagcaaaggcttctgccataatgggcagggtatgtaggcctaaggcgatttaaattttagggtatcatcacttttagaaatatatata

SEQ ID NO: 294434 - DNA, 666 bp, Cannabis indica
aaccctagtgcaggtacaaaagacactgaaaatgacaggtaacactgcaaatgaaggaactggatctattcaggtggaacaaacagtgaacacacctgaacagaaccagggagatcaggttcaggtggaacctggggaccaggttcaggtggaacctgatgatgataatactggccttattgatgaagggactcaagaagacttgggggattaccaattggtcagggacagaggtagaagggtgccaagaccaaatcctaagtacagctttaatatatgggatgaagacattgcatatgcctttatgagtgagttggaaatggtcaataatgaacctcaatcatatgaagaggccattaaaggaccaaattccagaaaatggaaaggtgcaatggatgaagagatggaatctcttaagaagaacagaacctggattgtggtgcctaaacctaaagataagagcatagtggactgtaaatggctattcaaggagaaagaaggcagatctaagaatgaacctataagatataaggccaggttagtggccaaagggtttacacagaaagagggtatagattttaatgaagtatttgcaccagttgcaaaatacaacgactataaggataatgctaaagtctagactactcaaattcaacctagaaattg

SEQ ID NO: 294435 - DNA, 524 bp, Cannabis indica
attattttatttttcttattaagctttttgcttcttagtaataatggtagagcaaatcatatgaacttatgtttaattagatagaacgactaatgatcttagcttcaataagtgaacttatactacactatgtgctttttttaaacataattttttaatatttgtttaaacataattgataaagaaagatacatgattataacctacagattttgacaggagttacgtgcctatgacacgtcctccatgactagtatatatatacatatatatatatatatatatttgtcttgtattaaatatagcttatttagaggcatactaaaaatcatgccttttgaactgaacgcaacaccgatcacccatcttaatgaaagaaaagagatggaaagctatctaatagaaattgttggcttaatattattttatattaaaaataatcgttaaaattaatacttttaaatcaataaattaattattttattttttgaaaaaagaatagttttaaatatttaaatttaatt

SEQ ID NO: 294436 - DNA, 710 bp, Cannabis indica
gatacgttgtatcctaggtggcttgatgtacatgacattccaattttacactaaaataccccttttatttttgtacctcacgtgaaatgaactttgatccattacactcattgtgccattgttatatcgttagacacttccttccgtagactgtttgtgaaaggagggaaaaggaataatagcaggagtgttggaggttaggcacgcagacacgaacaggtgcgggtgcggacgggcatacaggcgcagacagtgggcagacaacgagcgcgcgagcagacgacgggcggtgcacgggcacacatgcagacagtagacagtgggcgacgcgcgggcagacgacgggtgtgtgggaagatggcgagcgacgcgcgggtatgcaggtagacggcaattgtgcaggcaaacggcaggcgtacaggcagacggcacgcggtgcacgggcacgaaggcaaatggcagtcgtgcaggtggacgacgggaaacgtgcaggcacacgaccggacagtgggtgtgtgggcgagcggcgtgcgggcacacgggcaaatgatgggcgtgggggtagatggcagatgcacaggcgaacagcgggcgatgcgcgggcatgcaggcggacaacaaacgacagacgacgtgcatgttcgaattatttaacctggatcttagatctactcacaagtatgtttattaacatcctaaatattaacttt

SEQ ID NO: 294437 - DNA, 567 bp, Cannabis indica
gaatttctaaggtttttttatgtttgtttttgtgttgaatctgttttagagatagagtatttgttgttatttttagtgtttgttttgggttttttcattttcatgcattttagtattggaggttgcttataaaatataaccggttattttttgtgcaacatatttgaatttttaggttaatagtattatttgtttttaatttttatgttttttttttttttgtattttgaatttttgtttttttattttttgttctgtttttttaaattgattttttaatagtttttttcattggttagagtattttagtgggtgtggtaactgttttaccacttttttagccacgatgtggcagttttttttttttttttttttttttgttgtgtgttttatgtgggttggcagttacaatttatttgttatatatatttggtgttggttttgtaatgtgcacttattaacttattttgttttctctgtattctttgtttggttttaggatttattcaatggataagagtcattattaagaaaagaaaaaggggtgatgtaactaaggtatgtttt

SEQ ID NO: 294438 - DNA, 670 bp, Cannabis indica
actggtgcagagcaccaagaaccaaagaaaacagagtgaaattgaattgagagtaaaaatgcagtagttacttgcatcctctcatgaacaaagcctttatttataggtgctagaaagttgttacagtataactgaaataacagaaaaagacagctaaccaacataacagaaatactactgtacactaactacaatgactgttaacagaaataatcagttagcttatactcttttcctctatttttttatttttttctaaaaattttttataaaatatttttttttttgagaaaagtcatatttttgttaacttgtaccttaaaaattataaaaatgaaaattccacggaaaaaaatttggatttttatattacattaactattttttttttctataagagtttatatgtgcatttgtaaatattttggactcggaattttggtggactctaaacccttgtttaaaatcaaacctgaatttatattacacatagtttataaatttgaataaaactgacttatggattggattggaaggatcggttgttttaactttgtttatttaagactagggaactaagccgcgctttgcgcggtattacccaatttttgtaatatctttatattttgaaaattttatattaattaagtgatataatataaaatataat

SEQ ID NO: 294439 - DNA, 610 bp, Cannabis indica
agtacaagtgattctacttgaggtaatttttttcttctctgttttcaaacatgaattattggctccatttgattttgctctgttttatatttttttataggctttggcgttttgcaagtgtttgaaaagaatttgagtcaagtgggaatttcaatctcgattcatcggaggtatatatatattttttttatataattactttattatattacatataatttatagaagagtttgaatatcttatatattcatccatagtgaagtaggttctgcgaaatttgtgtgctgcggtgatataaggatgataaattgtgtgttatctgattatttatagttaaaattgacagatggttaggttaataaaatagggaaaatgctgcccgatttttcgtagatatgtttatcatatttttaaagcaattgcatggattaattgatagatatgagaatatggtgttaatgtaggttaaaatagaatgtctggtcaaatcgattctaattttgaggatgatgttgattttgtgccatcaactacaaatgaagtacaatctgttagcaatacagtagatgaaactcagaatcagagaaaaagaacttctcgtgcatggga

SEQ ID NO: 294440 - DNA, 843 bp, Cannabis indica
cgtagccggccgtaacaccctttgactagttgtttccacttctcaatttgctattataaatataaatttgctatttatatttcaaagcaagttgttggcttgattaattaattattttgcttgatatacttgaatgcttggtcctatctaaattagcgacttgaccctttattaagttttcaaactgaaattacacatatattccatttcccacttgtgcatgtaagctttggtactataattcggttaatgtgttcattgtttaaatattatacgttgctaaaaaatatatataaaaatttcaattacaaaaattctgttatgtattttggtaaaattgtttttcatgcttaatttgaaattgaaacaaattgagaatgacttctatgaagcagtcttggatttcttccactcaggacgtatgcacaaaggtgtcaatgctaccaatattgtccttattcctaaggttcagaaccctaagagaccgagccagtatcgaccaatctctctctgaaatgtggtttataaggtaatatcaaagattattgctaacagaatcaagccagtgttacctagactcatctgccctactcaagccgcctttgtgcctgggaaggaatattcaagataataatgtgattgcccaggaaattatccactcgtttaataggaagagaggaagagaaggtctgtttgctattaagattgacctcatgaaagcttatgataagatgagttggagatttattgatcatgttatttgattgctttggggtgccatcggaatttcggaattgggtttcccaatgtatatctaccaccaccctcaacatttgcattaat

SEQ ID NO: 294441 - DNA, 464 bp, Cannabis indica
gccttagcgttattcgagcttccgggagcatatagagttccatgcgccttctccgggggctacgtcctggacgctaccttatggcatcaagacttagcaaatattgtaaattgcttgatccacgtgtccttatctggttggtccacgtatattgggcgaaattaggggcaacagtatgtaagactatggaaaatctgcatcaaagaagaagaaaagaagatcaagattcagatcttgattatgctttgctacagaaaggaatcaagggctagagatctgaatgaaaggagtcatattattccgctgcacccactgtatggttttctaaactttatatgtgtttattttcattgttttataattcatattaggatgttaatcaaacatacttggtagtaaatctagatactggtaaaatatttccaacaactggcacagagccatggcaatgatttactttcatg

SEQ ID NO: 294442 - DNA, 658 bp, Cannabis indica
atagttgatgtaagataattttactaattatattatgattatattattgattatattgattattttagaattaaatatgttaaatattttgtactcttttagctataattattgttgaatagaaaataaattaatatacaaatgcaaaaataaaaataattaattaaaattataaaaagttgtaacgtaactaagtaagtaaaattataagtttagagttagctttagagtattgttagttagatctaattattaatatttaaattattaattatgttgtagttttcaagaatttaattttaattatttagttaaatcaattactataaattatatctaaaaggggaattaccttatattacttattttttttttcaaatttacgatttgggtttctaaagtggttgcagcactagttgcaatagggggtttctgtaggattttttttgttgcaattttaggttgcagtgctagttgcaataggaatttctatgcagaatttcgtaaaaataacaaaaaaaaaaaaaaaaaaactattttgaaagtgtaaaaaatgaaaaaagtccctaaaataaaaaggacaatagctattgtattagactattagtttcaatatatataaagggttaatttcacaactgcacaaaaacaacaaaaa

SEQ ID NO: 294443 - DNA, 375 bp, Cannabis indica
agatcctggtaaaataatatccaacaagaataaccaatatagtagctactaactgttttggagtccaatttattttcatgtggcctataaggccttgcctcagctggacatccccaaatgtggaaatgctttagactaggctttcgacctgtccaaagctcataaggtgtttttgcaactgctttacttggtactctattcagaatgtaagctgctgtctttaatgcttctccccagagggactcaagtaaggtagaatgagcgatcatgctccttaccatatccttaagagtcctatttcgtctctcagcaacaccattcatgctagatgatccttgcatggtgtactgtgggacaataccacattccactagg

SEQ ID NO: 294444 - DNA, 557 bp, Cannabis indica
aataaatccaattatgccattaaagctcaaagctttgaactcaacattcaaagttgcataaaacctaatccaatcaaccaaaccagcatctaggaactaaaatcaactcaaaaggatcctaaaattcgaaccctaagcatatgaaaacctaacagccactaaacctaaaaatctcatactccatcatgcatgaatttcaagaaacaaagagggaaatgactaaagcttaccttggtttgatttctctttgaattccttgatgaaaacacagaattccagccaccaaatccctttgcttctgctggtttcgaagagagagagggaaggaaaagagagctttcttgattttttggtatttttctaatttcctttctttcttttttcttaactaagtaaatgctttacttaactcattttggctgaaaaaggaatgctaggtgtcaactaaagggacagccacctattccactcaataacaaatgactagaatgccccttaacttaaactagggtatttttttgaaattaggggtaaaatggtcaatttccataaccccg

SEQ ID NO: 294445 - DNA, 535 bp, Cannabis indica
acacggcagttagggttatggtcaggggtatgggcgtctgatcataacccgagatttatgtatgattatgatttatgcttttcttactgagtctgtcgactcacagtgctatgtttatgtgtaggtaagggcaaggccaaggctgaggaaccgtgagagcgagccgatgaagattgtacatggtcggggcggttaggcttggagcgtacgatcctcgggacagcagtgctttttgtaattagtcgctaggggacaagtattttgtattagacagtaaacttttgtaaagtatttttaatcgggatcccgagtatttttgtataaaatattttataagtttaattaaaaagcaaaaatttcaattaatcacgatttaccataaacctcgttgattagcaacgagctgcacaagttggtttaaaaaattacgtaatacgcctatgctagttagggtgttacagtattctgaactggattccaatgaaaaagaataaagtgtgggattatgtagatgcagccgatgattatcatccaa

SEQ ID NO: 294446 - DNA, 565 bp, Cannabis indica
gttacaaaatagacttttaactcattagacattacatgagctttgaccatattattttggacttggaatacatatattggatattttgataatatacaaaatacattagattttattaaattgtaattacgttatttggagacattataaaatttaatagttttattataaaaaaacataaaaaataacattaacaatgttattattaaaaaattataataatattaaaatgtaatattttttaatatataacataataataatgtaattaaaaattatatgattatattttaaaatgttattaaatgaatataacataagagaaataataatattaaaaaatagttattattaagaaattataacaatattaaaatgtaatatttttttatatgtaacataataataatgtaattaaaacctatacgattacaatttaaaaatgctattaataaatgtagcataatgaactataacactaaattaatattaactattataatatagaacactaaaataatattataatatgctatttaataacatgtaaaaaatgtaattaaat

SEQ ID NO: 294447 - DNA, 753 bp, Cannabis indica
gtaggatctgattcatgtcatatgtaacagtggtgggaaccgattgtacaacctgatctaatgctgaagcatctgtacctgatgtcgtgaacagttgttcaaaaaaagagcaaataacttctgtcatttcaatcttcgagctgactgttacacctgcagaattttgtagcgctttgattgtgttattcgactttctggatgaagttaatgtatggttaatccaaaaaaaaaagtttaaggtatattatatataaaaattaaataattttgaaaaatttactgtcaaacctattggtttttttttttttttagaaagaaatgatttcaataattaaggaatcagtgttaggagtaactcaagaaatttataacaaacatctaaattagttagtgcataattatactatgaaatgggataacaagtacaaacgagcagaatctaattgtgaattctttattttaagaatttgtatgctcaaaatataataaaattaaatgttatattatttgtgccaaactttgtgaattaaaggtacaaattagctaattcttgaaatattttcttctttcattgttgattatacattttatttactttcttttactattttattctcaaagtagaactacaaactgatatgattactttatcatttttttattaatgttttatgtttatttttatgtagaactttactactaccatttatgttttcttaaataattttatgtagaactttgctactactacac

SEQ ID NO: 294448 - DNA, 280 bp, Cannabis indica
gtagaaattcggccctttcaggacatgagtatgtaatggaagtgttgcatggtcacgagagtaggtgttatgatttattcagaatggataaggacgtcttcaaactattttgggtgttactaaaaagaaaaaaatttattgaagaactctcgctatctttctgttgaggagcaagttgctatgttcttatatgtcattggacataatgaacgacatcgtgtattgctgaacgatttcaacactccacctcaactacatctgaatactttaggaaagtatt

SEQ ID NO: 294449 - DNA, 726 bp, Cannabis indica
aaaaaagtaatttaatttaatcttcacaatttttttaccaacagctataaatagtcatttaaagtaattttttctaacatttgtaaaccgtcatttaaagtgactttttccaacagttataaatcgtcttttaaagtcttacatttttatgacgcccacatagccaacagttttaggaaccgttggaaaatgatatataagacagttataaatcgttgaaaaaagccacttttgtagtagtgttcctctcaatgtgtttactcctcttctggcttcgaggctctttaatgttggctatagcaccagtgttgtcactaagtaacactagtgttttttccattcctagaacaacaccaagttctatgaagaactttcttagccagactaattctttagcagcctcaacgacaactatgtatttgacctccatggtagagtcagatattgtgaattgcttgacattttccaatcaactgctccacccgcaagagtgaatatcatccgaggtgtagacttcctgtcatcaagaaaagcttggaaatctaagttggtatagcctagaggatttaaagcaccactctgtaagctaacacattatcctttgtcctcttttaagtattttagaatatgtctaactgtgtccaatattcctttccgtggtttgactgagcctgctcacattcccgctacatataaatgtttggtctagtgcatagcatagcatac

SEQ ID NO: 294450 - DNA, 1005 bp, Cannabis indica
gtcgcaacatactttactcgaaagaaaacattgggatatgattcaacactatagacctctacctgtttgtaaatacggtgtaatgaaggttgttatccatgtttttgaacaagagacacatgtgcattcaacgtctgtaggacaatttccgggcctattctcacggctgaaatgaacggtgatccgacccaataacgaaaagttcaaattcagttaagacttgactgagagtaaactcggatcgacgaatgaggagagcagactcgactgaattaccatgtgtctgataagacacaaatggataccctatgggtatcacataagggtagttcaaagtgtgtcacgaaagcccacctcactaaaaactgactttttaggatctctgtccgacgtggcacgtctctgacacctaaacccacagaattaggggccttgtcccccacaacgagcttgggaaatacgcacaacataaaaagtaacctacttttgtccaacatccactcctctgaccagtaccttagatgattggcgatgcatagccacctgtcaacatcaaacaacagtactatagtgtacagatgacagttatttctaattgggcctacactaccaggtccaatagtcactattaattgtattctactctattagtggacttatttctatgtaccaattcctatctggtttgagttttactcaaatacccggttttgacctttaaatagggtttgatcccttcatgtaaagggttacgaactttgactaaaaaactttacagaaatttggcaagaacacatgtgtaaaaaatactctatagctattcaagcttaataatattgactcacggactaaagctcattgatgccccaaccacataaaatccttatgtcattatctttaatttattcttctttaagcatcatttctttattaatcagtttccaaaaaatcttggtaaataaaggttgttcaagaatatcaagaagaagacaaagttatggagtt

SEQ ID NO: 294451 - DNA, 588 bp, Cannabis indica
atattgactatgtaattattataattaatatatattagaatatataattacacatcttaatcttatatagctaggaatatactcagctgcaattggtacgaaaagtttaaaacaataataataatctgtttaatttgaatattaaggaaaataatataattattatatgtaaatttatcgtttcccatgtttcgatccgatttctaaattctattttgccatgcctaaaatctacatacaactgatgtggcagctttggccctgagcataaacaggttaggtttgtgcttaagactcacctagtctagtggtcaaaaataaaaattctttttaagattatatatattttttttattaaaatacaatattttactctaaataaaacttaaaaaaaaattatatgtccactcaaatttagagctgaccctacaatgtggataaattatatatgtttagttgtgcatgcaatttgattaaatttttgttaattaagttatattgtttgataaaatatttgaatattaatataaattattaatatgtgctatataattgacaagctgtctcaaatattttagaggtcctgtt

SEQ ID NO: 294452 - DNA, 757 bp, Cannabis indica
ccatttacgggcaatgttcgatatattgcgtcgatataagatgcgctgaaaccctctaaagtgcgtctttggagttggctccgggaaattccttggattcatggttaatcaacgaggaatagaagccaaccccgcgaagatcagggcgttggtggaaatgccatcaccaactaagccaaaagaggtccaaagcctcacaggtaaagtcgctgctctaaatcgctttatatcgcgatcttctgataagtgcaaagagttttttcagattttaaaaggcaataagaagttccaatggaccgaaaaatgcgaggaggcttttcaagccttaaagacgcatttggggcaacccctaatcttatcaaagcccatgaccggcgaagtcctatccatctacttagcagtgtcagaatatgcgattagttcggtactaatacgcgaagaccaaggacaacaatacccggtgtattatgtcagtaaacgattactggatgctgagacccgctatccccaaatggaaaaattggcgttcgctctggtaatatcgtcgagaaaattgcgaccttatttccaagcccacagtatcgaagtcttaacaaactatcctttaaggcaagtcttagcaaaaccagagacgtcagggaggttgttgaaatgggcaatggagttaagccaattcgacatcaagtataaacccagaactgcgatcaagggcaagccttagcagatttatccttgaattccccagcaccgagtggca

SEQ ID NO: 294453 - DNA, 522 bp, Cannabis indica
atatccatatattctccacccctatcagttcgcaagatctttaatgtttcacctaattggttttgagccaaagcatgaaattcctgaaacttttcaaacgtttcagatttcttttgcattaggtaaaggaaactatatctagagaaatcgtcaatgaaagtgacaaatactcataaccacctcgggctttgacatttaggggtccgcagacatccgaatgtactaaccctaggggttgtttggcacgctctccctttgcagagaaagaacgtttggtcattttaccttctaggcatgactcgcatacaggtaattcacctaagacgacatttttcaatggaccgtctttggttagcctattgagtctattatagccaatgtgacctaaacgtaagtgccatagataagtttgctcatcattatcaatctcttttctttttaggtttctaggtttagcaacattgaaaagttcattgtttagtgcgaattgtatatccggtctcaaaacataaagcccttgtt

SEQ ID NO: 294454 - DNA, 374 bp, Cannabis indica
ccagaggatgtcattcggcggctgctaacctaaagtttgataggctcttcagatcagcacggtagcctgccaactacggttttcgatctcttcatggtgaacccttaatgcctccatctctctatccctccattcggcgaacatgcgcctttgttcgtcgaacgcgagatttactgcagcacgcagttcatcctaatcatgatgcagggtgttgttatgaccctgcatgagtccgagcgcgtcacagagatttactgcatgatgcagcgtgttggttccaggcgaaacagttgtgttatgaatgccctagttaggtgcagaactgtttgtaaagcccgcttagctaatttggaaattatcagttaattgtgatt

SEQ ID NO: 294455 - DNA, 813 bp, Cannabis indica
agagacttattattttctttattaaaaacataaatgtgtatggataagacaagaacacatagaatggtaagagcatgtttggtattgttttctgttttttgttttaaaaaattgtttttagaaatgagaacaaaaaatagtttttgaagtttttaaaacacaagtcacgtttggttagtgatttttaaaaacaatattgaccaaaagtgaattggtttttaaaacagaaaacaacattttgttgttttcaaaattcttgttttttgtaactttgttttctgaaaactgtttttaaaaaacaaggccaaacaagccaaattgtttttaaaaacaattttctgtttttaaaaacaaaaaacagttttttagttatgatgccaaacatgcactaatactttttctgttttggtatgttttgctccgtgtgtatataattaattttgattttcgttatttgtgtcattattatttagatttacttatataagtgaaaaagtcccctaaacttattattgggaaatttacacccagttttttcttattttctttcaattttattgttataaagaaaagattacatttttactgtatttttctatactgtgtagggctatttaaaaaaatatgagaaaatgaagatatcttttgatatatatggcatcaaaacttaattaccctaaatatagcatttttaaaaaaaaattataaatatgagaaaaagttatgaggaatgccataaaaaattcaaatttgtgtttctttttttttacttttttttaaaaaaaaaaataaaatactaaaataaataaataa

SEQ ID NO: 294456 - DNA, 583 bp, Cannabis indica
gactagcctttggccaagtcgcgaccccagtcgcgactaccctattttctagagaaggcttaaattcgatcgtaagctagtcgcgactagccctaggccaagtcgcgacttgctcacgtaattttctataaaatccaatttttccccctcattcaaccctacatcaaaattcaaaattcaaaaaccctctcagccgactctaccccttttcctctcaaaaatccaaaacttcttcaccaaacttcaaattctttcatctccaatccaatttcctaatcccaatccatcctaaaacctaatttctttcatcaatctacactttccatcaaaaacaacccaaatattcatcaatttcaccccaaatccaaaaaatattggttcttcatcttcaacctcaaacattcaaagatattcaacaatggaggtggagtaatacgtcttcgggtttgtaagtattcttttctattgaatttgaaaagttgcatgaagatattgagcattggttgtgattgttgttagaattattgattgatataagaattgttaggtttatagtgtgagttgggattgtgaatgtaattgt

SEQ ID NO: 294457 - DNA, 559 bp, Cannabis indica
tacatctttttacactatatcaaaaatatgttcatatgaaaaaatatttaagtcaaattcaacttttttatcacttttttttgtcgaaaaactttttttttattatttttttttccagctgatggaccgatcacagcccttataatggaaaaatgagaaatttttctaattaaatagaaaattaattataaaaactcaaaattttctaatattactcattcaagggtaatacccattaagagtgcacccatacatatttatattatataggtggggagttagattttaattgggggaattactttatatactgtttttttttttaatttttttttttcaaatttacggtttagatttctaaagtggtttctttggtggtttctatgtgggttgttatacgattttttattgcaatttaggttgcaacgctagttacaatagggatttctatgtagaattctgtaaaaaataacaaaaaaaaaaaaaaaaaaaactaattttgaagtgtaaaagtaaaaaaaaaaaaacaaaaaataccctttctattgctggtatccta

SEQ ID NO: 294458 - DNA, 683 bp, Cannabis indica
gtagtttttttttgtgtgtgtgtgttatgatctccaatttaagttattttgattcatttttttgggtgtgtgttatgatctctattttgagctattttgatcaattttggcatgtttaattagtatgattttgtaaaaagttattatataataataattttttttattctataatgacttagtgaatgttgatattgagtcatgtatatcataatttagaatatcgagttatgttataattgtttcctttactaataatgatttgtatttttttaggagtcacgttgaacaacgagtttgcaattgatgacaaaaatatatctcgataacaagaagcatcaatttttatgtgattatttagattatggcactttgtgggacttttctgttatgaacttgggaaaaaaaatactggtttatttctttatttttcttagtattttttttttttttttttgtttctagggttaatagaagtgagtgtttttttaaggataaaagtgaatggttatatatacagttttgaaaaaaaataatagtgtgaaaaaaatatatctcgagaacaacaacatcaatttcagttctctccaaacttgaaagtccattgcccttgtctttgaatgagcctgacgaatgttgtctagatttagaaatagtgcactcaaaataaataataatgaatt

SEQ ID NO: 294459 - DNA, 575 bp, Cannabis indica
tttaataagatttttttttaataaaatacaatatcaaaattataaacattaatgtatataaatataaatcaatacttaaaattactaaaaataaacatgacacgtagagtgatataataaacatatgtgaatattattattttgtttattaaagtagtatgtttaataaatagaaaacaaaataaacatatatatacaaagtattttatattattagtatgtttattataattgtaaacataaaaatagacatagtcaatttatactatactaaaataagtatattttctttctattgtttctatatattgattattttctaatgagttagtgaacgagttttctattgaagtataattcttacatcaaaaaataaataaacaaacataactttataaattccaaaaattatttaattaaaaaaaataaacacgacacaattaataaacaaagaaaaagataaagataaacaattttttatatatattatttattttctaaaaaattactaaaaaaataaacataacacacgtagagtgatataataaacttatgtgaatattattattttgttt

SEQ ID NO: 294460 - DNA, 712 bp, Cannabis indica
aaaataaataatcatacaaatcaaaaaaatataaaaatatgtagcatgacaataaaattatatacatacatgaaaatatttttattatgctaataaaagtatatatcactattatacatatcataataaaaaatagatatcatctaagaataataatataccatacaacaaaataaaaatatatcgtacgacaaaatctaatgtaccaacaacccaaaacaactacataaaaatttaaaaaattgacataaattttaaataaaaaagattttaacaaaactaatatagatataccataatatttaaataatttgcttctaattctaaaaaaaaaaataaaaaaattaatgattttgaaatgaggacatttactaacatagtcttatgatatagggccattcgctattttttttgaaatgaggacataaactaacatagtcctatatttgggccatttactataatttctcaaagtactatttcatacaatattgttacagagttttcatttaaagaatgcaaaatgatcttaattgaaatgatattaatttaaaatttcgttaattaatatttttttaatttaaaaatttaaaaatgactacatattaaaattagttgacaaaattataaaatatatttattatatattattttttcgtaaaaaaatataataattaaattaagttatataattttttagtattacgtatta

SEQ ID NO: 294461 - DNA, 572 bp, Cannabis indica
aagttctatttcccgcttcaagttgtagcattcgttggtgtcgtggccgtagtctccatggaaccgacaaaattttgtcatgtcccttttgctggtatcttttttcatgggcccgggcttcttgtacggaattaacgactgagttgctatgtacacactttctatatcttcagttaagataatgaatgtagtgtgtttggcgtgatcacggggagtctgtccaggtttttcggtgaactttcccttcttcccgtttccttgcttgtggttgttgcctgaacgcttgccacttgaattgctggaataatggggaagttgggcggacgttccagtagaaggaaccttcgttttgctcggcttttgctcaccttctgcttgctgaatggcttcttcgagcttgatgaaaccttcggcccggtcaaggaaatcactcattgagtcgaccggttcgtttttccttatatccttccacagttcgccaaggacttcaatgcctcccagtatcgcggataactttccatcctcggtcacccgtgataccttggtcgcttccgtcatgaatctgctgatgt

SEQ ID NO: 294462 - DNA, 541 bp, Cannabis indica
aaatgtcgttccccaattcattgggatgagactaaaaaggaaatattttggtcctgagttagtttagcaaaccagtgaggtaatagaggagattaaggctcgaattcttgcttcgcaaagtagggagaaaagttatgctgaccctaagcacaaagacatataatttaaggtaggaatctatgtcttcctacgagtctcaccattgaagggtataaggagctttgcgaagaggggcaagttaagccctaggttcattcggtcatttgagatactcgagaaggtcgggtaggtagcatatcaacttgccttaccaccaacactataagctatgcataatgtattccatattttgatattgaggaaatatgtgtcacactcgactcatgtcttgagttacaaagctctagaactacattcatatttgtcatacaaggaaaaccagtttaaatcctcaataggaacagaaaaagttcttgaaacagatcatagccttggttaagatactctagaaaaatagtaaggtggaggaagccacttgaga

SEQ ID NO: 294463 - DNA, 470 bp, Cannabis indica
gttttttttttgatatttacagaattctacatagaaactcctattgcaactgttgaaaatgttgtgaatcttttaacaaaatatataagtgttttagtgtgtgtgagttggaaagagtcccacatgtgatatgaaccctcatttacaagggtataaagagtgcaactttagcatttgggtttgggccccaaggggtacccagttttgtgcgaatgggtgaggacacacacttgacccactacacacgcgcgcgccgtccgattcgagccgggccgggttgggttggtgtggtgtgacactattattttttacagaaaaattatttaataaaataattattttttatttattaatttaattaagaaacgtgtttaattaaactgattacttagtcgtatcagttaacatgacacgttcaaaaccaactcaccccacgtttcagaaaacgttattcttcccgttatgtttat

SEQ ID NO: 294464 - DNA, 505 bp, Cannabis indica
ttctaattaaaatataatatattttagtctatttattttaattgatcatcaatgaaaatattacttgatttaagttgatctaaaattaattaaaaaattaattttcaattttaatctaattttaaaaaaattgaaatatttcgaaatatctacatttaaaataaaatgtatttcgaaaattacatgaaaaatgattattaaaataaatatactctgaaaattattctaatttaagttgatctgaaaattggaaaaattttcaacttaaatataattttcttatttaattaaatttattaaaatagaaataaataattaagtatattgaataaaatcaacttaattattaattttaatttaatatctaaaaaaatattataatttaaattggtctaaaatttattaaaattaattttcaacttaaatatatattactatttaattaaatttatttaaatagaaataaataatcaattatcttgaataaaatcaacttaattattaa

SEQ ID NO: 294465 - DNA, 865 bp, Cannabis indica
aaattcaagaaataaataattaagtatagaggagacttaattattaattctagtttaatactaggaaaatatactttacttagattgtaccaaaattaattattaaacaattaattttcaatctaaaatattttcctaatttaatattagaaaaaataactagtactagaaataactatctagaatatatttcaattaactaagtgtttttctaaaatttgaaaaaaaatactaatttaagttgttatagaaagaatctaaaaaatccaacttaaatatttttcaaataaagtttgattaattatcaaaattaagttgtaaccacctaatttaaaaaatattccattttaagttgattcaatttttttttaaaaaaaatatcaacttaaaaaatatcttaagaatcttcaataaccaattcctagaattcctcaacttaattttaaattcaaaagatattcaaatttaagttgataaagaaaaattaagttagaaataacaaattttcaacttaaattggaatatttaaatgaaataattaaaaataagcttcaagaaagaatctagttagttataattctttatttaattaaatacaagaaaaatacatatagtttatctagtaaataatttcattaaacaaagtttagcttttacttaaaaattaactttaaaaatattaaaaatgaaaaataaatttcatatattttaaaagttaattatgttgctaaattcaaattttaattaggttaaactaatttagttaacatagtactaactatccaaatcaaggcaaatgggccttacacagttggggtagttcatgtgagggagggctggggtccagtatgtcgactcactgcta

SEQ ID NO: 294466 - DNA, 836 bp, Cannabis indica
aaaagcctaattttgtagtagtgtatgtgtagaatgtaatatgacctatatgtggaaataaatatgtggatataatatgagttattatatccacatatttgttaattacggagatttatttgaaatacgtggatataatatgagttatttgtgaaataaaaatattttcaagtttggtgaccctggagacctgattggaggctaaaaatgtcacaacggttttagatagaaatattgatgagattattgtgataagttgattttaaaaatatcaggctattttagggtactcgaagttggccaaataccctaaaaatagagatatcttagtggctaagaaataataagataactattaataataaagtatttattaatgttattattaatattatattattatttatatattattatattattattaatattatattattattattattatatataaaaaactaaatttacgttttgtttatataaatattaagttttaagtcataatagtagaaaaaaggaacgaaaccctcgttctctcccttcgacaaaactttctctctttctatatccattttcttaaattttaaatctaaaacttagcgatctaagctccggtagtagcaggatagcgaatccttgaaaagggaaagcttaagatatgatttaatttcattttaagtttaaaaacaattggtttcatatagggttttgtgaattagaatagttattaaggttctgaccttatagaattgtttacgggtactcatgggactagttccgatattttcttgttgaatttgaagtggattttgagttagaaatcgagtttggaa

SEQ ID NO: 294467 - DNA, 519 bp, Cannabis indica
gatatatacatggaaccttattatcccaacagatttgctcgtcaatttggttttgaccaaggtgttccttcagagaacttttgtttgagtatccctaggaggatgcaatgtggaatagaagatctagccaacgcttggaatttgattttaaggaggaataccaacattcgctttcatatacctaagatgactcgtatgggtcaatgtacatggtggtattgtcgttggtgggtgaggagtagtcttccgtacttagggaggtctgtcaagaagattcataaagaattgaaacaaccctatgaagaggaagagtcgaaatatgtgatccaagacattcgcgaaatttactccacccttgatgaggtttttgtgagatgttctcctcaagatcatgagtttactggtgccaactacgctgtctctagcgccaaccatgctgtctctagcgccaaccatgctgtctctagcgccaaccatgctgatactgaatcaaacattggctcagagaatgaccattct

SEQ ID NO: 294468 - DNA, 755 bp, Cannabis indica
tccgagtcccaagttccaatcccgatctgagtctggattcagttctgggtctaagtccttggttcttatcctggtctttgtttgagtttgggtctgggtctgggtttggctttgggtctgattctaggtgtgggtttgagtttgggtccgagtctgtgtccgggtttgtgtctaggtcgggaccccgatctggatctaggttcgggtccaggtcaaagttcggtcccgagtacgggtccaagtttgggtatgggtcaagatctcagtctagatctaggtccagcatttcgatcctagtctgggtcttggtccgagtccaggttcgtatctggatccttatctaggtccaagtctgtgtttggaattgggtcccaaatttaggtccaggtccggttcttagttccgttctgggtacacgactgtgtcggggcccgagttcgagtctgagtttggatctgaggctaggtctgtgttcggttctaggtctgggtccaggtcctggtcacggtcctagtcttgttctagggtccttgttcggcgattctcgttcaggttctaattttggttccgagtgagggttcgatccttgtcagggttcgggtcaagggctaggtcccaaacaaggacaccgactacaggttttgtccaagccttgggtcgagatccagatcctaatctcgggtcccagtctggttccatttctggtgccgggtcacgagctggatcctaagttcaaattcgggtctgggtcgggt

SEQ ID NO: 294469 - DNA, 754 bp, Cannabis indica
aatatggacacgtggaaggctcaaatatattacatttatttattttttattttaaaacttaatattcttaatatcagaaaccaaatgactacttagtttaaacaaatcttataatgattttcatataatattgacatttcaattcaataaccatgttttatatactacactagtttattcaattatagtaatttagtattgtatttcttttattttttttttagaaaaaagtagcatttagtttctgatattaaaaataataaattttaaaataaaataaataaatataatgtatttaagccttttcatgtgtctattatgagttaacgaaaatgatagtagtaacatgagtatttatggtgtaacttatcttattaaatatgtatatataaactaagtgggtgtttcgctttagttgttggctagtggagtgttttgcttttttttttgaatgtgaatggataattttattggatcaaatcagcaatcacaatagatttgagagtactaggaagagtactctccgagaatttacgatcagaccaaaacaagagccgcgagccaaacaatgggcggccttgttagcagatcgcttaacatgagtaacaaaaacattagataaagaagacaataaaactttgcagtctttacacaattccaaacattgaagcatatcaacttgactttgcaaagcttggacggcagtgaggcaatccgactctatgacagcgttggacaattagagtctttatcc

SEQ ID NO: 294470 - DNA, 665 bp, Cannabis indica
cagggagttcgagggttccacccgctgtcaatcctggacagacgggaagtgtggtgaataatggaacaactcctattactgaaattgcgcctggtgtgcaagagaccggaaacaacggttctgcgcacagctaggatgttcataacatgactgttccaccaggcatcaacgcccaggcaaccatcggatatgcaaccgaattgcaaaatctccgtgctgcacttggactcatgcagggccacaacaataccctacatcacgatcaggaggagttacgtgccgcagtaaacctcgcgtttgacgaacagaggcgtatgttcaccgagtggagagataaagagatggaggcattaagggctcaccatgcagaaatcgaagatcgtagttggcaagctactgtgctgatacggagagcctatcagactgtaggccagcaggcgccgagcgtcattccccttggagaagccaaggatgacccaatggtgaatgcttcccagacaaacaacggtcagccgtccaatccccggtcacgagttccactcgtgggccaagaggtaggcggacagaccttgtccgggaattcatcaggaggagtcatgctcgatggatccactcaaaacaatggagccattccacctgccaaccaagcgaaccaatcgctaagg

SEQ ID NO: 294471 - DNA, 555 bp, Cannabis indica
attaagcgtttatttatacggggtaaatagttaagttagggtttaaggcaataagtgcataagtgaggtattggtgcttaactcgctggggttgttgattacatgggtactagtaatggaccctccgcaatcatctagaccacagggcgagcaagtagagcctggggctgcccaaaccaatccaccggcaccgcctccacctctgcagaatccgggggataatgccggggttggtaatgctaatcctcctgctgactggcaacagatgtttcaagaaatgcgaagtgtcatactttgtcaagaagaagagttgccacgattaaggcaaccggcaccggctgcccctgttgatcaagtgttaccaccagcacctgtgccagtggtgggtaaccaggggtttgttatgccgcatagggactcggtatttgagcggttcgtgaagctgcaacctccgacttttctgggaggtattgatataattaaggccgagcagtggatgaacactattacccgtatcctggataatatgggagtgacgggaactgaaagagtgaa

SEQ ID NO: 294472 - DNA, 501 bp, Cannabis indica
gcaacagtataaaggttgtcttattaagcaacaaaaatttatgattactttattaagtaacaatatcgtttttcctattagacaaataattattaacattgtaggaaatttaagatagcattttactatcctgcccctacaccaacaaacaacactaatcaataattaaggtcaattttgacctttcacagttcaatgacttttcaaagtcagaacaccaaaacgacagcgttttgtgtttgaacaaaaccccaagactcgagaatcttctcagtcactttctctcttccttaggtttctcctcgaaaccctagcagagagtttctctctgagaaactcgaagccaaaccctagaaaacccaaaaatcccaacacaaacacaaagccaagatcagatctacaatgatctgatctaaacacaaccacacacacaaacagaaatagattagggttagaatacaccagatttttcccgaagttcaccaataaattggctacgtc

SEQ ID NO: 294473 - DNA, 439 bp, Cannabis indica
acagtttcccaaaggcaacttgtgtttagtttgtacttggttgatctgagtcattaaggtatagtgagacataagattagaaattatgaccctttattgctccataggtggttgtgaagaaagttggtacaaatccatctatggatgtggtcctctaaaatagacttatgtcccaacagataccaattactaacaggatgtatatcttggttagcatgaagatccacattctcaggggcgtgcatgtagtttttatttatttatttatttgcctttttttaggatttttaatatttatatctcttattgaaaattcttccatccattttgggggaagttaatttagtcgtctttattgattattaagatgaagaacaaaattaaatttacgatctttagaagaaaatgtagaaaaaatgagagagagggagatgtctac

SEQ ID NO: 294474 - DNA, 604 bp, Cannabis indica
aggagctaaagcggtacgcggggccgtaaaacacaatgaggtttgggggtcactcaactcccagctcaaaggccccggctgatggatcaacccatcacattcacggaagaagacgccaagacggtgcgcttccctcatcatgacccgttggtcatagagacccccatcgctaataaagtggtggccagagtcttgattgacaacggaagttccgtgaacctactcttcaaggaggccttcactgcaataggcctgacggaccgagacctctcacccagtgggtcccaactcacagggtttaatggaacgacgcttatcccaatgggaaaagtaagacttccagtcaccttgtgtccggacaccccccagagcacattcaagtactgcacttttgtggtggtggactgcccgaccgcttacaacgcgatcctcggccgaccggccttggtagattttggcgcggtcacgtccattcggcacctgtgcttagggctaaagacgccggagcaacctccaaagatggtcaaccggatgtaaaggcctcttggacgaaacatggaggtatatgtagatgatatgctcgtcaagtccaaagcatgcaata

SEQ ID NO: 294475 - DNA, 641 bp, Cannabis indica
taactgaaaaaacagtaattaataatttttgatttatttttaatttggcctctcatctaattaaaaattatctttatagtatccacatattaaaatcatgacaatcatgcttttaagtcataaattttattccaaaatataaaccacataaatttgacttatttatttgatgactcaacacatattttatatatacaatgtgatcccaataaattttcaacacttacaccattcataggtgaggacaaggaactatatgaattgttgattgtgcatataaaagttgattaagtagagatatctagctgaaagaacaatagaacttgttgttggtgacttctattgccaaaggaaatcattttgtacttagggtttttttgacctaatatgctaagttttgtttaataacttgtatatatatatgtgatttatttagggtttagtatctttaaatatacatgttagctggtgtaattacttacatatatgcaaatttgtaatgtgattgaacggtacaaaccaaagaacgaaggctaataatactagggaaatttcacttttttcccataacaaaacccccaatattaaaatttagaccctcaactaatttgtacaaattaattccattgattacatgaact

SEQ ID NO: 294476 - DNA, 631 bp, Cannabis indica
ttatgtaattaatagtgctgtaccaacctatgtacgtatattttatttatgtattatgtagtttaattttgaaatattattatagttagtattgaataatgtatgtatgttggtgttaaaataaaatatttttaatttgttaaattaaattaaaattttatacaatttattattttaatttttaatttgtttaagtactatcttcaatttcttttcattttttaaaacctaaatatattaatgtttctcaacttcgtaaacattagaggtagggtatgctgctattaattattattaatcattgatagcgactagtcaaattttcaagattgtgttattaccactgagttttgtaatctaaattaaatagagttacttcctatttcttcgcccaacaatctggttttattaggggtagcaaaatgtgacatcgtatcgtgttcatgtcataatttaattgactcaattttatatttcgtgtcaaacatatcgattcgttttcgacccgtgtataatttctcaaccctaacatttggtttatcactacaagaaatgtcacttttaccagcgcatttcgcaaagtgcgctggcaaagaaatttaaattttaccagcgtacatttgcactagct

SEQ ID NO: 294477 - DNA, 492 bp, Cannabis indica
aaagaccaaaatgcccttgccctcactaaaccttcataaatcactaaggggtattttgggaaattctaaaatcctaaatattctcgacattcccaatgtctaaattattgtcccgctacactaaaaatactaggatgtgattttaatagccaaacaccacgttccaatgttgccgggcccaaatcatgcaaaatttatgaaatttctatatatgatataaaaatgcattctgaattcaaataaattatcataaataaatacttcaatattaataaataatttttataattaagccctaattatctgctaatttccaaattaaaactaagcggtctttacagaaaatgataagaaatcctatgaggattgggagcattccaatcgctattatttgatgcttatgaggtatcacatggatgagtccattcgtgatagtattcctcagattgaaaatgtaaaggattttcttgctgccattaaggaaaagtacaa

SEQ ID NO: 294478 - DNA, 633 bp, Cannabis indica
atcgccaagaatcagtgttggcctaggtagcagagaagcaagataagaaagagccaaatgtaccatatactttgagtgttcccttctttcaagaacaaatgtattttcatgcttcatacacatagttttagtaaaatacaatgaatgcaattattaagtataatgaatgactcaaaataatctgaaggattctaagatcctttggttaattttcacacttcataagcttccactttgtaatatccaaggaagaaagatctaagacaaatatgaataccatgagctacccaagtacagggacttcccatgtacaggtacatgtctggaaccaagtcagtacctctgtaagagtttaatgcacgcagaagacctggagggaaacacaagaaaagaccgaccatggctgccgggattggctctgccaccagctgcctctggagccttgggaaagtcacttgagctaagattactgggcctcagtgagctcttttgcaaattcaagatattgaactgatgtcttctcataccccctcggagcttttaagaattccataatgctatctacgtagctgttttctaaaactttgagggtgggtgggggtatcccgacaacttgagtgacatcatttttga

SEQ ID NO: 294479 - DNA, 580 bp, Cannabis indica
actatgaccctttaaggctatgtttgaaagttggatttcgaagaggaaaaaaatgtagagaaataataaaaaaaaaagtaggaaataaatataataattctcatatttgtatgaatgaaaattgtatagaaaacactcaattcaacaaattttcatattaaacttaaaaaattgatttattttttgttcttcacaattttttcttacattttcctacaatttttttttcttaccaaatctaacttccaaacataacttaaaggatgtacaataaaattatccatgatcatattatacacagaggcgaactacatagagcctaaggagagcccttaaattacaaaacaagtaatataaaattagagatagaaataatacataatttttttaatggaaaaaataacacacaattgtcacataatataattggtgtaagtatttatttgttacttgggtaaacctgggtttttgaatatgatttcacttagctctatcttttatttcatatatatatatatatatataaatatatatatataaatatgtgtgtgtaaatctactcttttagaaaaaaaaatct

SEQ ID NO: 294480 - DNA, 520 bp, Cannabis indica
taaaatatatatatatacaataaacaaataaaaacaaaaataaatgtaaatattaatttaaaaaaaaatgtatatactatattaacaaattatatataccataaataatataccatacttacaatataatatatcaactttatatataataaaatagatcggaaaattagacctcacggtcattacaaatgataaatgatgtactatacaataaaacttatatatcatataacaaaaaacatataccttacaatcgaaatatatataataacaacaaataaaaatatataggatactaataaaattatatatcatgtcaacgaaaatacaagttaaatattatttaaaaaaatgatatactatataacaaaaaatacatatattattcaccaaaatatataactaataataataataataaaaatacatattactaatatattgttataaaataatataaaataatataaagtagaaataatataaaataatataaagtagatgagaagaaagaagaaga

SEQ ID NO: 294481 - DNA, 561 bp, Cannabis indica
tttaagttgtaattagttgattttatatcaaactttgtttgcaatccctgtggagacgatcttacttatcactttattacttgtgtgactgcgtatacttgcgtatataattttcacaacaagtttttggcgccgttgccggggattgaaactaaaaattgtgtattatcaactattttgcaatttattttctggtttaaagttttaatcctatttggtgcgctgaatttttctttttcaggtgtaatctagtgtatgaacgagcaagaagaagaccttgaacttgctcctattgaccccgaaattgaacgcactttcagacaaaggaggaaggaacaaaaggctaaaaaacgctgcaatatggccgatgggtttgaaattgggggtgctcataatgaagccaatcctattgctttggccgatgatagagcccgagcaataagagagtatgcagcccctatgttcaatgagctaaatccgggtattgtgagacccgaaatccaagcacctcactttgagctcaagcccgtcatgtttcaaatgctccaaacggttggtcaa

SEQ ID NO: 294482 - DNA, 572 bp, Cannabis indica
tggcgtgcatttggaagccagctgtagtttttcgtttactattacgtacagaataagaaaatcactttcctcagatcttagacagaaaataatatcaagttaaaattgaagattaaataattagtatcgtattaactatccacaatcagagaacacggtatgaacaactatcatcgtgattaaaatcttcacctagctcattatacatgcatggcttcatgggttgactttatcagataagtccaaaattgtatattatttgtaaactctctattagtgggaaatagtaactaatcatgacctcaattactctataaaaataaattgaatgcttcatgcaaataagggttagaatttcttaactcacaagcttgagaagagaatagagtattcatattcattgtaatctcttaggcttttttcagtcctattttataataatacagactcgtaaattaaagttcattaacaccccaatcacataaaaacactaagtgttcttttcatatttgattttttttaattggtattttctttagtcttaaaataaataattcattttctaaaaatct

SEQ ID NO: 294483 - DNA, 592 bp, Cannabis indica
attttcaaataataattttgaaaatctatttatatttaaatataaatttttgaaattatatataaaatatattaaaataaattttttgaaaaatatctaacttaagttgtttaaaataataaaattttcaacttaaatattttttttaaaaatttaattaaataacaaattaagtatcttgaactaatcaccttaatttgaaaaatattccattttaagttgatccaaaattaacaaatattcaacttaaaaaattatttaaagaatatttcaataactaatttcctagaatatctcaacttaattatgaatttaaaaaatattcaaattcaagttgatccaaaattagttataaaataactaaatttcaacttaaatatattttaatgaaatattaaataattaagtatctaaaagaatctaatttgttattaattctttatttaattaaatacagaaaaatacttctagtttatcttgaatttgaatttcattaaactaagtgtgtttttctaaattaatttcaaaataatcaaatgaaaaattaatttcatacatttcgaacttaattattttctaatcaattttatta

SEQ ID NO: 294484 - DNA, 579 bp, Cannabis indica
tcacggctttctcttgaatggtctaacacgaagatatataagggttgttaggccggaaataactgaggcgattggtgttagagaagttttaagttggatcaagaatcaagagtagaattaagtcacacttgagatgaattgtttagttgttgtgcaagctttatcgagtctatttgaaatattttctaatttatttggtttgattattaaagaatgtaaactttgcttgggaagttagaaaattattttattttattttgttaaacgttcaacaaacatagtagtatttatttgtaaaatcttttaatttttatcttgaatgtaattttagtatgaggaacattctaataactaagttactattatgcttggtagttgagtttgaagtttaataaaattgatcattatctaattaaaaaaaatggtaaagggatttttaccttaacaaaagttaaaaggaaaaaacaaacaatgtaatagacctattcattaccattacaaatgataaatatcaccggccgaatgcctagtcataagattttcaagtcatttatgtctttacatgattttaaacctttt

SEQ ID NO: 294485 - DNA, 520 bp, Cannabis indica
agagagatgtgaattatttagagtaaaccattgctctttagggaaataccaaattgtcttgaaaagtttggaaatttgtaattcttactttgatatcaataaaatgcatattctctaattatgtgaagaagagaattggatcaatggtaatgcgaagattcattactatcaatacataattagtcaactcactgttcaatgacacatggtagtgttgtgtaggattggtggagagcaattatatatagaagacagaaagtactttctttgacaagtaattaaaacaagttaattaaagaaaaaagaaaaaagaaagggaacctgtcagacaactgttcgtccaccccagctagtgatccagctgagaacgatcctctacagccgtgataatccgaaggagatctgaccgttaatcacgctctgatcgaacagtcatgattcatccaccacggtttggtttcctttctccttagaactcaaggaaacagaggtacgagcctatagaacagatcctgttcaa

SEQ ID NO: 294486 - DNA, 763 bp, Cannabis indica
acataaacaatcattgaaatagtaaaattgaataaaatcagacaaaagtccttaaatctaacaatcacaatagttcagggagcattttcagtggccttaaaagtttaaaagtttagggagcatgatttggtaaatgttaaagtttaggaggaaaaaatcctaattagcaaaaaaaaaaaatgatgtttaagtatttttttgtttttattaaaaaatagtggaatttatacttaattttctaataatagttaatatgaattgtgaaagaaactttcccttctatttgtactttttagtagttaatcccatagtatgaagataaattaacactaatgatgtgtatctagatttgatttgaatgcaagatccattttgccatttttaaggggttatgggcctacatgatgagatgatagggccatttccggacaagaaagtgtcaaataccaaaatcattatttattcatacttgtttaattatattcctcctgtgtcaaaaaaattaaaaataaataaattaaattcctcctacattaacgttgttagctttaagtcttatgataattattaattgctacggtggtcacactcacgtggactgtaccattacacagcaaccttgttttgtttgtcaccaaaaagtctcaaacttttaattctctttgcaatatcattgttttgctttttttactttttctaattgattatcatcaatttttctttggctaattatgttttttatacctcaactttgactcatttc

SEQ ID NO: 294487 - DNA, 552 bp, Cannabis indica
ggttgtaattgtttagttctgctaaactttacaaccttgagatatcgacttccgatcattcgccctattacttgagcttttaactacagctgttcagaaaagagtcactttgtttttgctttgaaaatgcatggctatgcgaaccactttgttaccaactgataaaagactgttgggatgactatggtgaagtagaagtgcagtagaaaattcagagttgtgggcagcgattggtggtttgggggaaggagtttaggggcaattttaaagagcaaatacaacaaatgtaaaaaaggaagtgcaaaagggtggaagtaggggagagatcatacgtcggtggaaaattataaacaagtccaaaaaaaaatctgtttgaagcttatacccaacgttgaggttttttggcgtcaaagatcaaagcaattgtggttacaataaggtgataacaacagtaaattttccatgctttgcaactatagagacgctgttggaaattactttaccaggatcttagatctactcacagtatgttattaacacctaatatgaact

SEQ ID NO: 294488 - DNA, 519 bp, Cannabis indica
accaaatcaactgctcttcctcctcaataattcggaggcgttgctcttccctagaataatccgggacagaaaacataacattgaaagcatcagcagtggcgggaaccttctttcctcgcaccttcacctccccattccggcggtcgggccaattggcaagaaattcacaggccatagtcacattagcccggccccgagcatccacaaagctaccccatttcatcttctcaatttgggctcgaattgtctcgaaccttggttgacgtctcaaaggattttcagggaattcaatacaccggtcttcaatgtaaggcctaattatcagcctcataaaatgattttgagcctcctcattgacaaaccgggttctatcgaaacccgtagttggtggatttgatgacgaaccttcctcaacatgcctagttctcttaggtgccattttttcttagaaataataaaattctttttttttctccttgattttttttctgtttttttttggtatttttttttcttttt

SEQ ID NO: 294489 - DNA, 768 bp, Cannabis indica
gttcatcattctagttcttctcttctccttaatcactcttaattaattatgattttgatttgagtaatttgcggcataaatatttgaagcttcagcttttattttcttgttattttttttattttacagatcactgtttttcgaaatttgatcaatttatacatttcaagagtcgaaacctgaaactaaaaaaacaagtagaaatctaattctaaaaaaaagactatgaagaaaaaaattatctctaaaaatgacacgaataatagactaaaaatagcctaatagtcatagcgccatccgtacacgtgttgaattcttatctttttctttcttctcgccagaaccccccttccctaacccttattcttcttcttctttagtatattactaacttattttattcacatggtatgattttaattctgttgtactcttacaaaaccatactcttatataaatacaaaaattttctaatatttattaattatttctaataattaacatgttatttattatatatatgtattttatatatttaaaatatattatccttaaatcatttacttttagatataaaccttaacaatgacatgcatattttattttattttattattataatattcattacagagctaaacgaaataggcaaatatcatgacactattcccattaagattcttattacattgcatttgcatcaaagcaacaaccacctaaagcttgttttagatccgaaaacaaacatttattattacaaggataatc

SEQ ID NO: 294490 - DNA, 478 bp, Cannabis indica
atacatcttcagtatcaatatattttgaatttggatataaaattatttggctctaataatcattttgaattggaagaaattcataaaacaactcgtatcatatggcatttcataaaatattattaataaaacattataatttggtaaacatttcataaaattttataattagggtaaatagcggcataaatacctaaagttttgagtttgtaagcggtataaacctaatgattttttttagttagcacccaatgtttgtaaaactgtaattttctctattttcgtcagtacagactctgttttaaatgaaagatttggaagtaacggatatttcatattctcgtccagaacaaataatctagaatttaagtcttatatgtgtcctgtttaagacaataacggagtctgtactgatgaaactagaaaaaaattaacagttttataaacattgagtacttatgccgctaaaaaaatacat

SEQ ID NO: 294491 - DNA, 520 bp, Cannabis indica
aaacatgcccttcggttagacaatgagctatcctggttcgaggggctccaccgccgattgtggtgtgctgcattgttaatcatgtgtgactttgttcaccacgtcaaaaaaaatgtgggatagatgataaaattgggttttttttttgtttatttatttattttaaaaaatctgataaataagtagaaaaaaaaaattatttttatttatgtttaattttaaaatattttttaaagtatttaagttattaaaattatttggacccaattaaaacatgccatgtgtacgtatgtgtacaccgtggtggcattcctagttgacacttaacacccaaacttaacacatatatcaaactttccaaaacagaatcaaagataaggaagtattaaccacaaaaaaaaaaaaaaatattagggattaagtgtttaacaattaaaaacataatggggttggacgtaaaatttctctttgatttttaatcagatcataataataatttattgtagtttatttgattatc

SEQ ID NO: 294492 - DNA, 617 bp, Cannabis indica
atgcacatcgcggaacaaaaagtgcactagctttcagaccgataagggggtatactgctacctggtcatgcctttcggactaaagaatgttggtgcaacttaccaaagaatggtgaaccggatgtttaaaggccttctggggtgaaatatggaggtgtacgtggacgacatgctagtcaagtcaaaggcatacgctagccatgcaaatgacctagaggaatgcttcgaagtggtccggagatacggaatgaaacttaacccgaagaagtgcactttcagggttaaatcgggaaagtttctgggcttcattgttagttagcggggaattgaggcaaatccagagaaaatccaagctctcctgagcatgccttcccccaagaaacacaaatatgttcagagcttaaccgaaaaggttgccgccctgaaccattttatcctcccgatccacagacgaatgcattccctcttcaacatcttgaagaaaatgtcaaaaaattcgaatggtccgacaagtgctaggaggcaattcaaaaaaactaaaagagtacatggctaaaaccaccaaatcctatcgaaaacccattctcggagaggacttgtcctatacttggctgtct

SEQ ID NO: 294493 - DNA, 1073 bp, Cannabis indica
ttaaacgtaggacaactcgtcccacgttacttctacgtggaatcgcccctcgttgtagtaaaaggacaaacaaaaaaaaaaaaaaaaagtggatggagattttaaggcatatattatatatttatctaataaagtgtactaacaatatgtaaagtgtgttgggagctaaagaagcaatattgttttaattaaagcttatattaaagcactattttgaatattgtggttaatttgggtggctaagaagagggtcacagggaatctgacttttgttatatatgttagtcactggattccatagataacaatgaagggtcactgtttttcattctgtggaaataataaagctgataatataactggcacactacctaatgcatgcccatgaggatatttattagtttgagttggagcaaaaagaacagcaaggctgacatctttttggttggtttctaatctttgagtgaggttctctttattaagtgccaccaaaatatgaatggcattatgctttaatatatcttatttgattttcgtattaaatgataagacaactccattaaccatttgccattgttttctgctttccatctctttaacttcatagaaaacacttctccaaaatttactaaaacttatttctctatatatatgttaataaaattttttagaattaaaatttaaaattcactaattacctaactaacactagaaagcttgtccagccaaccaaagaaaagtagggttattataagtagaggtggataagacctaatctaatctaattgatcagttgaattcaatcgatcaaatacaatctaaattataaaaaaatagatatcatagattcgattggatgttaagagatgaattttaatttgcattggttatttgatataatcaatctcaaaatgtaattgaaaacggatctaatcgattacatttaatatatattaaaaaaaatatttatattaatttatatataataaaaaatatttaaaaataaaatgtatattttaattatatttttactattttttttttgttgaatttgtaacgcttaattgttttgt

SEQ ID NO: 294494 - DNA, 576 bp, Cannabis indica
cccaggttgataaatagtgcgctgggtttcacttatttgattttaattttgtctcgaaagctagtctagttttttacaataactaagatcaatgaagtcaacatattcaaatgtacaactttgcatttcttgtttccaagcatggtaaactacttggaaattaggagtttcgagtctcctatcttcgcagaacagcgacatctttgagaactggtgactagcttcgccagaacacagaagtaaactaaatgatgtcaaaatatcacttagacattcaaatgtacattcccaggatgtttttccactcacccaacatccaggttgacatcatacgtcaacctgggcgctgggtcatgaacaaccttcagtaaaatggacataactcactcaatagtgatccaattgacacgattaaacttattttttgaagcaatttcaatgctctattaagtaatgtctagaacttcagtcacaattctaaagttattgactctaaatttcactctaagagagttatgaatttaagctacagctaacccagagcaagtcccgtcgtcgcggtccgagctccaaaaa

SEQ ID NO: 294495 - DNA, 606 bp, Cannabis indica
aatttaaaatttacttataaaaaaaaaaatattaattttattttatttaaaaaagttcgggccgaccatcgaaaaatataacaattcctcgtacttaattttatctcttttttttttgttttatgttttttgtttttgtttttttttttttttttttttgttaaatttaatcaactcatctcattttttaatcaactttatctcattggtattactatgccaaggatttaaaattgaatggatataaatactttaatatatatatatgtggcgtgcatgttagattaatataatttagattgataaataatcttaaaataaatatattttatttaaaatttatttagtagactataagaaagttgctctagtagattctctatctgttttgaatttttatgagtagttttttttagttttttttttttttttattaaaattgcatacgttgtagttatttaaaaccacttgtaaattttcagtaaacttttgaatagtgcaatacgaaagataaggtttaaacagtttcttacctcgcgtataaagaaaaacaatcgtgcgtacgacaaaatatgttaaatttttatttttgtacagcgtaaacca

SEQ ID NO: 294496 - DNA, 534 bp, Cannabis indica
aaaaatgttatgtttacttaaataaatctacgttttttgataaacacaaaatagactcaagtttgtccctgtaaaatttaatttttacaaaaattaaatttttaatatatttttattaataaatgattttttaataaaaataattaatttttaaaccactcaattagttttaaacttttaattttcttaatcattcaaaatcttttttaagatctaaattaattttgtaagatttattaaaaaatattgaatttttcttaattttattttaaaggggtacgatttgataattgtcaaaatttaaggaacaaagttactaatttacaaagacatgtcagcatttaaacgtgtaaaccagaacacgtgtgacatagcaaagttagttaggtgttctgttagattagttgttgtgtttgttttttgttcaaaaagttgttaattgtgcagacttttgtaattactgaactatataaatgatgtatcagctaaccataatggttaagctctttttggcaccttttactctgttttttc

SEQ ID NO: 294497 - DNA, 603 bp, Cannabis indica
agtaattacaaagaattattctttaaaaaattacttaaggtgcatttatgtatgtttaaccagaattcatctcgaaatacatggttcaatgtaaacctgccatttcaaaaatctttttgaaattcaaaggttctcgactaaacctctttgacgaaagtagagttgaactcttataactccctgaccaaacctttttgacgaaagaggggtcgaattgttataacatcttgatcaaacttttttgacgaagaagggatcaaacaactataatttttgatttaaaacctttctgacgggaaaggaaaatcaaaagttataactcgcttataaaactgaatactaacggttctcgcgagctaggaaagtactaaacgaggcatcccgatgccttgataaaagtacttgaacctagaaaatgaatagataatataactattcatacgagcaaaataaaaatatacaaagtgataaaatcgttaaagtatatataagtttcttaaggcagattgtaactgctatagcgagacaactgcttaaaaaatcaaaaaagttcggtggattactaactacttaaaacaggaagattacgagcaaatggaaaaa

SEQ ID NO: 294498 - DNA, 777 bp, Cannabis indica
atcaagataaaatcaatctaaatatgaaaaagataggttagacaagaacttgggattaacaattaatatcagagcgagccacttctgttagaaatgttgatccttagggttctttcaagattcgttgtactgaaattcattgttgctgcaattctttgttttttctactattttttcctttctgcaacattcagttagaacctaaacccctctccagacatgactctaggagtatacttctctctatctttgttttgtttttccctatttgtacaggaatggagatgttcagagaaggaggatccacatcacgacccccaatgctggaaggtgccaattacccatactggaaaaccaaaatgcaagcattctgagggcggtgaatgaaagagtttggatggccatagaagatggttggacctgcccaacggtgatggataatggtttcaccaaaccaaaacctatgtgcctgtggactccagatgggatggagagggctaattttattcgaaggccatgcatgctctattcaatacagtgttcacaaattaattgaaggtcattgcaaactgtgagatggccaaagaggcttgggaaaaagtacgaattaaaaatgaaggaacggatgcagtaaagaaatcctgtcttcgttctttggcaaaagcgtttaaagatttatcaatggaggaagaagaaacggtggctgagttccatgctaaattgtgtgacatatcaaatgaggcttatgctttgggaaagacttattcaaatgcaaag

SEQ ID NO: 294499 - DNA, 885 bp, Cannabis indica
atagaaaattctccaccaaatctgcttaccttttgcaggctcttgagagagaccaacattgtcaggtcgctccttctctgtggaataaattttggagcaacaaaacacttgaacgacataaagtgctttggtggagcattctatccaatgcacttccaattcgatcccttcttatagatccaatgaacattaaagactcctcttgcccgatttgtgggagagaagaagaaactatggaacattctttttcttcattgtaacatggcttctcatctctagagagtcgctccttggggtatcattcctgttcaggaaccagaaatcaggatatgagactatgtcaaattcatttggaggttgctagtgagagatgtgaagattgatgatgtaattttatatgtgtctatactagttgacactatttggagagcgataaaggtacataataaccatctaaataacattaaatttttatagtgactctattgctcattgttatacaaagtattgccaatctcttttggatcaatcttaactttcccatgctatcactgagtgggctcctctgcttgcggactggatcaaacttaactgtgatgtgggattagggaggggcctatgatgcttgcggttgtggctcaagatcatgttgggaagatactttaggtcggtactaagcgcctgccttttgccaatacttttattgggaaaattatttcttgtctgctggcattggaacttgctgcagagaaaggtttagaatttgttattgtgaaaagtaattctaacacagtcattaaagcaggcaatggtttgaacccgaggtagaaaattgatagctatttgactcattgtagaagccttatgagctccttcttaagatgt

SEQ ID NO: 294500 - DNA, 880 bp, Cannabis indica
tatttttgtaaaataaggaaaatattggggcgttacattctctgtcctcatttctaagtctttagatttgagtgcagagatcacctcctctagggttatagatgtccttccatacttaatagcagtcttgacttctctgtaggattcaggtagtgaatttaggataataatggcctggttttcatcacttagtgcctcattttccccagaatttgcaagttcaatatgcatccttaagaattcatccaaattttgatcaagagatttggatgaactcattttaaacccaaaaatcctttccttcaagaaaatcttgttggttagggatttctgttgaaactgttcttccagtttcttccaaatctgggcaggggtttcttccttgtcaattagtctgataatggcatctgataagttgaatatcatgataccagttgcagtttccaagtattcttcttgttgaatcttggtagtcccttctggccattctatagggtcattaagtactctcaatagtttctgttgagccaagagtgacttaatctttctcctccaaatcctataatcaccagaaccatcaaatttgtcaatgtcaacctttaaattgctcataattaatgaagttaagtaaaatcagatgaaatagataataataggcaattcagttataaagattattagaaaatgtcccagaaatcctttgttaaagatttcagattgatctggttgagttcttgaatttcttgtttgtgtttcttgatttcttgcttgagtttttctccttcttgattagtttgaatgttgatcttttccagctttaaccaagctctgataccattgtaggaattttaagataggaatttactatcttgcccctaca

SEQ ID NO: 294501 - DNA, 1030 bp, Cannabis indica
ggaacccggaggagaagaaaaactgatggcggtactccttgacgtgtttttgctggttataagggaccgcaccctcattcgaagggtgggcccagaagccgtaaaaaccatccttaagtttgtgccccttcttggggacagaaacaagttcataaaaatacaaaatctccgccagactacgacagccccatccccgagcagagtaaaaaataaataagcctgaaagcaggcggtaagcttgtggaataagttggtatggcgcaaggccgacaaatacaaggaaattaataaaataatgttgaaggggaagcatagccccggtcatcaaatgcgtctggctccaagccccgaagcctccgtaattgtgattgggcgtctccgcatcacgcggcgtccggtggtacgtcccggacgtcgcaggtttgatgccggccacctccacaatgttctccagttggtgagggcaagtcaaagtagagtgaagctcggccgcttcccatcccgtagcacgaggtctatacccctcctgggcgacgggacccaccatcacttcttccatggtggccaagcgctttcctcccttcttggacgatttggaaccggatgtagacattttggttctgaaaaagagtaaaaattccagcagtcaggccccataccaaaccctaagtcaaaaaaagggaatgggggtcccctaaccgctggaaagaggccccctccggacacttgtcaacaagaaagccttataaggatttcctggacaaaagtcgggtgcaagaatctcacagatagtgacattgcacataagcgaagaaaggaaaagaaagagaaagggcagaaatcaagaaagacaaagtcttctctgtgcccttgaaggccatcacgcaaagagcaagtgggcctttacaaaaaataatgtgctaaataagagtgacccaaacaccagagaagagaaatctaaacgtattacgcaaaaactcaaggcgaaaaaattcccagaaaacttcgaacgatgaacccagaaaaacaa

SEQ ID NO: 294502 - DNA, 519 bp, Cannabis indica
gattccatttcttagtaccatgaccaaaatgtactcctgcttccatcatctcttccaaattgatgttccaatatcttcttgtcatttctccccacacttcttctctttttttttttttcaaagaaaaaaaagagatgaggtaccctgaaaatagaaaaaaaataatagttcccatggaaccttctcttctaacggaaattggccgttgatacgcgatccaagccgttcatttttttttttcaatctttctattcattattttctttattttattattctccttattactattaccaaatcaaatgactgcaaccacaaatagacaaaaaggatgagtctgctgttaggaatcattaaatcctataaatgattgttctgatgtatcctgtacattctttggcaagtgtctgcgtctcagtgataaggtagattttcttccagagttattccttctattaagaagtctgccaaggcttgacccttgatggatgttaagggtggtatgttatgtcaaactgc

SEQ ID NO: 294503 - DNA, 624 bp, Cannabis indica
aaaacaaatggacctactatagataaaccctatatatatattttgtgactaaatgtgacttttaatcacaacagaaagttacttataactaaaaatagtatttattaatatattggtccatctcccataaactgtcgttcaacatcaattttggagcattctcttgctccatgacctcttcttccaactcaacctcttcttgttggaccttcttggacatgatttctggagaaagaaagaaaaccaaacagttaactatccaaactacttaatatagagggggagcatgggaatccaaccccataaactacttggagaggttcccaaaaataaaaaccttcaagggtcatttgttccaaataggaaatcatgaacattaagaagaagaataaggaggaaattgacaaagtacccaaaattagaaggatcctcagcgtggaaaaatttcgtcagcatttctacagcaacacaactattttccagaaattgctaagactaaaaatcgagggcaataaggttcgtcacatttaaaaccaccagtagtattggtcacaggtgataactctatgaaaatagagttatttatattttttttgggcattaaattagctttgttctcaagta

SEQ ID NO: 294504 - DNA, 524 bp, Cannabis indica
taatattagcaagttaattgtgatttttgttcttttaacttttacatatactaagtcatactttaaattttttagcccgacaaaaattctcctaaactattgaaattattaaatttaaagactaatatggtgattatctacatacttttgctttttaattttttaatcacaaaatgaaagtaaaatgtttgtttttaaaaaatttaatttttaaaaaacaaaaatgcgttctctaaccacttttgtttttcaattttaaaaacagaaaacaaaagtgtgttctgtaaagttcattttcatttttattttttgtattttatttaagtcgggtcaagattcggggttggattcgggttcgggtcagaagccgggttcagcgccaaggtcgtgaggagggaatttgggtccgggtctggttgtaatccaaaagattgattaagaaaaaaaactgtttaaaaaaatatagaaagttgatttttttttttgtttataaaattttgatttttaattataaaattgaaaag

SEQ ID NO: 294505 - DNA, 626 bp, Cannabis indica
ggtctttaagtgggagttggttacaatatctatgtcatcttttggttgttgatcttatgtttaatagtatgttattatgggtggtattgtgagtgtaatattttaatctacgagttttttttggttttggatgcagttgggcaggcacctagttatgtttggcggagcataatttggggaaggtctctgttaattaaagaattgcgtaagcgagttggaacgggtgacacgatactagtttttaaggacccttggctaccacggccagccacttttaggccttattgttctactctagagaattcaaatttgttggttcgtgatttgattaacgagtcaaggagtggttggaatatgcaaatggtgagggagttgtttaatgtggctgatcaacagagtatttgttctttaccaattagtaaatttccgaaagcggattcttggatgtggcactatacagctgacgggacttattcagtgaaaaagtggatactttgtggcgtcgcagttggatcgatttgatccttccccttctaagagtttgttcgcagtatggtggaaaagggttttggaaaaacttctttgcctaagaaagttttaatatttgcttggcgtgggtttcatga

SEQ ID NO: 294506 - DNA, 466 bp, Cannabis indica
agctttattaaaaatttagaggttgcatacactttacggtacaaattctcttaacaaagcctaagtttacatttttagactattggtaatacttccggagatgaccggcgttccaggcccttggcacaatggttccgtccaatctttttagcttataggttccagagtcgatctcatcctcgatttcatatggcccttcccaatttggcccaagtacccccactccgggttcttgagtggctgtgaagactcttcttaagaccatatcaccaatggtgaattttctacttttaaccttagcgttaaagtacttagtcaccttcttttgataagctgccattcgtatttgagactcgtcccggagttcctgaatttgatccaacacttcctgtgtaatatccagtttatatacatatattggtatttggtatattaagtgtgatacaattatattattattattatt

SEQ ID NO: 294507 - DNA, 570 bp, Cannabis indica
ccggcgacgttcgcccgaagatcacgctcgcctgcaccgagtgacaaggagcgcaactacatcaccaagaagaatcgccgtaacaatcctgatcgcatggagatggcgaagttctgcccgcgctgccgcaagcacaccgcgcaccgcgagacccgctgagaccgggacttgaacccaagaatcttaaacgaggggctgctttagaggcggcccctcgtgctgtgtgggagcaaattgctgtgtgtgagcaattaagatgctccgaggtattctgtggcggtgggggtctgggatagcctgacgacatgtcgatcagttctcatgacgttgggcgcacctacccgacgacagacccgtatcttgttaccgcagagaaaatccgggagcttgccactgctttgggggataacgccccggcctatcgaggcgacgaccccattgctccgcccaccttcgcgatggtgttggcgtctcgggcagtgggaggcgttgttcgacgacgagcagcttgacctgcgcctggagcgacatgatccacactgaccaagtcttttcactggatccgtccgc

SEQ ID NO: 294508 - DNA, 502 bp, Cannabis indica
ggctcctcgtcatagtggtagggtttccccaaaaccaactcgttataacttggatggtgaaatcaatatggtcgttggtgacgatattaatgacgatccattaacctataaacaagcaatggaaagtccagaacagaaacaatggtcagccgacatggattcagaaatggattccatgaaaaagaataaagtctgggaatatgtagatgcacctgatgattatcatccaattgaatgtaaatgggtttacaagaagaaaagagatgctggtggagaagtcgaaacttttaaagctagacttgtcgcgaagggttatacccaaaaagaaggtgtggactatgaggatacttttagtctggtcgccatgctcaaatccattagaatacttctctccatagtttccgctttcacttatgaaatttggtaaatggatgtcaagacaactttccctaacgaaaattctcgaaagagaccatatatatggaagcaaccagaaggttat

SEQ ID NO: 294509 - DNA, 602 bp, Cannabis indica
cttcatgattagtagctttttgccttagggccactaacacggtgtagctgccatcatcataggcatcaaactcttcttggttttcctcttactccatgtcattcattttgtcttgttcttctacctccacgtctactcgtgaggctacttcttcttccccttgtcctctgggaccctagggggacgaggctaacatgtatagtttctagtctccatcattgtactctgaatcttcttatattgttgttttgtaaataaagccttctacaactctcaatgaaagtaccaaaatgttgactgagatttcaacaactaaatcattaatgcactaagaatgattagaagagagtaaatgcaattgtttttacgtggttagggcattaatgagccttagtccacgagcctcctgatatttaatatgtaggtgtttctttgcagagaatgttctgatctattttcttttttatccccccattacaaatgtcgttgggggtattcataacaattatttagaaaggagaaaggcctctattgtcctaagtgtccaccttggccatgcacaagtttccaaatcggcgaagtagggcatgcgtccctaccta

SEQ ID NO: 294510 - DNA, 511 bp, Cannabis indica
aaaaacatacaaataataaataacatacaaaaaaaaaaacaaaattattattaaaaataataagaaaattacataaaaaaaatataccaaagtgaataattttgttaaaaaaaattatataaggtaaaaatatttaaaaatttgtataattattttttggtgttgatatttatgaaaatattcctatattaatgtggattccattaagcctagaagagctcagtagtataacttttgtgcaagttaaatattattatatttatttatataaataaaagaaagatatgataggtatagttatgattatttggtcaattttgtgttaatttccagaaaaagatacacgatggcactggctaattagtaattttttccctttcgaacttttgatatgtactaaattataccccctgaaccttttttcaggcattaaaaattctccctgaactattaagattgttaaatttaaagatttttatctaattttaataaaaaaattactaacatagat

SEQ ID NO: 294511 - DNA, 691 bp, Cannabis indica
ataatatccgtttctctttcgtctggttcttcggattacttcaagaatgtcatcgccattggagcttttcatgctatgaggaatggaattttaacgtccgtttctgctggaaacggaggtccggagctagagactatcgctaactttgcgccttggactctttccgtggctgcttcaactactgatagagacttcttcactaaacttcaattgggtaacaacgtgtcatacaaggtagtcactcacagttaattagcaaaaaactaaagagaaatgtagtcactttgattgtgcggtatagccttatttgttttttctctttctttctcctttttgttaatgttatagggattctcaatatctacttcggatataaaaaatttgcctatcatatacggcggagatgcaccagcagaaggttttgaaggttcatcatccaggtcattatatattagttttctaatcaccaatttcgcaatactcatgcatacttaagtataataatattttaatttaataagttgactctggtcaattcaaattgtatgtatattttttagtaaaaagtgggctcttttatagcacatctagaatatagtttacattgtattttaaaaaaatgcttgctatatttgtcacttgcaagttaaaaatactttaaatttactaaatcccatatgttttatttatc

SEQ ID NO: 294512 - DNA, 513 bp, Cannabis indica
tttggttgatttacatatatttttattagttttttttaatgatttttgaaaatctggaacaaaactactgcattgaatttctaggaaatataaaaagaacaatgagtgtgtgttaaaaatttcaatacaaaaatatgttgcatttgcgttgtttttaagtttcatttatgttgtttttccatcttcctaaaattaaaagttaaatgtgctggcaatacaataacaacacaaatataactgaatgtgagaagaagatattgcaaatatgaagaaatttatatatactgatgcaataacaacattatagtagttgattttgagttgttttgtgtgtttgctataattatttattcatcaatcgatattattttagttgaaagcaacaaaaactacacaatatctaccaaagaataattaagttgttttcatattattgtgaagtttttgcaacatgaaaatattaactataaaattaagttattttcgtgttattgtaaagtttgttatgtaatt

SEQ ID NO: 294513 - DNA, 545 bp, Cannabis indica
attatgtttatttatttaatatagaatgtataattaaatgtaaataagttattttgtagtatatagtgtaataaaattatataatgtatacaaaattataaattttcctaattttatttcattttcttaaaattaaataatttaaatcgaattctttttatgttagtttaatgactgtatttactcttagactttcattttcaatttttagaattatattttaaaaaatgagaataaaaattagtattttttcattttaaaatttaatgatatttggttcaaattttttaaaattactttaaactttttttacacaataccataacactcattcaactccggatcatatcccagactcagatacgaattctaacccgaaccaatccagacccaaactccgacccatggatctcggacctagcctcggatccaggttcgattatattttaaactagaaataatatattggtgttggttagctaagaaaaatacgtaccttgttggccattggctttgaggcatgatgagttggcgcctcaaagctt

SEQ ID NO: 294514 - DNA, 681 bp, Cannabis indica
ttagtgaaaaaatcacagagttcaatgaaagagcttgagtgtttgttcaaaaagaggaagtaagaaaagagatgaagttgttaaagactggcttaggaggtaaaccaagcactttctcgacaagcaccgtcttaaccaaagctgacaatccaggagcctctagttcaaagaggaaagataactctaaggagttaggtaaggacaagaaaaattagaagaagaacgacaagttcgtgccaatctacaccgtttataccgagcttaatgaaactcaggaaaacatctatcttacacatgagcacaaggtcgcaatctgtaaacctgagcccatgaggcatgcaagacataagagaaatgcaacaaaattttgtaagtaacacaaaggcattgggcatacgacagacgagtgtcgccagcataaagatgagatagagagtctcatcgcgcgaggtcattttcggcaatatgtgaaaagacaaggtaatggaaaaaaaccagccaaatccgcctaataacccatgcaaccaaggattacaacctcctcctttttgaagaagaggatatcctagttatctcaggagggccacatattgtagggaaaaagcaaacatgcccaaaaagagataatgtgaaggaaagtgaagaaatgagcagtctgcttttgctctaaaaccttccaag

SEQ ID NO: 294515 - DNA, 955 bp, Cannabis indica
gtttctatgccactcaggggggtactagggtatacagacggtgctctgccgcttcccatccggtcgcccgggacttatacccctcctgggctacgggtcccaaggagacctcctcaagggtagccatgcgcttaccgcttttctttgaggacttggagccagaagcagacatttttctattctgtaaaaaaaaaaagagtaaaattccagcagttaggccccgtaccaaaccctaaattaagaaaaagggaatgggggtcccctaaccgctggaaagaggccccctccggacacgtgtcgcacaggaaaccctagaaggattccctggacaagtgtcgggtgcagtaaattcacagaagacggctttacgcgataaagaaaacagaaagaaaagattctgttctatgccctaagcagccattaaacgaagaacgtatggccttctacaaagaaaatacacaataacaacagaggcatgacaatggcaatcctaccactagagcagtaaattcaaacagactacatgaagaacttaaacacttgcatgcccagaaatctcgaatgcaaacccagaaaagaacaaacagaacaagtaataatatgccattcaataacagagcaaaggatgcaaaaaacttacgatgaagtgttaaactgggggtcctgatgcaagtcgagtgaagacgagaaggactggtagcaacgagcaaagaagaactgggaaaatcgcaaagtgtttgaaggcttcgttctaggtctgagaattttctctctaggaaattcgagcaaagttggcaagaaatgggaagtaaccgaaatgaagaaaagatggtggcttttataggcaaaaaatgcatgaggaacaggcgtcatcacctaccaatcgaacggtgagggaagcgcacgattcaaatacccaaagatcaacggaccagattgatttacaataaaggcg

SEQ ID NO: 294516 - DNA, 510 bp, Cannabis indica
gattgtttatgtgtacacttttgaacacgcggtatgtttatatcggtacacataatatttttatttcaaaatttattttaaaattaaataaaattataaaaataaaataaaaaatttaaaaaatattataaattttgaaataatttttaataatttttaaataataatattaggtgtaccaatataaatgtgctacgtgtacaagagtgtacacataagtagtctatgttggcagttaactgtaaaaaatagatgacaccttaaatttactaacagttcagtcatttggagggttttattttaccactaaaatttaagcttggaagattaagtacaaatacaaatagattaataaattaaaaatacttactcatcaatttggtattactctccattcacacctattggagccaaatcatgaaactcccaaggaaagttattactgaacttgaagcaatatgccgagcctttttgtggaagggtcaaagtttaatgcaaggggcaggacta

SEQ ID NO: 294517 - DNA, 441 bp, Cannabis indica
tagacttggcagatttgggagtggaaggattggcagtagtcagctccttagaaaggtcaataacctctccagaaggcctcttctttgaagacccctctctgcccttagctttttcgccggaggcgaagcgctagagcttccgctcatcctcttccttaaagcgtcgatcatctgccgagacatgtttgcacagaacaaaaacagcgtggttagcacaaactagtagaaaatacaaagcatgaaagtcaagaagctgaaaaagaagtaaagcgcagagtgactgccccgcccagaaagtcagaagtccatcatcacctgatatctcagacataacggccttcccttttccagcatagggatgagagggccgaacaggtgaaatgggctcccttatgcgaatggcatgttcaacaggcatgggcgtggccgggagtttcttct

SEQ ID NO: 294518 - DNA, 569 bp, Cannabis indica
gtccgatagtagtccgatgccttgctgttggtaaaatgagtaaaggttgaagacgaaggtccaatggtggtctgatggtagcccgataatatagtctgatggtggcccgttgccttcctaatgagcttaatgaatagagcttaacatctataaatgtagatatggtctaatagtggtccaatggtcacttgatgctacgtctgatagtggtccgatggtggttcgatggccacctgatgcttaccttttttatgtaacaaaaacaaataaaaaaaaaaaaaaatagaagtagcatctcgggccaccatcagacccccatcggaccaccatcggtatagatcgatgggaatatatatggagtatggatggtgaaattagaagagaagagaagagagaaaggtataatgggtatgaacataaaatgtgccttattttttttttttttttaaattttagtaagcttgtgttcaaaaatttaatataccccaaatgtatatatataaatttaaatttctcataattaatcgtagcctcatgggttaagcctcatcaaatcagttcaatacaaa

SEQ ID NO: 294519 - DNA, 1072 bp, Cannabis indica
gccgtaagtatatatcttacaatctctatactggctaactagtagttgaccataataacatgtgtcactctgtcatagggtctaaaacagttaaattgatattttaaatataaaattatatatgttagaatttaaaattaataaataatttatttctacaaacaatttaaataaaaatatgattaacaaataaaacccaaaatcattaccaaatttacaaattaaacccaaaaatcaccctccctaatctcacccaccatccatgattttgaccttcatcacactctaccatcaaactccccaaaccacaccggcccacaaccacaccctaaggtggcgtttggttggaggtaatgaaatgtaattggaatggaaaggtaaacaattttcattccatttcctttgtttagttgcattttaaagtattggaatgacattttaatggaatgccctttccaccattttggtggaatgactattccgttttgaaatggaaggaaagaccattccaatgtaacatgagaaaaaatttaatgatttttttatcaattttttgtatgcattttaattttattcactcctatttgtattcttattatttttattcctcaacaaactaaacttaaccttagttttatttgattccattcctacacacttcgggttttatttttggtttgtataaaattttgaatctccgcagtccttaagcttttaatttctattcctaaaacttttgatttcatatttttttgtcctgaacataatcatggaagagaattcttcaatcccaacacttaaattcatgtctcaaaacatctcaaaaaattctccttttttatattttgatctatatttctttttacatcatttttattatgaaatattagtattatgtaatattataatttagagaaagaaaatagagaagagatgagaattttttgagtgttttcttccaataggtgatctcctatttatacacatacaagagtcaaatattaagaaactaagagaaagggaaactaagaaaaagggaatgttgattacattaatggtaataaataaaaga

SEQ ID NO: 294520 - DNA, 441 bp, Cannabis indica
taatttttaaaattactcttaattatttttttaaatttttttcctcacatttattttatgttaatttcaatacttatgttgattttatttttataatttttctaactcatgtatatattatttttttttatttttttaaagaaaatttcatataattttttatttaatcttttgtcataatttttaaaatttaatttaattttatttgataggtatattttttaagaatataaattgaaagaaagaagttaaaaatacttagtaaaattaaagatataaattttatataaaataaaaattattaaaatggggtgtacttaaaaaattttgaggtgtaaataaaaattcctttgtgcacatatatttttacatatatttcccacttttaactataagaaaataactaaaaaaaagggaactcgtgaaaaatttgaaagcaaa

SEQ ID NO: 294521 - DNA, 646 bp, Cannabis indica
atgcataagtgaatttttttcataatcatgttattgaagctacttgaaaattactcatgttttggagattgacttgtttaatgtttatttagtgttttactcgaggacgagtaaaagcttagtttgggggaatttgttaggttatttttagtattaattttagattaagtttagtatatttttaattgagttttaatcgtgtttggagcatttttacgcttgttatcttttatttttgcagatttaaaatagaagaagattagaaaaatatcagagaaaaagatgggaaaaagataaaaatatctatgatatttaaaatagagaaaattgtgcaagaaaataaagctgaaacttcaagcctgaattcgactatcttctgattggattttggaaaaagtcaaaacataaaagttctagatctctcttttatctttccggaacatcttgaatcgtccaattccgagcaatattgagagagttatggccaaaatactatcagtcgacgcagcagaaaaatcacttccaacacgggccgcggcatggctttagcatgccgcggcccgcctccctaaacagcacaaaaatcgtatttttatctcacgtgggtgttgggggtttcctagttcgaataggcatttaacatgtg

SEQ ID NO: 294522 - DNA, 547 bp, Cannabis indica
tcgcgtattctgacactgctaaatagatggataggacttcgccgatcatgggctttgataagattggaggttgccccaaatgcgtttttaaggcttgaaaggcctcctcgcatttttcggtccattgaaacttcttattgccttttaaaatctgaaaaaactctttgcacttatcagaagatcgcgatataaagcgatttaaggcagcgaccttacccgtgaggctttggacctcttttggcttagttggtgatggcatttccaccaacgccctgatctttggcggggttggcttctattcctcgctggtttaccatgaatccaaggaatttcccggaaccaactccaaagacgcacttcagagggtttagccgcatcttatatcgacgcaatatatcgaacattgcctataaatgggcaacatgatccttcgcatgttgagatttcacgagcatatcatcaacatatacctccatggtttttccaatgagatctgcgaacatcatgttcactagcctctgataagtcgcacctacatttattaaac

SEQ ID NO: 294523 - DNA, 544 bp, Cannabis indica
tggacctagatagggatccggatacgaacctggactcggaccaagacccaaactgggatcgaaatgctggacttagatctggaccgagatcttgaccaagacccaaacttgggcccacactcgggacccaaacccacaccataaccgggacttggacccataatcaggatagggaccagggaaatagaactaggatcgggacctagtacccgacccatacctgaacttgaacctaggacccagctcaagacccggcaccagaagtagaaccagactccgacccgagattgggatccggatctagacccagggcttagacaaaacccgtagtcagtgtctggatttgggaccccgccctggaccagaacactgacaaggacccgaacccacacccggacctgaacccagtcccaaacccaaaagtggacccgaacccgtaccctgtgacccaaaattggaacaaaaacgggaagttgaccgagactggaactaggacttggacttggaatcataactgaaattggacatagatctagaaccgtaa

SEQ ID NO: 294524 - DNA, 528 bp, Cannabis indica
attaatttaaaaaaaaaaaatctaaatatctgaccttaaatttaaaaataagataaaataatcaaattttaaaaataaataatcaattaagcaaaaaattagatttttacctattttcaagcttcaaatttcactaatatcttaaattaatttaaaaaatactaattaatttaattctgataattaaatttgaaatatgaaaaataaaaatctaaatacaaaattacacaaaaaatttgaaattaattccatgaaaaagcatgaaaaaatgaagaaaattgaaaaaaaattgtaaatggtacggatggtatgcattgcataccatctgcgcgcgctaagcagggtgcacggccaagaaacctcggccagagaggctgctagcagcctcgttcgcgcgcgagccaaggtttcagacaaattgaggcttcagaataagaaatctcggacaaccccgtgtctgaggcgaacgtggccgagtgatcgctcagatccgcgtgcgtatggggtgacaccacccctatctttttt

SEQ ID NO: 294525 - DNA, 537 bp, Cannabis indica
ccctgctagatcaggtactcagatcggatcagatctgacttgacttattcggatcggatctgatatgacccgactgttttttttaagaattttaatattaacttataattttatatctattttaattttgtattattattaaatacaatattatgtttggtattgacatgtattaatagattgtgtaaatatctaagtccgggtctgggttcgggtccgggtctcggtccgggtccaagtttgagttcgggtcctggcctgggtccgggttcgagtcttggtccgggtccgggttcaagtcccggtctgggttgggatcccgggtccaagtccgggttcggatcccgggtctaggtccaggtttgggtccggaccgagttcgagtcccgagttccgggtccgggtctgggtcccggtctgatcccgggtcttgggtcccaggtcccaagtcctgggtcccggtctcagtccctggttcgggtccgggtctaggttcgggtcttgggtccgggtcccgagtccgggtttgggtcctgg

SEQ ID NO: 294526 - DNA, 874 bp, Cannabis indica
ggaaatcttcattaataacacaatcaaactggattaggaatgtcaagagagagttcttgacttgcacaggagagctcaaccccaatccacatggcactagcgttgttaatcaaagcataattggctaaaacatgagctactctattggccttacgaaatacaaacgagataccatcaacactatcattgtaaagaccgcatatggttaatgctttgaattattaaataattaaggtttatgtatgaaattaattaataattatgaaaggtatattttggaaataaatttaatatcatttatgctatttaatgtaaattacccaatttctgtgtttgtgttcggaagctgtgggaagcgacgttgggcctttagagagtcatatgttgtaattctagaatattgtggggtgttatagttaaattttagaggcgttagaattttcggggtttgttatttgaccaaattacccttaggagtttatagtaaattatttagcttgaagggcaaggaggtcttttggcaaatgtttattttgtcttatttgggattatttttaaggctgagtataagcttatttaaaaaaaaaaaagaaagaaaaggaaaaagggaaattgggcatttttcttaagctagaagaaacttagaggaaaggtgcatctcctctcttctctctctttctctttcgattctcttgggcagcagctaggattggggattttgagtttgaatcaaaggattttagtgattcttagaagctttaatccaaggtaactcttctttattaattttcttaatctaggttaggttttacatgtgaaattagattctaggttgctgtgtgttttgaaaggatttaatttagtattctggaaa

SEQ ID NO: 294527 - DNA, 551 bp, Cannabis indica
ggctattgcaaaagttcagaaccgttattacaacggtaagagacaacaaatacgtcgtaaacatagtactgttagagagttcctctctattggagcagtaagagtggatcatgtacgcactgatgaaaacttagccgatcctttgacgaaaggattagctagagagaaagttcttaaaacctcaaaaggtatgggactattgcccttagaataaatgagtcactcataatggtaacccgacctataagactggagatcccaagaaataggttcaatgggtaataacaagttatgatgtgataaggatgagatcatgctatgtaaagcatgaaatcctgaagcgatagaaggttgagataatagaaactcttaatgagatctatactctatgtagagtggagtaccgagctacaggagtactcttgatagactcacctacgtgaatgtagaagtggggccgcttcctatgaaatttgggcaaatttctagagcattcactacactgggatagacgtgcatgtccattaaagcacgggcttttggcttacacc

SEQ ID NO: 294528 - DNA, 618 bp, Cannabis indica
atatatattaaaataaaataattaatcatacttacaaaggtatgaagaaaagaggaaatgagaagtacatgaatgtgagcggagaaataatcgcctggagtttatgaacctgttgtatgtttgtgtccattttttaagagaaaaaagagacaagaaagaaactgaaagcctccttctctaccattttttttttctatatatatgtatatatttatacaaccctctaaacaataccttaacaaccaaattaacataattaccttaattatatatattatttcattctgtttcttcttttgtaacttgcttataatactccacacatttcttaacttttttttttttttggtaaaaggaaacgtctatattataatagggtattgttttggaaattaattggaattaataatacggcatttatatttaaatttatgaaaataaaatcaaaataagtattcaaattaatataaaataaattttaaaaaattaattaaatttatatatttttttaataatatggtgtatttattatgtccaatgacactttgggacatttttaggtatagatatccttttaccatcagagtaactttttttctgggtagatcaaaaagtccc

SEQ ID NO: 294529 - DNA, 523 bp, Cannabis indica
gaccttgcttgttccagcaagcgccgacgaagccggcgagggagacgaggaggatgaggacgccgaggatgaccaccggccaccggaaggcggtggatgcactcgttgtcgggcttggatgctagccatgtcccggctgcgattatgggtatggaacagagaaaggcgatgaagttgagtacagcggttatgttgttgtctcactcccatggtcgaaggagaagaaaaaaaagtagaagagagtggtaggtaatggtggtgagtggtgactaagaaagaagaagaagtttgttgtgctgtgacttttttattcttttatataataactcgaaacttctattattataattagaataattagcttttttagtccctgtacttatgacactatactatgatgcctcttaatttataagtgtagttaaaaataccccctaaaatatatcagttggaatagtataatccttctatctaattctgttaaaattgactaaagttgactgttaaattaataatatggcat

SEQ ID NO: 294530 - DNA, 630 bp, Cannabis indica
aaacataaaaacgaggaaaactagggtttctgaaaattccccaaccggtagaccggttgcccaaccggaattccggttctgggaattactggacacccatccggaattccggttgcacaaccggaattccggttcctcgcaggaatttttcaaaaattcataactcgatcaattctaacccaaatcatgcaagatcttccagacctgttctatatgccccaaataaccattcaaaggcaacaaaatcacccagaactcacagaatcacaaaacaccattaaagctcaagctttgagttctaaactcaaacttgagcaaatcccacaaacatgcaatcaaactagattaattctacttaaacaagcataactaagcctctgaaaacaattaaaaacaacagcaacatcacagaaacagattacacaatattcatgttgaaaatcaaacttttgcataataaacctctagcatgctcaacctaggaatcatacttcacaagagcttaattaccaactaaaaatcatgctttaaaccacagaaaacatcaacaaaacacagcagcaacaacctcaattaatcatgcatgcatcaccattttcatcatttttttccaacaaattaaagagaaaa

SEQ ID NO: 294531 - DNA, 612 bp, Cannabis indica
cattaaaaaactcgccgagaaaacccagtgggacaaaactcggtcaaggaaaaaagagtgcagtatgaaattactccccctcattttggcattcgtggagatcctttaatcgacgcattccaatcttgtgaaccatcttctcaaaagttgatgttggtaatgacttcgtgaataagtctgcaagattatcgcttgatcgaatttgttgaacatcgatatcaccattttcttgaagattgtgtgtaaagaagaattttggtgaaatatgtttagttctgtctcctttaatgtaccctcctttaagttgagcgatgcaagcagcattatcttcatagagaattgttggtacttctttattagatgttaatccacatgttcctcgaatatgttgtgtcattgatcttaaccaaacacattctcgacttgcctcgtgaattgcaagtatctcagcatgatttgaggaagtagccaccagagtttgctttgttgatcgccaggatatagcagtgtcaccgcaagtgaaccaaattagccagattgagatctggctttatgtggatcagataaatatcctgcatctgcgttagccaataagttgtgacccacaattat

SEQ ID NO: 294532 - DNA, 539 bp, Cannabis indica
gtctttgtttggtatcgggtcccagatttaggtgcaggtccgggtctcaatttcagtctgggtacatgatcgtgtccgggcccaagttccagtcccagtttgggtctgagggtaggtctgtgttcggttctacgtctgggtccgggtcctcgtcctggtcacggtcttagtcttgttctagggtcctggttcggcgattcttgtttaagttctaattttgggtcccaggtgtaggtctgtgttcgggtttggttctttgtctgggttctggtcctagtctgagtccgagatctagacaccaactactggtctgttccagctcccgttacctgaatcccgagtcaagatctggatcactgtcacgggtctcggtctggtttttgttcaggtcccaggtcccatttctgagtttgggttcgggatcgagactggggtgcggttctaggtcccgaccctatatctgtttccatagtctggttccttgtttgggtctgagttaaggttcgggttcaggtcccgagtccaggtttgggttggga

SEQ ID NO: 294533 - DNA, 308 bp, Cannabis indica
gggcacaaaacccaacagatcttagatcaaaagatcttaatcctaacatggctacgttcgatctcaagagtgttatttgtgttcttagagctgttagttaaagcctaccatttggttcgagtaacacgtacaacttgggaacatgatagtacaattgagtgcgaacgctaatcatagatatggcatctataaattttatctaaacatagaagtgaaatgatgatttccttcgagcttggcttaatagagataaatggaagagctctcatttcagtgatagtattagtttactaaaacatcattcatag

SEQ ID NO: 294534 - DNA, 561 bp, Cannabis indica
ttgcattcgttttagtattgaagagttcactttgactatcgatttggattgtatgggggattataataaaataaatttactcaaaattcaaacaaaattattgttggaaattattttaccaggatcttagatctactcacaagtatgtttattaacatcctaaatatgaactttctaaaacgatgaaataaacacatataaagtttaagaaaccttacattgggtgcagcggaataaaatgactccttccgttcagatatctagcccttgattcctttctgtagcagagcattatcaatatctgaacctggatctctttctctgaatctttgatgctgaaactcctttgctgatgatctttcttcacgatcttcctcactatgattgaggtatcacttgatgtgtgtgggcactactctaatcactaaggatttcgaaatattgaagaagaagagagggagtggtcagccagatagggagagagaaggctcaggtttttctgattcagaagtctagaagaaaagtgtaatttcctgaagccttcactatctatttatagca

SEQ ID NO: 294535 - DNA, 554 bp, Cannabis indica
aaactgttaaaaaaaaattaaaaatttatattagtttatgtatatgtatattatatatttgttattataaaatttatatactatgatcaataattaaaacttacagctttttgatcttctatgtaacggttggggttggcacgtgcgacgatgtcagtgatatatttcaaaacataaaaaccgcattcttggcttttaggttgtcttggacagtttgcttgtgaaattccttgccacgggccaagatactgatgtgcgtcccctatatacatgaatgccctgtttgggaaaattatattagcatttcaattcgttagttaatttaaattcgttacataagaagtcattaaataattaagatattcaaactcaactaacatgcattgataattaattatatattaagaaaaagttagtaaaagtatatacctataattgcaagcccaaatacgctacacacaaaattatgccgaacccctataatataaagaaatacaacgaaattacaaaattaattatttcataacttataactagttataaaaaattgtaac

SEQ ID NO: 294536 - DNA, 521 bp, Cannabis indica
ttcattagtatttttcaaattttaatatgaaaattaaaattataaaatatagcttaagaaattataactaaggttataaactggtaaacgttatgttggaggctgggatttttgctctagagagaaaaatttgttagattaaattttggtaggattatttatctaaaattaatcaattataattaacgttttctaatcagaatattctgtcaagtattagaatattctgttaatattttgacagaaaaataaataataatattaaaccaagaattctgttacatagccacattttatataaaaaaaaagataatattttttaaaaaagtcagtcaataatttctcataaaccaaaattcgtttatatagccacattttatatattcagatttagatgtggaggcaaacaattataacctgatcgagccaaaaaaacaaatagaaaaattatttagcaatatatatataatatataaagcaaaaacccaattgtatttttttagatttaatgagatttattt

SEQ ID NO: 294537 - DNA, 289 bp, Cannabis indica
aattattaaaaacaaatcattaagataatgtttaatttaaaacataaatccctacgtttacatctttcttatttttttttctcttttccctattcatcatcgtgttcttccttctcaccatcatcatcagctcctagatctccatcgagatgctacgttcgactctgagaaaagagaagccgagaaagagatggagagagagtgaacatgggtttgatgtatatgaatgtatacgaacatgtattactcttataaatgtatatgagcatgggtttgatgaatttttttt

SEQ ID NO: 294538 - DNA, 938 bp, Cannabis indica
attgcgagagaggcgaaaaggtgacgcggtttagagtaggaggacggggatgacagagagcgacggtggagaaggtggcgagtagggtgtccgagtggagagagttgaagcggatgcccaggtgagtcagacgattcatacaagttttcggctatggcgggtggttttgtaattaattgaaactaagaagaaatagcctgaaaagagttcagagttgggctctaatttcaagtattagacagggccggtaagcaagcaactgaggttgtttgtattgtagggctaaaatgcaaaaacatcttaaaacttttaataaaataattaaagataataaattaactaataaaaaatataaaaatatatattatatattatttttaaaaatatatataataattaaattatataatttttaatattacataataatatgttataacaaaaattagaggtagggagaaaattatcaaattcaattataaccgatcgattcaatttcaactgatttaatagaatcgaacatctaatcataattggatcaaatcggatgtaaattttaaaattctaatcggatcggacatccgatctaatggataaccgactaaactgatccaattatcattatgttcatttaattatagttatatactttaaaatacatttataattttatatatattatttaaaaatatatattaattgatttaatatacatttaacacatgatttataataaaatagaaactaaacattattttaaataaactatataatatacacaacaaaaactatatattatacaacaaaatatttatacctgcaataaaaaattaaaaaatgtatataatatcattaaaaaaattatatatatcatattaacaaaattatatactattaaataattatatcatacttataaaattatatatcaactttat

SEQ ID NO: 294539 - DNA, 544 bp, Cannabis indica
gacatgtactaaatcatgcctcatgaactttcatctatgttagattttttttttttactaaaattagacaaaagtccttaaatctaacaatctaaatagttcatggggcattttaacgaccttaaaagttcagggggtatgatttagtacatgttaaagcttgaggggcgaaaatcctaattagcctaattattaaagatatattacaaaaaaaatttaaaaaaaatagaaaaaagaaaacaatgttcaaaaatctataatgcccattttaaagatttattcttactctcttatctccaatataataataaatatataatttgtactataattaagatgcaaaatttacattatataaaattttgttacaattatttataaaataaaagttaagcaaacaaaaagtataaatgaaataaaataagaaaaattacgctgcatctagaatactcacctagtatatataaaagatgtactagaactatctcacgataagtttttttttttttcaattattaataactacatataataataaggccta

SEQ ID NO: 294540 - DNA, 387 bp, Cannabis indica
gaaaaataaataagaaacaaaaaaataatgaataataataataataataatcaccttctcattaataaaaatcatatggagacttattaattctctattcttcttagtattaacaaacttctatattctactaactttaaatttaaaaaaaaaaaaaacaactgatatgagagaattaaaattaaagaaaaagcttagtagtaaattaaattatgaaattaaagagaaatagattaggatatatatagagtttagtagttgaatttaaaaaagtaatagttttttaaacttgatatatttatttttgttgataattttttaaattttttcttaaaaaaacgtgatataggtataaatatataaaagtgataggtcaaaaaagtgtag

SEQ ID NO: 294541 - DNA, 568 bp, Cannabis indica
agtggattgtgtaaaagggagtttgtggctcttcccttggtgacatgcattacagaagtgcaaattttttaaagagccagtatatgatatgagtggaagaattttggtaagggtatttaatgcaggatggcctagtttacaatgccaattgttaatgtcattgatcttggtagtatgaaacacttgatttgaatacttagtaaaggaatcacatgtatttttattaatatcagtcacattacaagaggatataggggtactggtatgacaattacaactacaaacattgtttacatcagaatttttgtccagagtagtaaggttgcattgaagtgtggtgttgggaacttcaccaagttgatataggccatccttagttctccctttgagaagcactgtccctgtttgtttgtccttaacaaaacaacatgatttgtgaaactcaagaaacacatcattatccgtagttaattgcgaaacacttacaaggttcttagtcatgtgaggaacatttagaacagaattcaattgaactggtttagatggtaatgcagatggaaaggaagta

SEQ ID NO: 294542 - DNA, 369 bp, Cannabis indica
cttatttcaatcaatcttatgtctacgcaaaatttgtacaataattaattttgtgtacaaatatacacatgcaaaattctcattaaaattctattttcagtacaaatatgttgggttttgtgctctaaataaaactctatttcaatgtaatcttttctattcaattatcactaaagaaatagatttaattttattacttgtttaatgtgttatttagttaatgtgatcatttatttacttgtttaatttataaattcatccaaatccttatcacactgacattcttgtttattgtgtcgtcaatacagtggaaagtaatcaatattgtgtgattaaatgtattcctagatttatcagtacaaagggttt

SEQ ID NO: 294543 - DNA, 569 bp, Cannabis indica
atggtgttatatgattttgcatggacactggggaggtggttaaggaccgttcacaacaacatcacacatttcctacgtactacgcgccttttcagcgcgtgtcttataaccccacaccacacaacacattcctattctacttgtgtccactgccgcgcccgcgcgtcaactttccttccagtactttttttttttttttttttttgtaaagtaaaagagcccgctaagaagacagaaaatcaatgataaagcatcgcgattaatatgggagagcctagcagctgggaaataagataaagcattcttgatttgtttaataatgtcaccaaaaaccgaaatatcttctttatggctagaaagagcatcagtaatggctttgcaatctgtttccacctcatggactaagaagtgctcgttgatacaccactgaagcacggaaagaagagattttgcttccaaggttgggaccgagcctccaccggagtgaggctgggcaatggcagcaactaccagaccatcgctgtttctaatgatacctccgaagcccgctttccgggcggctagtgata

SEQ ID NO: 294544 - DNA, 550 bp, Cannabis indica
gcgggggtctcgggtccgggttcaggttcgggttcgggtccgggtcggagattggtgttgaccccaaattctttgtaaatattataatacaagctaatacggactatttattatgtattaaataatacaacatacattgtattaaaaaatttggtcgtaataattaatacaatacattgcttaatccaaacatagtgttatgtattatttaatacaatacgacccttatacggcgtaccaaacgagccctaaaagaagtttgtagtagcactgtcatcatcactagcatttctaggaacattcggtatttgtgggtagtatggcggtatttgcgaacttgtcatcatgtgagatgtctactgaccatgtggagtcggcatcatttgagatgtctgctgcccttgtttgtcgacatcatctgaatatcgtcattgataatactttaaattttttttttaaatatttgtgtacataaacgacgacaatatcgtcattgattatgttatcaacgacaacattatcgtcattgttaattatgtttttttttttt

SEQ ID NO: 294545 - DNA, 520 bp, Cannabis indica
ctttctctcttttgttcaaaaattttgcaaaatactatgtaagaactataacactgataaattaaatgaataaataaagataaatacatcgtactcgaatattttaatagatggtataagaatagaattatgagatatattagagagaaaaaaaaatggctgaccaaaacataaatgttatatatagtaatatgtaatcttttaaattttcaagagtaatgtacaattgttaatattgattataaataataattattatattaattaaataggaagatgaaagagtgtgcactgtgtaaatatgtgatatgaaatatacatcattgcatttattaataatgaatgaattaatcataaattttattgataatacattaattttgtaagtgaatatttttatgagtaaaaattattgaaaagaaaaatagatgatataaactaaaagaaaattagaagtcaccttacctcatcttcattgttttctcaattatatatacgtaagcattgagtatttatttaa

SEQ ID NO: 294546 - DNA, 616 bp, Cannabis indica
atattagaaaggtagcgaaattaacaaattaaataaaatcgcatgtcattataataaattagagagaaatactaaaagatacaagtggtgcctagtactcacattcgtatcaatctcgctattagtgcaattaggtatcgagttcccaataacttaatataataatttgtagggagtattgctaaccaatcgcaaagcaatgcatataaaaatttgctagacaccagtgccttatagcaatgcactaaattaaattaaaaaaaaaaataactttctaagtttaataaacagagcgtgtaaacaaaaattgaatgtcctttccacaaatgtgaatgtaggatataaaataggtcacacaacattttttacttttgaaaactgaaaatgagagattatataaaaatgttggtgattgaatttttcaatataaatattagataaaagaattaatttgaacaaattataagaatgtaaaatttatactttaaattgtaatgctgaaaaaaaaagtaacaaatatttttaacttttgagttttttaaattttgaaaacattttcaattacaaatatttaagattagacttaaatgtttaaattttgtatcttcaactatta

SEQ ID NO: 294547 - DNA, 645 bp, Cannabis indica
tcaaagaattaacaataccttacacacctaagataccatttccatattctggaaaagcaaaattaaagttgggctctcttttgacagcaaacataagtttctaaatgctagcataattctcatcactatcatcatctatactttaatctccttcaacaattgaatgctttgtctctatccttaaccacataactacaacaacatcaatttcagttctctccaaacttgaaagtccattgcccttgtctttgaatgagcctgacgaatgttgtctagatttagacaatcaaactatgtctactatgcagccatataaggtttgattccaaaaataaatacgctaatgagttgaacaaaaagctttaagagaaaaaaatcaaataaatttgtttggaaagaaagaagcaactttaccaagtgaaagataaaatttgaaaggattatggaaatgttgagtcatgtaaatgcagtaaagataatagattcccaaatctccctctactgcttatataacctgcacataagcttatcaaagttaatcattttatcattagtaattcttgaaatgagaaattataagcaaaatgatcacgttattattattattattttttaaaaaaaaggcatttcattatgaaaaacaat

SEQ ID NO: 294548 - DNA, 622 bp, Cannabis indica
gtcgaagaaccaagcgacctcgtggggagaaggagcgccccatccctgagaagcatagaggacgaagagggcagacaaatacttaatgcccttgggagtgatctgggccgggcagaggccgaagaagtccgccacatcccggaagtacttgtgcaatggcatcaacgccccttgctggccatgagcccccgaccaggcgcacatcccctcactagggtttgaagcgcgattgtcgtgggcgggaatgaagcagtccagctcgcccaggtatccgtcctggtcgagagtgcggaggcgtgcctctgaaatcttggacggaggactcacccatctggcgcccaaggcaccctgcctccgatgaggaaccgcctcagcaagctcctcggtgacgtagtcgacgcctgcaaccaggacgtccccatcagcatcaactggttgcccagcctcattgtactccccatagttagggggttcaatctcctcctctccctcagcagcgggagggctgcccggacgtgcctcgtccagctcctcaacctcctggacttcagcgtccccctcacggtcctcctccattgggaccgccaaatcctgttcggcgtcgggcagggtggcaagccga

SEQ ID NO: 294549 - DNA, 533 bp, Cannabis indica
caaggatttcgatccaatgataactgttacactctaacccctgtgtttacttgtcattcagctatcaacaacaccacagatctgtggcatgccaagcttgggcatattaattttaaaaacctgaaaaaattgtcaaatgcaggtattgttcgaggtcttcccaagcttggtaaggaaagtgaaggtaagtgtgaaccgtgtcaacttgggaagcaattaaaaatcactcacaagcctgtgtctgatatcaatacctcaaaggtattggaattgcttcacatggatcttatgggtccaatccaagttgaaagtttgaatggtaaacgatatatctttgtgtgtgttgatgatttctctcgttttacttgggtagatttcttaagagaaaaatctgacacttttgatgcctttaaaactctttgtctgagattaagagttgagaaaggttgtaatattgggaaaattgttcgaattcgaagtgatcatggtaaggagtttgaaaaattctgtgtatgatgatttttgcaagtcta

SEQ ID NO: 294550 - DNA, 875 bp, Cannabis indica
ataattatttttaatatttttttattattaaagaaacaataattgttttatttttttattattaattattaattatcgttgttggttttttttttcagggaactgcacaactaataattccagtatcggaccattacacaggcagtgtcacatggcgcgggggtagttactactacccgaagattaaggctaaatttgaagaattcaacctatgggacagggtgagggaatcccctttcaaaaaatttttcgagagagagcccatccaattttcaggagcattttttcatcagttgatgcttcacaaaataaaatttgacaagccggacgaggtgcatttctatgtgggaaggaagagatgtagatttgggagggtggagttcggcttggtcaccgggttaaacttgttgcccggccctactgaggaagacatcaaagaaaaaggaagttctgaccggttgattatggaatatttcaacggtagtgcttcgatcagcttcggccaactgcgcagagtttttgagagctgcacagaagctgatgatgtctacaagttggggatggccttgtttgttatgggcgtcctcactggtaaggaggagaagactgtcgttcctccttttgtgataagaatggttgataaccttccattcttctacgagtacccctggggaaagatttcttacaccaagctgatggaaacttgtaacaaggattacttggatgtgaagaataagatgttgaaaaagattgagaagggagtcactcagaaggaggcaaaatactcagcctacggctatactgcagcgttgcagtattgggcatacgaggccatattacagctgggcaacgagtatgcagtgaggaggtcgcat

SEQ ID NO: 294551 - DNA, 521 bp, Cannabis indica
caatgcaagatccaccgcctgtggatttgccggatcaaccatacccctacgagttttgtaccaccatcgtacttgtggttagatttttgaatgaagagcgattcttgattctgctctcaatgaaagcaccaaaatgttgactttgcttttagccaacgacaatgagtctaatttagtaagcgataagtagtttataatgattgatatatagtaaagctatataaagacacaggaattttatagaggttcagccccaagcagttcggaaatagcctaatcctcattatttgtattaactcaagaacaacgagaaaggatccttttcttatagctcttacaacagtatctctgaatatgaattcttagataatatctcttaagtaaaatctttcgactagaatgttttcgaccctttgcccagtgaacatgcatcactatttatagggctatgagtttggagaggaagtatttccgtttctcgttacaatggagtataagcagaaagattgcataataaatac

SEQ ID NO: 294552 - DNA, 619 bp, Cannabis indica
actcgaaatttattcattaaataaaacatttccatgtatagtgttgtagaggtgactcggaggcgatgaacctatatttcgaagcttcaataaatacttaattattatcgatctcattaatagaataatttaatttattaattctattattactcctctataaatatggaattgcactctttgacaatatacaattatatttacaaaattcttatttgtattccattaatataatcaatataagcaatccaccctccaattattagttcataattagagttggtcaaaataccattttacccttctaattatctctttattccttatgtaccattagttcaatgtaaacagttaatctataatttattatatatttggatctaactgttagcactcccagaattaacactataagggaactaatatttaatccgttaggaaagcttagattccactattgtataacatgttcccagccactcatgttataaagctcccaaagcagaagttgtaagaatcatcttctctgagaaactttaataagtgaatcaaagaacttaatgaacacaaatatgagttcatgtatacttaggattcatgttgatctactaatgatcat

SEQ ID NO: 294553 - DNA, 555 bp, Cannabis indica
aaaccatcattaagtttgtcccccttcttggggacggaaacaagttcataaaaatacaaaatttctgctgggtggggagatcccaatccccgggcggcataaaaaataaataagcctgaaagcaggcggtatgctggggaataagttggtatggcgcaaggccgacaaaactagaaaattaacaaagtaatcctgaagaggaagcatgaccccagccatcagatgcgtttggctccaggccacgaagccgccgtagttgtggttgggcgtctccgcgtcgcaaggtggccgatggtaggtcccagatgtggaaggcttgattccagcaacctccacaatgttctccaactggtggggacaggtcaaagtagagtaaagctcagccgcctcccatccagtcgcccgggacttatacccctcctaggcaacgggtcccaaggagacctcttcaagggtagccatgcacttaccacttttctttgatgactttgagccagaagccgacatttttctattctgtaaaaagagtaaaattccaacagttaggccccatac

SEQ ID NO: 294554 - DNA, 697 bp, Cannabis indica
gaccagaggagtggatacagatgatttattcctttatgcttctatcgtggttgacacgatttggagggctcgaaacgacaaggttcataataacaatatgggtagcttgaaacattatattgactctataaattattgttacgctgattatggatcaagtttgctcaagtctcgacaggttgctgatactctgggttggtcccccccgcctgaggattgggtcaagatcaactgcgatgtcagagtcggggtggaatccatgtgtgtggtggcaattgccagagatcatacggaatcgattttgtgggtggcgactaacaagcttcacttcactgactctcttatcggggaagcggcggcttgtatgttagctttggagacggcggccaaaatgcatcacccttttgttatggtggagagtgattctaagatggtgatcaagaacctaaagggtgtcgaatccttttggcagcttgagaactacacaagacaatgcaaacatctctctacttttttcacttgttgtaatttttcttatatttctagaaactataattttgcggcccataatgtggccaagtgggcggttgccaacaatgtttctggtatggtagaagtctctactattccgagtaatattttctgtaatgaccgtgaggtgtgactatttagtttccttctaatatatatacgcttt

SEQ ID NO: 294555 - DNA, 686 bp, Cannabis indica
aagttgagttccatcaggaaaccaacatatgggaaactacttcaatccagatcaattctttgatgggtcgagtgctaactggcagggatgactatatttgggacaaacaggaaattcctggtcactcatctgactccattctatagggttcttcatcgggtagccttgtacaattggtttcctaattctcatttgtctgctgttacacttgagattggcaagttcttgtatgctgtaggcactaatgtgtccattgatctgccctcgctcatttttgaacgggtactggaagcctcagaaactactggcactcgtaacaagctaccatttccaagtttagttcaacgagttcttatggatgctcaccctcctctcacaacacatgattatcaagttcagaatccggttctcagtaagagctttctctcggtggtcaacaggaagccttcttcaaccactccctcaggaaccaaagtgagtaaaggcaagtctcctatgttcaaagggctttcggattccagctggcaggtacaaatgttttctgagtttcaatcttttgccaaacgctataagaaggatcaaaagcgtcagcttgcctttgaggcctcaatgtatcaaatggttcgctctatcaagtccactcttttgcaccattttcctggggattctctgcctgacatctctct

SEQ ID NO: 294556 - DNA, 742 bp, Cannabis indica
ttaataaaaaaactttaaaattttagaaaaaatttaaactagtgtgtttgcaatatatcatgatatcatgtatttctagatgaattccggttaatcatacacacacatatatatacccctcaagtaattttaaagattgaaactttgcaattacttgaaaaatgattaactttattaataactgaagttcaaaatattgcatcagaaatatgagttacaacatcaatttactggtagtagggtagcaaatgtttcacgttccagtagttttttatcagcaagccattcagtcgagccaatttgtaaacctcggttcctactatcccttcgatcacataaggaccctcccagtttgggttgaaaactcctgcagatgcgtctctcgtatttgcaaatactcgccttagcaccaagtccccaacgttgaagagcctctttttcacccttttgttgaagtatcttgttactcggtgttggtatgctgcattagtaatctgcgactcaacatgtttttcatcaagtagatccaaggataattttaaaagttctttgttttcttcttaattataaaactctcgtctgtgagtcgagatatttacttctactggcaacattacctctgagccaaatgctaacgagaatggagtatgtcccattgctgtcttctcagtcattttatgagcccaaagtacttgagatagttcatcaacccatctacctttggcagcgtctagttttttct

SEQ ID NO: 294557 - DNA, 684 bp, Cannabis indica
acgctcatcgaaccctacaggcctaagactggcgtacttgccaacagaagggacgtaatgaactgctaaaggagacttaccaccagagccggaagtgctggcgcccggagccccagtgttcggctcctgagctgaaggctttggcgtgggggcccttctctccgccgagtccccaatatgaaggggcttcccagcgatcgcctggcttctcctctcgaccgggctccccacacgaagtggcctcccagaagctgcttgatccttagagtaggccttctcctgggccttccggtagagatagtcctggtacttcttctcggcagtggcgatgatctcgtcccggaaggtcttctccgtggcaggcaccctaacgttgggacagataaccctggaaaggttagagtcctccacggattgatgcggcaggatgagttttgtcctccgacaattctccgtcgtaaccacggccccgacgtcgaggtccgcccggtcataagaggcgaaggcctaggctctccggagaaagacctgagtaggcgcggtccgctcgtaaggagggatcctaacccactctgtgaggagctccggatgttccactgctcggaacccgcaagagaagaaaaaacgatggcgatactccttaacatgagtttgcctattataagggaccaccccatcattggc

SEQ ID NO: 294558 - DNA, 609 bp, Cannabis indica
aagaaagatgggtttacaaagtaatgctaaacttgtgtatccacgtcacttttgtgattatttacagctataatccttactttttaatgaaaaatattggctgaaaagttgaattgtaatgaaaagagaagaatacatttacaagtgttttgtatttgaaatataagtatgttatattcaactttttacaaatatatataaactatctcagttcttttccacaaaaatgaagttacacaaggttaaactactagaaacgtttgttgtcttttttcttcttcctctttttttggaattctatctggacaatcataattgtagattgtcataaagtaatgatctatatacttgtgagattttatattttaaacttttgtcatttaaaatcttagaatttgaaagtgcggtttgatctaaggaagtgttttgttttctgatgcaactttgatcgttatacaaatggaaatattttggaatattaggagattttttcgactgttttcagttttttggaattgtgttgtcgaaattgagaataaaaaataatttgtcatttaaaaatttaaattgtgtttggtctatttttttttttgcctaaaaaaaaatact

SEQ ID NO: 294559 - DNA, 936 bp, Cannabis indica
gaaggaggtttacagaaaggggtattaaaaaaattatggaaaatttggaaaatcgtgatcatgtgatctgcacctcctgacgcacgtcccatccaactgtcgctgatgtcatccttctcttcagcttgttcaaaaagcaacagaggtttacagaaggaggtattaaattttttttggaaaatttggaaaactgtgatcatgtgctctgcaccttctgacacgcgtcccatccaactgtcgctgacgtcatccttctcttcagcgtgttcaaaaagcaataggattggattaaattttaaaaacggtataaagtagcggtaatattaataattagaaaaactaagttattattggaattaaatgtacaaatacgtgtccacatgtaaattatccttaaaattattacactctttttacaccggttgtgtaatctaaattaataattaacaaatgcatatctctaaactctaaaactcacattttcctaatatttggaaaagtcgttcctatctttatgtactattcaagatagtctctctctttttggactatgcttactgtttaagactatagttgtaaatatgtactgtcataccgtgttgggccataaaaaaaatacaacttgtgtactaatttttacaactatataatcttgactctaagtatagtctaaaaaatatggggtcatatcaccaattctaattttttttcaaattttaatatattttatttattttaaacatataatattaatatttgtacatatttttgtataaatgtaaaaattaaaaatcctaaaataatcattaataatatatttagagtaaataaaatagtattctataaaatgtagagcataaaatagtgaaatttaaaagaatagctttaacataaaaataaaatttaaaagcatctaatgtagtatatattttttag

SEQ ID NO: 294560 - DNA, 757 bp, Cannabis indica
ataataataatataatattaataaaaactttattattaatagttatcttattatttcttaggcgctaagaaatttatacttttaggatatttggtcaactccaagtactcaaaatacttcgatatttttaaaatcaacttattttaataatcctatcaatatttttaactaaaaccgttgtaatatttttgatctccaatcgagtcttcacagtcgccaaacctgaaaatatttttgtttcacatatagctcatattacattcacacatattatataaatctccgtaatttataaattacgcttatttactcacttataataaaatttaacttttatgctaaaataaattaatagtatcataatcccacctattacctgattaacctaaaatataaatataaatcctaatcattcactgttagacttaccgagatataatacatattatatttttaagaaacaacacatcattacacattattatgtacaaagtttgtgtaattttgttttcttttacaataagaataaaaagtctgtaattttgggtgtgttctaatcatttttttttatagattttaaaaaaaaaaaaacattttcctacatagatggtgtttggtaatacttttttaattaattttatgtttttaaaattagaaaagtgaaaatatttttaaaaaagatattctataaaactgtttttattttttcaattttttaatttgtagaatcaaaattttaaaaacaaaaaaaaaagtt

SEQ ID NO: 294561 - DNA, 467 bp, Cannabis indica
taccgtgcggtctcgatcggagtggttctgtgggtctccgtcggaggcgtctcggtcggaggtggcggtcgtctcggtcggaggtgggggtcgcgcggttcggttcaggcgaagtgggtagagagagtttgtttgagaaggagagagaaagggttagaaattatgagagtattttaggggttttggtaaaagtatcctatttttaaaattaccctaattattggttctcctaaccaattatcccttataaaatgcataaaaaatcaaatttcccatatatatttagattttttattttattaatatttataatattatgaaataattacataaaatattattttttataaaaaaattacaattttacgtttaaatattttttttcttatatttgtacggtattttataaattaaaaataacaaaaaaactacataaaagtaacaaaaatataacatccaaataacat

SEQ ID NO: 294562 - DNA, 621 bp, Cannabis indica
agttagcttcttgtaagcatcatcaaacatttctccaatcaccaccattaataatgcctctcatggtgctttagcattagtcaaaagaatagaacaaaaggtattcaaagatatacggctaataagtatagaggatttttttgaaacttaaacaacaggattttctatatagggattttttcaaaaatatacataaaatataaaataattacaaaaataacttaacaaatctcaattacaataatatcttgccacatcattaaaaaataccttaatttcaaaataatatgcctgaaatgaaactaatcctgaaatttcttttttttttttgttaatttcctgcgtttcaaaagtaaccttttggttacttatgatattgataagaaaccaataagtaactttttcataaaaaaagtatcacttttatattatataatttgagatattttttggttatctctaaaacttacatgtatacattttaatgattaattaattatttaggttatattaatatatatttgaataactttaagtttatttttcctaaaataatgagttgtcatctaataaactaccattttaataatctgtttttaaaaaatatatatttttttaaat

SEQ ID NO: 294563 - DNA, 741 bp, Cannabis indica
tggaaagggattgatactccacatacgaaagatgggaatggaaactacgacatcctctgagggtatgatcgtaggattggtgaagggaaggtgcggtctttgagtggtgcgaggatgcattgtgccgagtcgcaataagtttaacctcaaaaaggtggacaagtcggatttagggactcgtgaaactaagtcctcacaagagaacggctcattcagttgcgtgttaccaactgaatcagtctcgctcccttcggcatctccatccctcatctgattcatgatcaggaaccctcccaatcctcacccatctcttcgacttcggtgtcagggggaagcctagagtgaacaagatgtttgcgggctgataccgtagattcgctatcacgaatctcgatagttcctggttcagcgagctcttgaaccatcctctcgatatctgcagaggacaacggatccagctccgcatctctcgcagttggggtctcctcttctgaaatcgaggttgggataaagctatcctcttggtcttggtcgccatcgaaagcattgcctccagagccaagcatctggctgtccaaaaaatttctcatctaaaagatagaagatcttttcagtgtggtgaatgtgcgaaaacaatataagtgacctcacccgcataaaaaatttaagatctccttggaaggctgattcgaattctcgcgaaaaaccaatcagcccaccaaggcataaaatcgcaggtgt

SEQ ID NO: 294564 - DNA, 510 bp, Cannabis indica
aataaacaaataaatgataacatgaaccaaatgacacacaaattgatgaaaatacttctgtttctttattgatatttaaaagataaagattacattgaaatggagttttatttaggacataaaacccaacaaactcccactttcccgaatataaaacaatcagtacatttcagttaatcttaaattctgacggtgcttttaaattggagttcctgccaaaactttggtgaatggatcagctaagttgtcctctgtgtccatcttgccacatactctctgatgatgtgatatttcctttctatatgcttgcttctcttgtgacatcgaggctctttactgttggctatagctccagtgttatcacaatgcaaaaccagtggtttttcaattccggggaagacagcgagtcctgtgaagaactttctgagccagacaagttcttttccagcctctgcaggagctatgtattctgccctccatgggtagagtctgaaagtttgctagtttgtt

SEQ ID NO: 294565 - DNA, 532 bp, Cannabis indica
aacatagatatagttgccaaatagtaaaaaatctagtatcccaagaggagtaaacatatagggaggaattttataatatcaaggattttgtgattaaggatatgtaatagcagagaaatttgtattgaatacaacctgtcagatcctattacaaagataatactacgtgctacacttgatctggacatcaaagtgttgagattatttgaaatgtacttttagttttatattagtgcaagtgggagttttttaggttttgtaccctaaataaaatcaatttcaatataatcagatttactaattaataaaagatcagaaataatattatgttgcatggttcacataatttattttatgattatatgtttaatgtatgaattttattaatccataacatataattattcataattatagtgttgtcagcacagtggaatataatcattgattatgtcccatgatttatcaatacactggatttgactgacatgataatcagcaataaagtatacttacaccttagataagtatt

SEQ ID NO: 294566 - DNA, 497 bp, Cannabis indica
gacgaaaagatgagttttttcacattttacctgccctggaacattgaatgagagagtgagtgttggagtcaagatgagagtgacaaatggagcagtaaggggagggcgcagacttacgatggaaaagattaagattggaaggaaggatgtggttaaacacttttcaaacaaagtgtttaattttaggagggatattggaggaccaaaccgaagtccaccaatctttatgaacatagtgatttttgtggtaccaaatatcaatattaatcactaatacaaataattaataacaacaatcaacatgatataaataaaacacaactaagaggaaaagagtactaaaaaattacatgagtaaaattgacattgacataatagaaataaaaatcaaatatgatagcaataaaatagtaatgaaagtgacctctactcatttgtggttgctacaatttttaaattttgttagacaatacaaaaaaccttcactcaatagcttc

SEQ ID NO: 294567 - DNA, 565 bp, Cannabis indica
aatgtagcagtccagctcgccccaggtatccgtcctggtcgagagtgcggaggcatgcctccgaaatcttggagggaggattcaacctacctcctgtgaggaaccgcctcagcaagctcctcactgacgtaatcaacgccctcaaccaggacgtccccgtcagcatcaactggttgcccatcctcattgtactccccataattagggggctcaatctctttctctccctcagcagcgggagggctgcccggatgcgcctcgtccagctcctcaacctcctggacttcggcgtccccctaacgatcctcctccattgggaccgccaaatcctgttcggcgtcgggcagagtggcaagccgagccacctaggggtcagaagcgtcactgagacgcgtagttttcttcgtacgagccatcaacctatggctgggtacgaaatcagaagaatatccttctcttgaaggagaattagcacgaagatgagggtggacatcgtgcagaagttaaagcaagctcctgatcgattcgatgctcgggctcccaagctcacctgggtcatctcaaa

SEQ ID NO: 294568 - DNA, 586 bp, Cannabis indica
atgaagccgaggctgaggctgaggctgaacaggtgaccccatgaagaggaagaagaaactcccaaccacacccaggcctgttgaacatgcacttcacataagggagcccatttcacctgttcggccatctcatccctttgctggaaaagggaaggttgttatgtctgagataaactcgatgtcaggtgatgatggacttctgactttctgggcgggcagtcactctgcgctttacttctttttcagcttcttgactttcatgctttgtattttctgctagtttttgctaaccacgctgtttttgttctgtgcagacatgtctcggcagatgctcgacgctttaaggaagaggatgggcggaagttctagcgcctcccctccggccaagaagcttaagggcggagaggggtcttcagagaagagaccttctggagaggttattgacctttccgaggagctgactgctgcgaatccttccactcccaaatctgccaagtctaaggagtctgggccaccaacaactgggtccgaactggtcaggaggatccctgagcgggtgcaggcaccaactccacccgtgcccgtg

SEQ ID NO: 294569 - DNA, 581 bp, Cannabis indica
catttataaatttaataaattaggcttgtgattgatgatgtagttattttttaaaagacttattttagtacttttttttttttttaattagaaacaatttaactaatattatgaaacttttttacatttttattttgtggtatcggtagaatgttatcttcccaaagataaatttggcctgacacctaatttattttgtgggactattcctaaaacatataatgaaaatagaatgaaaagaactgtaacaagaaaataaaaaattatataaaatgccacttaatttattttgtgttttgctttatataaatatataatatataaatatagattattttttttttttagttattttacacatttttttaatactaagattttgataaaacgataaataaaaaattataactatgtaagcaagattaaattgaatactaataatattttattcaacattctacatatgaaagtttaaaaaactaatttttttccaaataaaagtgaacattaatgaactttatttaacacttaaaatagttcctaaataatataatatgagtaaaaatagaatgaaaattata

SEQ ID NO: 294570 - DNA, 481 bp, Cannabis indica
atcttacattattggatgagataaataatgtctcacaaataagattaattagattagtgcatgactttagtaatattgtctagactagtctaattttggacaaataatttcatgcaaatgagattaattagattaattatggaattggagattgggtagagccagagaggagctctagaaaaaagaaaaaaaaaaattaagccaccaatatctcttatttttttaacaacatttatgttaccttcaatcttaagaaactaatgtgttacaataaagtaaaataaatcacataatttattgtaaatttttttagacatctaaactagtgactaattagttattttaaagtttattatgacatcttaatattacttaagatatattttggtaaccttagtttattgtaaaaattaatttgttataatataataaattttaaatatgaataacaaagtatattttagtaactaatttagttcac

SEQ ID NO: 294571 - DNA, 653 bp, Cannabis indica
tacggttttctaaaaaataacacgaaaataacataaaatcaacaagaaaactacataaaagtaacatcaaaataacaataaaaaataaaatacagataacaaaaaatcaacaacaaattaacaaaattacaacataaaaagaccatattttttgtaaataaaataaaaaaatcgtaaaaacgtttaaattccatgaaaccgtatttttgtaattttttttttgttttatttttatgtttttgtaaaatgatccccttaatttttcatcaatttaagtaaaaaaaatatcacaaaagtgacatgtccaatcaaatcaaaattttttacaaacttaaaatataataaaattgattaaaagaaaccttaaataccacgtttaaaaaaaatagaacaatttttttttaaataaaaaatacaaaaatacagtatgcaatatatgcagtgataatatatatttaagcatataacagtaaaattgtaaaaaaaaaattagaaaaatacagtttctagtgtaaatttcctaaaataatatacagtctcaagccgaccagtgtaagagtgtgggtcgttcagcgcacccgccaagcgccatgatcgtcattagctggaatgctcgtggattagggagtaacgagcattctgatcactctccc

SEQ ID NO: 294572 - DNA, 526 bp, Cannabis indica
catttagggttgctttaaaaagtttggtaaaaataccaatttatttattttctcttttaattttgctacaaaatcaataaatcattaataacaaataataatcaaatatttgttaatcatcaaaacaaggagatataaaagtttgagttaacaatcccccccaataaaaggatttcgtcctcaaaatctaacctgaacaaatctggatactgagccctcatgtcagactctaacttctaggtggcttcctccaccttactgtttctccagagcaccttgaccaaagctatggttttattccgaagaactttatctttcttgtccaagatctgaactagttgttcttcgtacgagagatctagttgaagttcaagattttcataactcagcacatgagtgggatctaaaatgtacttccgtaacatggaaacaataaatacattgtgaactgctgaaagtgctggaggcaaagctagacggtatgccactagtccgaccttctcaagaatctcaaaaggccctttaa

SEQ ID NO: 294573 - DNA, 701 bp, Cannabis indica
ccgccgtcctcgatgctggtgtggtcttggtgagggtacagtgctaagtgtcaatctggtaatggattgatgccccggatgatctggggaagctgacgaaagtcggagcatcagaccgtgtggggcagtttcaggttccgttgtggattcacggacatcggtgccaaggtgccaatgccgtctgcgagccccccggaacgcttctgtgaaggagcgatatggcatcaacaatggtacgtaagcttgtgtcggaactggtggtagcggcggatcggttttgtaaacctatcctgcaggccttgttcgacgtagtgatcaacgacggtctcttggctcccaaggggggatgatccggacaccgcccatgcctaccgcatctgtgcttctgcggtcatcagttaagtatggacaaggatcggaagagcatgatctgtcaggcattgccaatgcgatgggttccatcccgcgccccccaaaaaagagatagtgcgggtccagggctgtcgagagtcatcgtggtgcctcgacagacatcgctgtagtcgcccatattatcggttatagaagtcggtcgatctgcaaaatttcaagtagtcgtgatgcggaactatgagatatctttaccctaggtaaaaacttgaagaaagtattccttaattcgtagtaaacatactagaaactgtcttactcaatgaaaaagt

SEQ ID NO: 294574 - DNA, 576 bp, Cannabis indica
aatttcaatatatacagaatgaaatagcacccattgactgatcaatcaactaaaaccgacccagaatcaacaattaatcaaattctcttaattaagagttacccaataaacacagcataatctaagcaaagcaaaattctttaatttcttactaaaaaactttactgggaaaagcaaaacaataaataaataaggaaggtaaattgagaatagaaatggaaaagaaaactgacagaggttgaagacgaagtatagagtctacgatcgaagaacaaacagatcccaactctcttcctctctcgtttcaagtgaataaccagcatgacaaaaaaaaaacgcaatctttattcagaaaaaaaaaaatggaacctggtcaaaattgtacgaccataataaatttctcataccataaataccctttaactacataacatattaacaaattagtccttcaaaaataatttttttagctacgaggaggatattggcaattcatgatatattctttttatttctattgacaagtttgatgaggttttttttgtttgttttttttttcttttgacaatgtgatta

SEQ ID NO: 294575 - DNA, 555 bp, Cannabis indica
aaatgagtttagaaaaaataattcttttttgaaaataaataccaatataaaaataattcaaaataacttttaaaaaaaataattcaaaataacttttaaaaaaataattcaaaataaaaattaataaaatttttaattaataaaaataattttttaaaaaaataaatataattaaatattattataatatgtataaagttttaatcgtatacaagcagtcttatcgtaagagtatacaccttacatcataataaccacatgatctaaaatcaatggtcaaaaaaagttccctaccggtaaagaacttttgctaggtcatattagtagtttagttttgtttttgaaaataatgtttaaagtttttctttatgtttcttggttttctctccgcgtcttatgaatgcttaacaagcttgatgagttttcaatcatgaaatggaagctagaaagaaattttgttatattattttataatataataagtgtagatttaaatgtagtaatatatattattatgtgaataatatgtataaagtatttggtaaataaattgtg

SEQ ID NO: 294576 - DNA, 507 bp, Cannabis indica
atgtggaaaagaaggacacatcaaacgcaattgcccactgtggggacagactgggaacagagcagaacccaagaaagatgacaagtatgttccagccagagtttttgccatcactcaagcagaagctgaagccagtccttcggttgtatcaggtcagattcctatggccaacaccacttataaaattttgtttgattctggtgcaactcattcctttattgctagcacaattgttaatcatataaatgcaccgagtgaattatttactgtggggtttgggaccatgttaccatctggggaggttgtaatctctagaaattggcttaggggtatacctgtcaggatagatggtagagaattatttgtagacctgattgtattagatttatttgattttgatgtaatcttgggcatggattttcttaccaaatatggagcatcaattgactgcaagcaaaagaaagttgttttcacaccagaagatggagaaacattcgagttcagggg

SEQ ID NO: 294577 - DNA, 702 bp, Cannabis indica
tattcctcatcagggatgggacggagaatcacctaatggggggcggggacgggggcgggaaattccttaataaaaaaataaagtttataataaaatttttaatacacaaaaatatcaaactacataaaaattaaaatattacacattaattattactcaataaactaattattatataaaacacaacttaaaattcataaagaaaatactaatatacttaaaaaatgcaaacataaattataaattataatatattattaaaaatataagatgaaatactaaatgggttcccatcagggcggggagtcatccccgtccccgccctgtttaacattcggggataaaaagtaatccctgttcccgtctcatttcccatttagacggggaatccccgttccattaagggcgggtacccgtggggatgggggaaatgtgcatccctagttacaatatatattaaattccaaagtttttttatgttttgagttgtttctatattgtttcgaggttgtttttttttcttttgttagttttttttttttttttttgttttactaaagtttctttaaaattcttacttgttcattataatttttagaatattattgtgattgaaattttttaaaaaaaattataataatcattgttgtttttgtgttaaggtttttttacctttgtgtttctattctctttttcatcttt

SEQ ID NO: 294578 - DNA, 631 bp, Cannabis indica
tggagtgattgtgttgcttactggagcacagacaaacaaaaggtacttaataaaattttttattttagtaatgctttatgttatatagtcaataataaataattaattgttagaaaaaatattaattccaggcaagagcagcaaaaaataagaaagtcggggtaagataaaatgttaaggaggctggggatcaaagcctattatttcacatgttgttgctggggtaagtttatataatacattatcattgatttaatatttttttttgtaaaaataaaataataatatttttttttcttaaatataggcgatataggagaactcccaactgcgctggaaactttttacaagtttcaccataaaggcaacaattggtgcaacgaatacgcgcaacaagcttacgtaaatttacctttatattaatttctatttatttcttttcaatttattttgtatttaaattaactattttaatttatttatttatttttaggtagtcaaatgtttgaatttagctgtaactcaactagcacacactgagaatgagcctgatgagactgttggagatcccacatagtatccccgagacttccctgtatgacgtagtactcggggagcgatctcgacatct

SEQ ID NO: 294579 - DNA, 582 bp, Cannabis indica
ccaaggaggcctggccaaccaaggaaggttcgctggccaagctgaacaagaaagctgtatgaacatcccctaaagatagggctatacaaacatgccgaacaacccccaaagacaaggctagtcagccagaacgtgcagacagctcccaacaggctgaacaaatcatggggtccacaataagccttctagaagattcgtaatttcacctaccattgctggacaagttcaacaacccatgaagatagggatattcccttaggatattagtcctatattctagggatttagttatccttttttgtatctcatacaaaagataaaaaaagatattaatatccctacttttgagggataactcttcctatttgaattataatatcttgtgagccctatactatataaagggcattagatcacatgaaaaacaaccccaatcctaagctacatgcctatagctctctctctccctctatggtccacacgcacctaaggcctcatagactctaagtctattttcttcatagaatcttatcggttcttcatctgtaacacattgttatcacaattgtaataatgaagaat

SEQ ID NO: 294580 - DNA, 514 bp, Cannabis indica
agcattaatttttatgcagataagttaatctaggtaacacatcaatgaagcatattatttatgtagcctaggttatatttttcatcataacctataatacatttgacattactataaattgcatattataattcaacttggaatcctaaactattaggtgagaagtaattctaagatgataattgttaacctgaaaactttccctggtgatgtggacataattgtttgacacgtgacatgaaggatgatgccatagagttgagtagactcgagtcatagcagtcgacctagggaggggaccctagccctccgtccagattgactttgggatctctaggatggaagattggacttcaataacttgaatccaatccactatcttttattattttgcaccatgaagatatggagcaacctaatccaaggtttggagctaaaatacatataactaggtttcaattttgaaccatctagtgaaaaggtcaataatgcattaggacatcaactagacata

SEQ ID NO: 294581 - DNA, 887 bp, Cannabis indica
aattgtttatatctatttaaatttcagcgtttactttttaataacgcaattaaaaattgaaataattagcatttttataaaataaatatactttggtattatttataccatatattctgtaaacttatctgtatatttttattttatattgtgtttagttttattaataaacatgttatataaagtaattataatatatatgaagggataattatattttctatgacaataatatttaatattattataataataccacatattaatatttcacttttaggtacaaatcttaactactttttgtttttattgtcagagtcttttttttttttttgtaaaactgttagagtctatttatagtaagttaacggtgtacattcattattttgtatttaaataatatattttcctatttaatttaaaaatttgtgtatattatctttcttttcagatttctatatatatgtttacacattttttgacttaattatattttttaaaacaaattttttggatataccaaatatgtttatctatcatataacatgagcaataaataaattaaatattttaacgtaaataaaataatatgatagtcatcatataaaacttaaatatatatttataagaaaattctatcatgtactcccttaaaagggatatattgatgcacccttatctgtttttagcatccgaaattaataattttttagtcaaatttttttttcatggtcatgtacgttatagttattttaaggcatcctgcaaaattttaagaaattcaaagtttaacgtgccgaaaatacgttcaaacagtgtgttgcacgcgtgactattttattttatacgcttgtaaaatagatagtttaaacattattttctatatt

SEQ ID NO: 294582 - DNA, 522 bp, Cannabis indica
gagtcatttgatatatgcaactattggaaggtgacgggcctcaaataccctttgttgagtatgattgccaaggatgtatttgctgtgcctgttagcactgttgcttcggaatctacattcagcactggtggtaggcacgtgagttcacatcgatcgagacttcatccttctacattagaagcattagtatgtacacaaaattggttgaagactgacaaaaaaggtagatattatttaacaattgtaaatatatatttatatacattttttcatttcttaattagaattaatatttattttattttttttaacagcaacagtgaatgatgaagataatgatgttgatccaacaatggtaattagttaagtttttgtaatttatcaaataaattatttatttttattattaatacttttttctgtttttatttttttgcaggagccttacgtagttgatcttgatgattagaaagtacattgttctttttagtatatgagtgaggacatggatgagaacaaatt

SEQ ID NO: 294583 - DNA, 513 bp, Cannabis indica
cccgaacgttcgaccccgaaggtgcattttttcggattgagcttcatgccgtatctccggacgacttcgaaacattcttctaagtcgcttgcatggctgttgcatgctttggatttgacgagcatgtcgtctacatatacttccatgtttcgtcccaggaggcttttaaacatccggttaaccattctttgataggttgctccggcgtttttcagtccgaaaggcatgactaggtaacagtatacccccttatcggtcctgaagctagtgcactcctggtctgccgtatgcatttttatttggttgtacccagcataggcatccatgaaagacagcagcttaaatccggacgtggcgtctaccatctggtcgatcctgggcagcggaaagcagtcctttgggcaggctttgtttagatctgtgaaatctatacaaacccgccaagtcccgttcggcttgggcaccaggaccggattggccagccattccggatagtatacgtcgcggatcatg

SEQ ID NO: 294584 - DNA, 622 bp, Cannabis indica
tttacgcagtgtgttgatgtttgtttaaattgcttatttttacattgcttttaggttgtagacaatatttattgattttttagttattttgcttatataattataaaaattattgtgtagttgtatttttatagttaaatatttttaaacataaataaataataataaaaacataacctcaatagactaatagaaaataaaaaaaattaataaataaaaaaaattttaaataaaaataataataataaataaaaatttttattcaaatatattttgaccacgtaatacatctaggaactaacttatttctaacttctagcaattcaagcaaaataaatatattttgaaattaaaatatcaaataaatcgtactaaatgagtttgagtaaagttagagacacaaaaataaatgtcacactttttacacacaataaaatgtattaaatttcaactatagataatcatatatgaaaaacacatcatttttataaatagtgtgtgcgatttgagtgtgtcagaatgcacaatttgttgatgttcaatattgatttgtatatttatgtattgttgtcatttaattgtttgttgttattaagttgttcaacaagtagaaaaatgagta

SEQ ID NO: 294585 - DNA, 555 bp, Cannabis indica
tactctaattttaaaactttttcttcctaaccctcattaacaattgttacccaatttttagtctatcttaattgtaattattttcactaatattaagcttatgatattattatatttcatgttgtaaaacataggagctaaattatcatttaacattggtcatagacataagttagttccactacactcacactgaaaaagaagatgcatcttaagttcaaatacatactttgggacaaattaaaatagcatgagaaaaaattatttatagtgtatatgtaatgtcccactatactttctaaataatgtgagattattacaaaaaataaattgaataatcatgttttcttagtacattaacacggtactatcaaaaaaataataaattatgaaggaaaaaattataaaaagtcacttacattcttgcgtgctttcctttatattaatatataaaaatcatgtgaaaaataatataacattctcagaaaattaaaaaaaaaataagatgaaaaatatattttatttttatataaaatataaaatgtatattattgt

SEQ ID NO: 294586 - DNA, 551 bp, Cannabis indica
ctatttgtttagacattcagaaaaaaaaatctagtttaatttttttcataatcatgtacgttataactatttaagatatcttacaaaattttgagaaattcagaataatttacaatatagaaaataatattcaaacaatctattttacacgcgtataaaataaaataatcactcgtgtaacacactacttgaacacaattttcagcgagttaaacttttttgaaatttttaaaattttgttgaatgtcttaaataactataatttgcatgatcataaaaaaaaaaattgactaaaaaaattattttgattactaaaacagataaaaatacatccgtatctctttataaaatttcccaattcttttttacaataagtacaacaacagtaaaacaataacaaaacaacaaaacaaaatcaacaaaaaaataatacaacaacaataaaacaacagaaaaacaaccaaataaaactacccattatatttttattagtttttattattctatttgtctaatacatatatgtaggaatgtttttgtattactaaccg

SEQ ID NO: 294587 - DNA, 11011 bp, Cannabis indica
aataaggagttcatgttcatactgacgcatcactctatgccattggatgtatgttggcgcaggaagggccgctagatcaccccatctactttgcaagtagacgactttccgcttgggaattatacaaccatcaaaccttctttatcatgatccgacccacacctacgaccaagattgagtaccagagctgctcataacaacgtaccaaaaagaagaatgtgatgagttcatattctccagattcgactataaaccagatagtgaggatgaaaaaaaaagcataagctacctcgttcgtgctcccgtctttcccgctgccatcttcggtggatggccccctatctcttaaagcttctatgcgacccatgtagctatttattggtgcctttgcttcccgcggcttcttttactataactctgctgccatccctgctattgcgggactgaatcaatagaaaaaacaactagatccagtgcttataccccttccgctgggggaaccgggtattcaatgggcaatgaatccagatatttacccctttacggaactgaaactgagattccaggatatttgccgactcaagcgggtagtccttattagtcaagctttggctcccgaaggggaactggatccgtccaaagggaaactgattctcaatctcaatctgtatttattcaaagtggttttgtattcgtatatgggcttttaccttttactgggtcattaatgcatcaatggagtcaacttaatattcagtttttttagttgttggtcggccttgacgtatatatactatactgcagttcccacctccgtgtgtattgcgtgtttgctccaatccgggtcaacgaagtcaactgcctttcctgccgccgaaggaacctgtgcctttgccgctggtgttacttcaatggattatggataaatgttaactattgtctctcaaataggaagggattccgggattatgaagttctaacgggatccgcctttgcttgtgtctccacctgtgcccatgcctatgccaagtgcttttgctgttgtctctgccacagcagcgctgctggtttgtttggatgctccaacgtgtgcttcaaccggcgtatacaagagaaatttcaattgaaaaagactgaagaatttcaattgccgaaaccccatgccaacatttcattcaatgtttggccgtccagcgaatgctcgttctgttgtcatacagaataggaagcccttctctaatagggccgatccgtcggaaagaagacagaacggactggatcggacaaagaaaagaaaaatcgaatcgtaaaggctcttgatggaatgcatatatgaggaaccatgacatctctgggttgtcacggaagaagttgaaaactagaattccttgcgaattctatcccattgggttggaggaggactagtagattcgatggcagtgcgccagggaaagggccaagctgtacaagaatacccccattaaagtaccaagttccacaagcaagctattattctggggatctccattgaggagcatcaaaccctaatgaaagatctctccccattagcaacaggtaatcattttcaagccacaagaagggataccctactgaacgaaaggaaagtaagtttttccagttggcattcattagtccggttgggtaggagcacctggttgatcgcccaacaaaatagttgtttagcgaatgactcaacctatgcatccggtatttacacacttcgaggtgtaaatcacttaaactctttattccccctacccctgtattaatgaaagaatagaatttttgactttgaccttgcgagcacccactaaaaatagggagggcgcacttttctctccccgatctccagaaccgcaaaaaagatggaattttccgtcttcttagccgacgtaagaccttcatccggcagcaaaaagctgtcccttggagctgctcccatttttccgggtatgaagaagcgggagtgcaccacatggaggagaaccctactcgcctttgtatgccaagtcactggaccggcgaaacggattctcccgaggtggagctttcaaagcgggatcgttccaacgcgcccacgccttactgcttattcaggggcgggcgaaagtgcctatgggaccattcgacattcatagcctttcaatcctattcggattttgcaagactggaatatgaaacgaaagtcatcctgaaatatgctaggagcttcttccccacatatcctaaccggacatttgactatttggtcgagcggaaagccggcggaataagcagaggaaagaaagagaacacttacttactcttactgttgatttcattcaaaagcgaaggaagaaagctactcgaccaaagcaaacagcaagctgaaaaacgctagctttaacttgaaattgcgaaaagaaagaacaactatgtaagtaaaccttagctagtccgtaggtccgttaaggaagtggaacgaagccaaagcttgactttactaaacaagcgagaaaagccctttctatgttattagtaaagcagcgctaacgcgccccttattgaaaacggcctagctaacgcgctttagtttgattgcagctcgcgcaggggcgctcacgttttttggctgagccgtatcttgctggtaatggattgattcaagaatcttgcttggtttaggcaggtaagtgttaagaggctgtcattaggtatacataactacacataggagtttcttgcaatacaaagtaaattgcctgccatgagacagacaagccgctctgcaatagtgaaggagcggcttcgctatcccatgcaagtgaagggccagtcctcctatcgcgaacctatccacttatctaccgcatcgaggcgaacatctcggcttggttggaaagcttttatatagcaataaaccggaaggctcaggtctttccgaggccaggtgatcagtatggagccgaaggcgaaggtttccagcaggcccccttctcttgctttccctttaagtgacaaggggggctgagccgctccaagccgaaagcgatagcgaatcccgaacttgcccacgctcatccaaaccggcctcaaaaagcgatcggaaagcgaagcccttccttccaatccaagccggcgaagccgcccctatatctaaccaccgctcgccccgatcacatattggcacgttcatgatgcatcatgatcaaaaggccgtaaaaagacctgtcccccggttccctttccctcgcccactcaagttcattaccaacccaatccggctgttccccacatctgagtgatcgagttgactcctctctcacttaatcaatgcccggggccaagcacttactggctggcggacacgcagtaataaaaaccgccacagccttagtttcgggttcgatttcttatgcagttaagagtggggcgtgctagcgggaagtccggttatgaacatatatcaatccctcaaaaaacctttcttccatcgtatgggtgtctgagccaaagggatcaggtgtcggtggaaaggaatcctctcatctagagaccggggcgagggatcatggacctaaatagttggacgaatgctgactcgctgtctagctcacagagagggctttctttaaacggggggaaggctttatagggaggggtggtttccgaacgagagcctttagctttttccgggggtgcgggtcctggtcatcgctgccccctgatgccaatagctgtctcggggagttgagttgggggctttctcttctggttgcttctgggttcggtctaaggttggttctaaggctggtttggaacccttcccttgaacaggcgcttcagcttaagtagccgctggggtcgaagctgaaactgcaggatctgttgtagacgcaggagcttgtctcgtccgctactatccctctgatgatcgatgttgggttttttacaatttgcaaccattctattatataggctcgctccagttcgctattcttgtgattccgaatgcggtgggctggctttcaaaggtatgggacgatcaggatggcttggtccagctccctttaatccttgatggatcaattgaacaactttacagatttttattgaatttcgaaccgctatagaagcgaacgacttgatcgcgaactatagtctttgtttgttcgactgaccgactcgaatcgattgggcttcgttccgggtagtgtttagtcataagcctgtctcttttggttttcacttgtctgctttcgttccactcctttccaactcatttctggttcaacaatttcaacaccgcgccccttctccagggcggcagatgggtctagagaacctaactttctcacgatttccttccggttagctaaacttctcctgagcaattcacgtatcacttgagtagtagtacgaaaccttaagaaaaggtgatctactagttgattcaaggaggatccgttgaagagtgtctgttgtctcgggagggaagagtacaatcttttccagcaccggtgcaatatgaaagagtcctttagaattcgttagaatacgaatgagatcaaaaacgctctgccgaggctcgagtagaagaagaggtacttgaacagagggccgtggaaggccaaggacagggggtcaaagggtatgccgatgctgactgggcgggttgtcctgattctcgtcgatccaccactggctggtgcatgttcctaggttcttctttcatttattggaaatgcaaaaagcaggaacgtatctctaaatcctctaccaaagcggaatatcgttccatgtcttctgcaagctcagaaatcgtatggcttcgaggactccttgcagatcttggagtcaatctccagtctcccacaccacttcatgctgataacaccagtgcaatccaaatcgcctctaatcctgtcttccatgaacgcactaaacacattgaggtcgattgccactacattcgagaacttatcgtcaatggtacctttgactcacgtgtcgtctcatgatcagactgcggacatcttcaccaaagccatgacacgaggtcgacatgattttcttgttggcaaattgatgcggaagtagatggacctgactgagcaggtggaggtgctgttgcttgtgcagctggaacataaggcttaaaagcgggaggtgcagaagtgaaaggagtggaggcagctatcagtgcttccagagctgccaactcagctcttttttatgtcaaaatttcttcagatgtagggggccgatagactgcatttaattgggttttggggactgcaatctcggcgtccctttgtgttataatctaattttgtcgggccaaggctgccctaatttccgtcagttgttcttccactgtctgtacgacggaagagactggagatgaatcggtcgtagtcattgcgggtaatattactagcccacgttgtgaagggaatgagctagctgaagcttctgacgattctgacggggccggactccgactcctttggggagaatttgtgatatggatcaatccgcccggaattcttgaaggatgcaggatcacttccttccgggtggattttggttgaaagatttttcttttcggtggcaaaggcatttgagccggggcttgtctctgggaacgagtgccccgcgaaggcaaattctcagtgacttgggctgatgaaattggatcatgggaagattgtgtagatgaaggctcgagagacctttaggattttatatagctgctcggaatatggggaacctaatagacaaaacaaggaaatgaaaaaaaggcttccctttaaagaagctttgttgagagaataggagtgcgctgcgaacgagccctaagaaagaaaagtcaaacggtggtatgtcaacgcttgtagtcaacaaggtttggaaccctccatccatagtttagaagtccctgagggagggggacacgggtattgactaaagaatagatatatataggcaagttgcctatatatatctttcttcatcgaagaaggcgcctttgattgaatgttcacacctgatccaccgtctgcacttcctacattcactcccggaaattgaaacaggaaaactggaattgtaacctcccggtctgctgtagtcagcctcacggtgtgcctgactagcgagtctgccgtctctacggctttcccttttgcgggctgctcctcaagccttcgagtgccgatcttcgcttgggccgtctcgcgaagatcttcgatccgaaccttcgcatctactctctcttagaggatgaaccacgccttcgctatcgcaagaatatagcgatcgaagagagctatcgctcagctgcttcgcgtattacgaaagccgtatttattgccattgcccgaagggggcatgctgcaagagcgtaggtgagtggtaagcgtaggatcgaagagaagggcagcggcagcagtgtggttccaggtgccgtcgctagattgagtgagatctgcagggtggcggggacttcgactgccttgtatcgggtgaagagaagggggtggtaggcttagtagggctcgaacctacaatataaccgttatgagcggtacgtttcaaccaattaaactataagcccctacggatctctacatgcaattcgctcacttcgggaagagcggacgtaaagaggaggcctttgctctatctgcttcttcctcttcccaggaatgaacaaaaaaaaagattttctttgtttatatctatactatatatatttataataaaaatatataaataattaagcaagcggccctttcgcgactcaaactgccggtacgctttccggctcgcaacgactcaaacgggcgggggctctctattagcttgcaatgccggcagttcgcctttagttagaagtagaggtagagggcgccctttgccccacacttcagaaaaagtaaaaaagtatggattaagtaagaaaaagtacataaggtaaggagtgagaaagaaaaacttggttacgggaaccgaaggttaggccgactacttaagtatagctacacctaaaaaagtgtattcctacccccttttcttcccctttctgtaaatgttgccaattctcagaatactaataatgtaccctcgtgcatacaattgcccaactactttcttcctccgacttagccacttccgcatctgtcgtattcgggcttcgtggcggagcatttagcaatgccagcagcctggtgagggctggctgtctggggacaggttaaggcagggcctgctgggcttgcttctcatgagattgggtgagggaatcagaaaagggctcataaaccgggcttttgggcacacggaaaaggggaagtggatggagggggcttctccgctagagttgggggtggggtcgctatagtggctagggtgagtcttcctacacggctggacgcccggctctagacgaagctgcggaggctcgagagacctctcccgatagactcgaagctcttcatagtcaggcggggtagaaaatcttctctcaaaaagagacagaccagagatgacagaggaaggtattcggttcaaaaaatatacggcagtcagaactgcttcagcccaaaattgactagggacagaagcggagagcaagagagagcgagctgtctccaatatatggcgatgcttccgctcggcaactccattctgctggggagtgtgggggcaggatcgttgggaaagcgctttgtaagtgaagtgagttgaagcaagcagagttcggaaggcagcggagatatattcccccccccagaatcagagcggaaaaccttgattttagtcaattttgggctgaagcagttctgtcaaaaataacatatacggatgatcctcctttcgataacagaggggcaggatgggcttcggacacaagattaaaaggagaagtagaaagagcttctttaataaaggaagggaagagtcttttcccagcttgcaacccatacaagtttaggtacagaccccaacattccagtagaaataaaatatctaagccgtgggctgcagacatgtcctatcctaatctacgatgccacaacaaaaaagggggagtagagggaacaacaccagacacagcagaaaaggcaaaagactgaggtaaacgaagtttatccaaaaaagagagcttgccaactctacggtccttcccaatccccttactccatagggcctctcgcatgatcctgtacaagacaggaggtaggagagaagtgaatataagcttttttttcaagccggaaagaagattcactgagagagcgataagatgaaaaagagcataacatattcgatgataacgagagagagtaccaagactggctagagggaattgttcggagtttgcagtttaaacaataaggaacttagatggagaacgaagagaagaaagaagtgaagaatcaccagtcatattcttcgatgcgcccgaagaaagtaagcagccccctatgttgtaagcgtaagggggagcaagtcgagtctcctcggatctcacatcagcaactgctctttcaatgtctggtggaggcaatgaaattgaattgaggatctaacattctcgaactcaggcctcaagcccataaaaaatttagagagcccctttatactctataaataaggctattctatgttatatgaaattcttcccgacaagagcctttagaatcggagcccctatctttgaaaggggtccctcatgttcagctggtcccatagaagcctaagccttcggtaataataaatagtgtagcacacttctttattttccccataagctaaggcatgttcttcatgttgcaactgatagaaaggtggagaatcatcctgagaatcaagattacttatgtaatcccaaatatctttagcagtcgcaaaagaggtgacggtgtatatggggctcaaaggaagtacacaagtaatcccatttgaagctaagcacttttcatcttttgtaggaaaatccccttctctagtcttgggaaattgaagcgacccatccacataagcacaagattttttcccgagcaaatcattcttcatcgcataagcccatgacaagtcatttccagatgcttctttcggaagagcacgggaaaagcctatggaatccattgtactaagaccctaaagatcatccaaggacttcaaatcgggactcaaaactagtcaagaaggcttaactcaagcaatcactcaagagaagaaagtattttcgctttccggattcgtaaaagaaagaagaagaagccgggtcttctttttagggcaataaaagggctccgagataaaggagatcgtgggatccaagtggacgttcccgatttccatggccgactgcatcccgaggactttcttgattggctaagtagcgtggagaagttctttgattggaaagaactatccgaggtgtgcgaaggtgaaattcctgagcacgggtcatgcctcaatttggtgggatcaagtccaagcaaggcgtgagcggaaaggcaaagggaagtacatgagacaagatgcgatcgaggttgcgggaggaatttctaccctccgcttagacccaaagcttgttcaaaaggttccacttcgctttaaaggataggggggagagaagcgtacaagaaagcgcctactcctaacaagttgcggagttctaccaattgtttatgcgcaatggcttgaacgaatccgacgaagaatcccttgcttgaggttagaaatccaagatgaaatctcgatgcatcggatgtggaaagtggcctatcaactagctctaaaggccgaggaaaagctaaagagaaggaccacaaggaggcaccgaaggtgataggggattgacctctaccatcgggcgaggaaagagaccccctttttaccttccctcaatatatatggcacgctttactaatagaatatcaagtcaaggctccatcctcctcgttgcccagagccttgacttgagcattgtacaagtgcttaaggctccttcgggccatggccacaactattatataaggcaaggcttggtttatataccagcgcctatcggcgagaactaggcttgacttggttagtagtgcccgcccattctgcctcgcccggcctgccggcccatgaattcttcagagcgggccggcaggccgggcggacgaggaccgtcgaagaagtgcctcgacgcgccgcagccactacttcttctccttttatgcaattatgaactccacggaactttctcgattccaacgcaacttatccttttggagctgacgtaacaaactacgcgagcctcccgacgcagccaacataaatcctatccgaataaaaaaaataaaaggcagtttcattatggtggtataccagccgcctgttctggaacttccagttccaatcgaagcatatagatccgtaaatagatttgtatttatagccacttcagtcgtgctcgtcgtttctcgaaagtatcttttttctgggaacatggtcaaccggaaattattatgttcgcgattcttcatccaccgatgcagaaaatgctccagttttccattctcgtatgaggccggaaagtttattggcaacaggtcggcacgaagtgattcatcatgctcaaacatgagccgatcgttcgttagggaccctttatagatcatcaaattcccacaaatggaatgagaagtgggtccatgtaaatgatcgagacctcgcaaacaacaacgctccttccccatatggagttcggaacccaaaggcaatcgttgagtgaactgtatcctctttgtgttagttgacctaagccgcaccattactgctggggtagggctcggcctccgaaccgtacgtgagacgagtttctgcctcatacagctcggctcgggccgaagaccgggggaagtttaggagagatggggagacccagcagctgccggtcggggggggataagcagcttgtgaagaagcaagcttatcccccccc

SEQ ID NO: 294588 - DNA, 3960 bp, Cannabis indica
acttagtattattactgtcaaaaattaaacttaagtatttatttacaaccgatagttaaacttaagtatttacgccgcaaattactcaaattgaaatacaaaagttatagttaataatttaccattatttttaaccgtttttccttacccaagaggacaagttttgttacatgccaaaaactatattttattttgtccctaaattttgttttagaaacttgtagtactactctattttgtggatactttattggcaataatactaatataaggttcagttaagttgatcagttaattcaattgaatcatattttaagtaagctgtcacaatcacaacagttaacaaatgcctctattctgtaagaggaagaaggaacctatggagttcaccaataatcgaaatgtatggtatggtgtcggggaagtagattctaaagtttcgagcttttccttggacgacaatgtcaagcaactagggtagaagaaacccccaaaccagcttagcttacaaccaatcgagatctcaaaaaaaagaagaaaaacaaaacaagacatcacaagaggttgcatagaagacttcatttcaatgcttgcattcagaatctactattagaaaaatctgagttcgggttttgcaatcggtacaataacaaaattagattgcaagactggttcctaacatcaaacaaaaaataagaaaaagagcctaagtactcaccattatctgaaactagcaaagcgagcgaatctaacgttccatcacagcctcatcaaagttccagtctctaacaatatcccttctcacggcacagcttctgactaaccgaggggtacctgttatactactggttggcattgaaggttgtggggttactttagatgttgataaggaagaacttgtcgtgtgagtaggtagtgatgatctccaggtggttaagcagttggcaatagcagaacatctaccattattatcggaacttgaaaccgagtaactcctgaatgagtgtgatggactttctacattgtggcatgcaagacatgctaggctcatatttggaccggagaatttccaccaatgcaaaactgtgctatgctgcaattcattattcatatcgaaaagcaaaaagaattagtactatggattcgtcaacagaagattctacagctatttcgtggcatcacatggagactaaatattcacgacgcaaaaagaaatcaaagaagaccgagtaaaatatttagaatgttgtagaatccttaccaatttcctctaatactggattaatcaggagtagaattttcatttgagttgttttaaacatcacaaagtaaaggagataatccaacataacacatagagaataatcatatttgaaacataagtgattcaaacatgctatgatgctacacaggcacaaaaaaaagttcatatatatctgagaggaaggaaatatggattatgagatataaccgatgatgtcgatttttataaccaagatattgggatcatgccaaagtaagtaacttggttttcctatgtcattttccacatgtattgttatgcaattatccgaattacaaaaccttttcttatacctctaccactaaatctaaagccaaagagagaaacatctccacaatatcagaaaaacctcactagtaaactttccaagagtaataaccaactgaaaaactttcaccttttcactgatcacctttcaagacactagaaataattgaaattaatcatgtaccctgatgagctatgcaaacaggttagatcctctcttgtttttattttatttttcctaaggcctagatcctctgaaagtgtaaaggttcactttcaaaccaaaatcttgttttattttttaaaaaaactggccgaggaaccagctggcccaagtttgcaagggccagtgcgatcctgattggcagattgaaaaggtcactcccgtgctccatagcagattactgcggcagagggtttggaatgccaatctaggccgggtgatcctacccgatgaaacgcgccaacggatatagttgtcctaaggaaggaacgtcccaacaaaccaaaaggtttccaaagaatagtacgagagatattgcatcagtagtagcactatgccagggaaaccagtaacccaaagcacaacgtggtgacatcgcgatttgagccagggggtattttgggccccccagtggcttgtttttttttttttccgctaaaatcttgaaattattcatggtactacaattctaagcaaacctctaacctttcactatcatacctattgaagtcttagaaaacactcattttcatgataagaatggtgaaaatcaatctagaatttctgatcaaataatgctcaattaacacaacaattaccttgaaacatagatagtaacacaatcttacttatacatacacagaaagaaaaaatgccaaaattaaaccacatgtaaatagtctaacaaaatttacatctgtaatctgtatctcacagtatccaaccaggtaataacatagtaacatgaatgaatagataatcattacatgaaaatgttgaaccatgataatcaaacttaaaccttcaaacatttataaaggagtggaatggatatgggttatagccttataggtagcatgtcaaaataaactgaattaaaccaacaagctaattcattctgagtataaaacattcctaaattccccaaactctttggaaaagttgatgtgtaagttctggtgctaccaccaggcaacacccttgaatctaagctgacatggattgtcattaaagttatagattctgttgctatataaatatatatacatgtgtgtatttgtaactcttgacaattaatcgttcaagtggttgagtgtttaacccaaagattaaatttttcctcgtcctaatacacaaaattaatatttctctgctgacttttctttcttagaattcttcattcatcaaatggaaaatttccaaaattcaaattttacgtattccatgcctaaagaggaaaacccatcatccaaactaaccaataatctcaaaaagacacaaaatttatacaatcaaaaactcataatcaattacaattaggaaataaaaaaaaagaaatttttaataattgacttgaatctgtagcaattaagcaataaggattacctgatagcgataaagggtctaccggagtaccaaaatggagagaaaaaatctagggtttgtatgtgaatttgaagagaaaacgcagtgattgattgtattgaagaaagggggtagttaaaaaaggagaaaactttggttagatagatgaaagagaagaatatgatgaggaagattggaatagggtttggagagaaggagaaaaaggtgtgagtgtttgtgaagagaataacaatggcgggtaaggtggattggattggttgggaaatggagaaagaaaaggatctgatgtggtatggtatggtctctctgcccagttgagacttgagagagtgaagagtggactttgttttgttttgtatttttcctaaactatattttatttatttatttggtcttaaaaaatatatattatttgattgtttattttccaaatgataaaaggaactgggtgttatattaataggataattaggataattaggtgttatttgttgatttattagttttttttttttatttatttatggttgtttttatgttgttgttgagatgttttatagttgttattgtttatgtgtattttttattgtgtatattttcaatttattctaaataatatttttgttgtatgtatgtgtatttgttttgtatttttatgtttttagttgtttttccctttatagttaattttttaactcaaaaagaaaaaaagaaaaaaaaaaagttgaaagaataaagttgtaacaacaaattttatgaaaaaaataatataatagtacaa

SEQ ID NO: 294589 - DNA, 3540 bp, Cannabis indica
tttttagttttttaagtatataaaatcaaatttcccttataaaactcagatttgttaaagaataattatataaaatagtgcttagttgtgcataataatgttcgaattagatttatgagaatattagataacaattaacaatatttggttgcacttgcacatggtaaaagttataatttcaatttgtcatttttatttaactgtgttgatctcccatttttacaatgcaagtttacaatgttttaagattagttctaatgacaaaagcagtaggcatccaagcccaagccccaaggtagtagaaacagagtctaaaaatacagaatgattgatgtaaaggaagcaatttccaattcatgctgagaccagaaatgcacaactctattgacaactacaaataaagcataaaagtgtgtccttacaattcaactcctcaaaactcttacaaattttcacatagcttaagagatattcatctgcctcaaacttggtatagtcagacaatctgttggctgataaagaggagaagcataagaaagaagtctgcttttggagttggacgtatcacaacctcagccactttggcttccctgatggtctctctgcaggcttactctctcgaacaacaggtgtcgggaccgggattacaggttcaggttctgaatgaacaggctctgcctgctcggtaatgagctccaagcctttcaaagacatgatttcctcctgaaggaaatgatccgagttggcagcagcagcagcatcttcccctagaagagagataagaaacaatgaagtcaattaaagaagacctacctatctttcttcctatcagtttctccttttctcttttcacaataataataataaaaagatgggtaaatagcggcaaatgtacccaaaattttaaatttgtaagtggcataaaccctaatgtttatttttagcaacacaagtactcaatatttgtaaaactataatttttctataatttcgtcagtacaaactttattattgtcttaaacaaaacacatataaggctcaaattctaatttattaggtctagacagaaacacgaagtatcagttacttcaaaatcttcttttaataaattaaaaacggaatctatgctcacgaaactagaataaaattacagttttacaaatattgaatacttactcctaaaaataagcattgagtttatgctgcttacaaacttaaaactttaattacttatgctgctatttactctaaaatagacactccgtcaactagaaaactatagcaatcaaccgcgagtgactccaaccttataccttgtgggaactaaccacatgagacatgcctaaccatttaagctaataagctatccctcttgattatcttttttctatcaatagatatcctacatccatctttctctttcctatattcaaggaactaaaaaaggattattttctggtaagacattaatttatccacatttcattgcaaggttttctaccctttatctgaggggatatattaattaaaaaaaatgctcagcctagtcaactcacctccattacaatacacaaactacatatttcagaaaacaatgaacatatcaaagcttgtgctgaccttttggtatatcataagaaaaatacacgattgctcccggaataaagccagcggagtaaaaatcctgtgacaagtcctttatctgctttttaggaggggtagtatctgcatcatttcccacatgtcaaacctctcttctctttaataacaacatataaagatgtctaaaataacacacatatgacatttaacactttggtttgtgtatgcttacataaatagaatggaagttgtggcttagcaataactttagaaagaagatcaaccaagctttggatcgtttctgatggatgaaatgttgcctctaatgtgtggttatcaggaaatcgcacccttattactgactgcaataaccggatgaagataaggaattggtaacactcatttagtatcaacaagtgaaacacaaagtaaatggtaaatgtttttgtgtcacctttgttatttttgacttgcgtgctgcctcttctgcccccctgagttttcgtgtctttaagaatttatctatgtccaacaatcaaagcaatcaggattctagttaccttccttataattatgtataatacaaatgaaagaagaggcatgtggcacatttgatgagacccctaagacagaattctaagaattaccttccttttttgatgacataattcgataataatcctcagcagtgaaatcatagaaatcgtctggctcctctgcaaaatacaaaaggtactttcaaaacatgcaaaagctctgatgggaattaaggaacgagcttaggaacagaacagtctaattacaggaagatcaattgcagtttcatacggtcataccagctttggattcttgttttggtgaagaagaagaaggaggtgaagtttcaaacacacgtatctctcgacccagcttctcttttacagcagagagcttggcctggaatcaagtccattgaaaaacccggttaaacttttcagtatccaaacttctaatgaacacttcattgatcataatcatacaaccattgtaaacaaaacaatgaatcccacaaaaatctcaaaagacctagatgaaaaaactaagtcaaaaatgaaaaaaaacaatcaaattgaacccttgattgaaattttctaccaaagaaacgatttttactcatcagtgttattatccactaccattaacaaagtacccaaattgaaacctaaataggacactataagggaaacccacatcgacccagttgagaaatcgaacaaataaacacaaaatacgattcaattaaaaaaaaaaaaaaaaaaaaaaaaacaagttggaaaagtgtgatgtaaaagaggaaaaaccttagcttgatcagcctccattggatcaacgtaggtgaatcttctgcgcttcaagggtaaaggcgaacaacgatcaagaatcatcagagacagaaccaaactcggaagaaaagaatcgaaagaagaagaattcgagtctggaccaggctctggttatctttctcaatcgatttgcggctcgcttatataccctaccctctctcttattggattagctcaaatatatttaaggtaattagtaatttttttcactaaattttgagttgtgataaatcgtgtctcctcaatttttttcgcctaagtccttaaatttagtacatatcaaaattgaaggaaaaaaattactaattagccatatatttaacaaaacagaaccaacacttatttacatgttcaaaaataaataacatggtaattctacaattttaatttcataaatatttttgaaaatttttgtaatgcatcccttttaagggaatatacaagtgtaattagtggggtttgaacctttaccctctaacctatttgccaactaccttaaccattacaccaaggttactattatgtctataaatatcatcttttaatacaaatatat

SEQ ID NO: 294590 - DNA, 8295 bp, Cannabis indica
tgtcattacatcaaagagagagtgcaaaagagagtgggatagagagtctccttagcactcctcatatatatatatatatatatatattagacctgaagaagctattattttaccatcaattgtcaatgatatgtatttcttcctccaagtggaagatgcccttttacttcattttcccaattggttgacataatatatatatatagttacaaagtaattataattctaaaaaggctagaccctattaacactcatgtggtcacaataagtttttttttggaccaatctctgcaatctcaagataaaaggggtaaacattaaacaactattcaatgaaaagtttttaacaaagaaactataatatatatacttttttattttattatttttcctctttctattacaatgtaaaattaaaagaaaaaaaaaagctttaattatttcaaagtaggtgaataacaggacaaaaggaaagacctagtggccattttactatactaataataatactaatactaatactaacactcttttcttctatttttttcttttgtatttttggccttggaaaatgtcaagctcattaattaacatattttaataagaggattctgtgacaaaccagagtctattggatactcatggacaattcgggtatccaaataaaaagaaaaaagaaaagtgatttagacaaagtgaaagctcacaaattctcatttccttttaagagttaagtatccaatgtctcttttattggttacctttcatcccttttgaggttattttacttttcttcctttagcaaagccaaatttagccacaccccacaatcacattttagtttttgaccttaaaaaaattaaaaatgactttacttgtaacggtcttagtaggtcatgacaaaaaatttcattatattccaagataaaaaaaagtcattatcatataatgaaaagaaacccacttagaaactaattagaatagaaaggaatattgaaggaagtagtgacaaaggaccacaacgtttacaaaatagtgcttatttgtctaaatatcataagctcaaaattctttccatagaccaacaacaagtgattattaatgagatactttattaatcacactatatggctgaatatcagacagcttgatcgggtttcgaattcacaaattttggatctaaaaaatgaacccgatagtatataacataaaaatttaatcttttttttcatctttcccactaattagtaaggctgttttaatgaactctatatgaaacattcatggttttgtgtaaatgtataatgcagccgtacatatatggtttaggagattatgtataagagtatgagacaaaggtccctctctctctggcggtcaccaactcccacttgcttcacaacaaggaaatagaatgtgaaaatttgggttgccttcatttttttttatataaacaattattttaacatctaactgttatacccactatttagcttcctctcatttgtcccttttctgatttatcttgttaaggagagaggaacaacaaacacccttgtccacttttggacgctttgacatttttcttagggagctagtagtagtagtaatagtaatagtaataggggtctactattattagtccattaccaacgtgagactactaaagcttccacctttcttcttcttcttcaactaaagttaaagactttgatgaatatacttacccttcttttaatgaaaagcatacaaaagaaaaagcaactcctcctcctcctcctcctccaccttctccattagcttgaaagagaagctcactgtcacttgtcaaaagggctaatctttttcttctttcttcttcaaagccgtagttgtgagttttatgtggaaaagaaaagaaataacttgagctctctttggctacgttctgactctgttacagcaaaaaatgatcactttaaagggtactaattactgaaagctctgactttgctgctatgcaaaacgacaactttggtgcttcagattatcagagctctaataacccttttggtctttgtgggagtgtactaatctgtagtgggtctgtctggttttcatctctgaaaatttcattcccattattacccattttgctatggattctagtggtaaactactgatcattacccgtatttgttttctttatttatctattttttttattctgctcttctttcgttttgctgaaattattgtcgtttgggagagatttcagtgatgggttttcacgggagtgaagataataaaatgctgggactcaaagtgtttccaatgcacaagcgttcaaagaggtagcttgacacttgtacttaaatgtttttgttgctaagtaatctaattcttttgttatctagtaaagaaatagcttccttggggaaatgggtgtctgtaactgtctgagttttcacagcatatatgtatatgtatatatatatatatatatttataattacatctgtttagacgttttgtcttctatgctactcatttattgctgatagagagaggttttaaagtttgtgtttttatttcttttcggttatcaaagttcagatcttcagtgggaattgtattggtttcttgaaacttgaggctcaactaattagtatgaaatttcatcatctgttttctacttctttctatctatatgatagtgaatgagagtatttggtggcttggtttttaagaaagtagattttagttgtgaagtgggaagagagagaattatagacatgaagtcttttgttcttcaatctcattctttttgctcacttttatgcattggcagctttccagataagaaaaaggttgaggaagaggatgagtttggttgttccatggatgcatcaaaccgtgtcaaactggtatgaaaaccactcacttttttctcttttgttcttaaatgatccagattattattgtgtcataaagataggtattggtaaagtggtccttgaaataaaccaaaaacaaaaaagaagaaattcagaaagggaaatcaaatcagagaaaaaagactagtttaatggattgaaatggcaaggcttcaaattgttaagatgtgatttttctcttttcaataggatatggggcacttgaaggcctgtgttaccaccaacaacaagctatcccctaaaaaagaagtgcacaactctttgaagcaagaggtactgactttactgttcaagcaattatgattaatacagtgatacagtattgtgatgattaagctctttaaagttgtatgttggttttaaacaactttattaatctttgtgtacagattctgcaacttgaaaaaagattacaaggccaatttcaagttcggtctactttagagaaagcattgggttatagaacctccacacatgaatacacaagtgattttgaaatgcctaaggtaagaataccttattttccacattatacaaagaaaaattgaacctttttaaggcattaccatatgcctgcattttcttttcttcattctcttttgaattttaactgttttttaacacttgtttactatggcttcagtctgcatcagagcttataaaggagattgctgtattagaagtggaagttacacatttggaacaatatcttctggccttatatcggaaagcgtttgatggacaagcaaccactgtttctcctcctgccaaggatgaaagatcaaaatcgcctcttactattcccaagaaaaggctattggatgctactaaagctggtctgatatcgaagagggaaactttggctgttcaatctagtagtcacttacttgaaaatccatggaaggaatcaaatgggattgggaaagaagagaagaatttagattctagtgttcaccgttgtcactcatcattgtcgcaacattctgcattctcgactagaacttctcctccaggagagtcttcggctaaagctgtgcgttactgccattctcagccattggccatgatggaggtaacttatattgatcttctcttgatttcctctgcttaaagcttaggttgcatttggttggaagtaatgaaatagaatttaatggaaatgaatcaattttcatttagttcttttgtttggttgcatttatagtattggaatgtcattctaatggaatgactattttcattcctattcctgtgtttttattccttccaaccaaacgtagcctcagtatccttgcaaacgacattgccttcacgggcatcacggtgagtggatttctaaccttttaattgctttacacagtatgctcagaatgcttcatcaaacataatcagtctagcagaacatcttggcacacgcatttcggatcatattccagagacacctaacaggctctcagaggatatgatcaaatgtatttcaagtatattttgcaagctttcagacccaccattgacacacaatggcctttcatcaccaaattcatctctgtcatcagtgagtggtttttctccaagagagcagtgtgacatgtggagtccaggtttcaggaataattcttcttttgatgtaagattggacaacccttttcatgtggaaggacttaaagagttcagtggaccatatagcaccatggttgaagtgccatggatctatagagatagtcaaaaattaggtgacattgatcatttgttacaaaatttcaggtgaatctttgttgactaagtgtgtcttttcctttttagaatatgttttcttggaagtaaacattaccattcttacaagaaaattctattacttacaggactctgatcactaggctagaggaagttgatccgagaaagttgaaacacgacgaaaagctggcgttctggattaacatacacaatgccttagtgatgcatgtaatggtttaaacaagttcattgttcacaattttattctcattttagaatttccataactaacatctgttttctacaggcatttttggcatatggaattccacaaaacaatgtaaagagggtatttttactcctaaaggtaatatacacttctcaactaactgactacagaaagaaaatagtggtaaaatgtttatgttaactcagtcttgttcttattcttgtctttattattaggctgcttacaacatcgggggtcacacaatcagtgcggacaccattcagggctccatacttggatgtcgtatgtctcgtcctggacaggtttgtttccattctcagactttcatcaaacattggacacagacaatgaattgtcataatggaatttgctcctcttagtacttttcactgataaagcttgtcacttgttatagtggttgcggttgctgctttctccaagaacaaaatttaaggccggagatgagcggcaagcatatgcaattgaccattcagaaccccttctacactttgcactctgttcaggaagccattctgatcctgcagtatgttactattctttgtcttctgatctcattcgctttaattattgtctccttaatgttaactgcaactaaaacaggctgcattgcttctaatcaagctcattagtactcattctaagtctcaaatcaaatgcttacatcaagaaatcaaagcagatttcctttctagacttaattttcaaccaaatgttagcttctgttaggaaagttattggaaaaccggtatcctcaccttattaaatggatcgagtatatattcgtgatgtggatttaagacttttgttctttcttataggttcgggtttacacgcccaaaagaataatgcaagaactagaatcagctaaagaagagtacataagagcaagttttggggtacgaaaggaccagaagattcttataccgaagattgtagagtcttttgcaaaagattcgggtttatgttctggtggtgttttggagatgatccaacagacattgcctgaatctctaagaaagagtgttaagaaatgtcaaagtgggaaatcgcgaaaggccatcgaatggattcctcacaatttttcttttcggtatctgatatccaaagagctagtgaagtgagtttaggattcagattttttttacataaaatatctctttctttttattttaatttgtacaaagtagaatatgaagctcaaaaaagaagaagatgagaatggtgcaatatgcagtgttttgtttatctgcattttgtaatcaccatcttacaatattaatatgctgtgaaaaaaatcattttgtgatattgctgtaaaaccctgtatgatttgaattcattgcattagttaccactgtaaatgaaaatcatgtaatagattccattattcatcttgaatgtttaaactttagggttgtttggttggtggtagtagaaaaagtataaagttttatttcattattttgtttgtttgcaataaaatttattggagtcccatccaatgagattataattttgggacgtcggataccatctatctctcatttctcaatagcaaaatattgtttattttgggcttaatattgtctatttgggcatatatcttcataggtttgccttttttggattttatctgaaaagcttcatgccaatgttccatcctttaagttatataattatcatacttttcatttttaattaatgggagattttaattgcacactcaatagtgatgtttttttttttttgcaaatgtttaggagatatataatgagaataagtataaaaataaattataattatattcttactgatggttgagaagaataattacactgaaataggggaaatttttttatattgtaaatgagtattattattgtacactaatagagtttagtaccatctataagtagcactttattaatagttaatgatattcaaatatagttattatattaaaattatgtagaacctggtaattaattacaacaacaatataacacaatacagatgcctttagcatataaattgagtagaaaccatcggaatggaagttcaatattccaatctgaagcattggaaatgtttccattgcacaactatatgaaaaaaatgtactataatttttttaatagaaatattattttattacacataaaaataacttataaagatacttttgtctataattaacttattttattattttaaaagccattaaagctagcttgcaagagaagaaaaaaaaagaagacataaattcgaacccaaaactcttcatttttatttaattataataccatttacactaaaaaaaacttactccatttcaatatcaaaccaaataaaataataattaataataattaggtgagagttcattataaaaataaaaagcaagcaatataatattatagctagtataattttatttcatttccactattattctaactttattctaataaaccaaagttcatccaactcaaacttatcctattttaaactacatttaatgtgcacgcatttgtattttgaattcaatcttatctaatctactcatttcttcaaaatcattcgattacatattggattagatacttcaaaaatagttgtaatatttttttattctaatttataatcctatttttcttttttcaaaaaagacaaaattaatgttaatattttattatataacaaatgatttaaaattaataatatctactgttttttgtgtttctgaaaatgagatagacatatagcatgttcagttcgaaattaatcaactagggcctgctcagtaaccttgacaagataatggaccaagacaacccggaaggatatgcctcaagaccatctgagatatcagataattatgtccagaattagatatctctgggttcggaagggcgccttgcccaaatacgaagaatcattaaagatcctttgaatatacatccggaagggctttccaagagacgccttggaagccaacctgaagatgacgtagcgatcttccgacaccaaatcccattgtatcagggggttgtcctctgtgtcaaaccctaagagtgcacataccactaaaggaaacatcccttttgtcctaggaccactactctgacactgcagtacgcaaaaacgacacacacacgacacttgtcgacttcaagtagtcccctgccatacgaaaattaacaactccacggactgggctttaatctgtgagcccaatgtcagtgtattttatgtatttaccccactagtggaccaagtttacatgcaaactgttaggctatttttagtctatattttggatcgattttatgtgcgtttttcactgtgttggga

SEQ ID NO: 294591 - DNA, 3478 bp, Cannabis indica
atttaaaaaaaaaaatctaatttatgattaaagcgctttaaaagtgcacttcttacggccattggcatttctttctcatcactggattggcatagaactttttcctgctgctcgttaccagtgagtgtagcattcatcaccctataaaccctatctcaaagatggtttcaaagaagaaaaatagtagataatgtggatatatatatatataaatatatgatataaagaaatgaattaataacgagcaccctgcaagtgaaatgtgaaatggaaaattatgcataattccaactattatcttggttcgatcagttttctgctccaaaaaaaaaaacatcaaggttccatgcgtagtaaacaacaaacaaggtcttattgtctctagtaaaaaccacctcaacatattcgctctctaaccatgcaaataaaaatgataaattaagaggaaaatctcatcctttgttgttgcaaagaaaacaagacaagaataccaacgccactaaaacagataacagtttgtttttagttcaaatgcaatagctgaaaccaccaaaaaaaataatgccaaactacaagagaacaagaccaagctctgatggtttcaactcttgcctcaccctataattataaagataatagtgaagttgcccatcacctggtccgaattttagctccttcaagaacgagtcattctccatgacgtctaaagcgttgaaaacatcaaaatccttctgttttgctacaataagagcatcattcatcaactgaagcaatggagtcttagtggccacattataatacgagtaagcagctttcaaagttgagtaagtttgattgccaaggatggatgaaggaagagtgtagaagctgcagaagtcagtgatatcatgtgtctctgggctctcgaccaggaaactatccactacaccctcagttggaagaagccaatgctcaacatcatcttcatcaaaatctggtgcaacaacaaactgtcccaagtagtttctaagcaaccgggttactgcaggaacatcgcgaagttccatctttctaaatccaggagtagctggtgaatctggtaacttgtatagctttacagttcgactcattgtcatccttgcaccaagccttgaaaacccaacatcaataagtttctttggattgagagacctatgccagtactggcaagttgttatgggagttggaaggaccactccagcagtgtatgcagcctgccatatattctccaagtgaaccctccgtgttacctccttgatcatgacaggggctagtctcttcgacctgagcttcttatgaacacacaagaaattaatctcagccatttttacaacaacatcccgaacccggatcctagcagggactccagtaataaaagcaactagcttctttgaagcctttgcacgtacaccaatgtgccagctcctgtagaaacccggagggcgcaaagcccacctaaggaactccttcgaatagttgaatctaaacatgttctcatcatcctcaacgtaattattcttcaaaagtgcatacacctcattgcaagtctcttcagagtccatatcacatgtagtccattcatattgactaggcagattgtaaggctcttgtttgacctcagataatggcgttggaggctcaataggaccctcaggcaaactagtatcctccttatccttaaattgcccaacaggttgggtttcccaaaacttgtgtctcttgctaacagacatcgtgtcttggaactttctaacaatattttccaattcaccatcgtctttagcaatttggttagaatcagagacatgatctgggttttctttaggagactcaggaggagaattgctatcacccatttcagcaaaaattcctaagcagcgaatttattttaatttcctatcagtgaaaccaaaagcatattaattaaaaacccagtaactagatcaggcactcaaatcaagcaattgaaatctaacactcagtaacatcatctatcaaagctcgcacatatatacatacatatcggactaagcatcgtcataattgaaacaaaatcaacaaaacccataaatcgtataataacccacaccagtaaaccaccaataaataatcaaaatctaatacgtacgatgtaagaagaagttgatagatctatagaagtcaagaccacttgtagaaatatttagtaagaaaaactcacagttggagttgacggggcttgcaagggcgtgacgatttggtggtgctacttcgacccgattactttcaaataggagcttagcggatctcgaatttcaacggattgattggggagagaagggtttgatggatgagaatttttagggtttgtttggaagaataggctccgatactacgaaatgagaataggaggagaagagccagtgactgtgtgggttttgcttcggagaataacaaagaaagagtggctttggatatatttcgtgattccctatgagactttgctttgtttttggcttgttggtaaggtatcactaaacaatccctagctcttttcaaataggattgctataaggcaaaagtggtgttaactattaagcacttgagcattgctattgggcaagtggtatctcgcttctctggatatgtcgtttcgtaattagttagcgatattttttaaaaattattatattaaaatagtttagactcgttagaccaataacgatattcacacataagaggttgttagtcactattgatactttttagtatttctctaagcactattaggagattgcttcttaaaaattagttgtaataaattatgtgagatctgatacttaattaaaatttaatttttcacgcttatggccaataatttaaaaataaactcaagttaaagatcataaggaattaaaacttatttatacccttgctatttgaaaagtcctccttttaactcaatttatccatcttttaacactgataaatttaatcaactatcgcaccatttcaaacttttatccctaaccttcatattacattattatcgtacctactatcatactatatcgagcattcatagaaaaattagcaaactttatcatggtataaattttaagcaacaacttaaactgtatcgaatactattaaactttatcaactactctaatctattgaaccttcatccctaacctataaattactctatcatcgtaccaaccataccatcgtacactatcaatcaaacataaaaccaataaaaattaaataggattgtattggtttgcatattttcaattttgtagaaccaaataattattttgatttatgaaaatgtttaaaatgaaaccaaactaattaaatgctcaaactgaaccaaatcgttggtcttaagaatgaatttgttcgctttttttactaacttttttatttttattttcaatgtttataatgttagaaaaattaataataaatccaa

SEQ ID NO: 294592 - DNA, 4744 bp, Cannabis indica
atatatatatatatattgttcaaaatcaaaaacaaaaacacaaagttcttgttccttcacctatgctgagggtccactaagagcgcttttgatcttttgaatggtgcaggagatgagattgttaactgtctcaactgattcaactgtaagtttggctgatggaagactattaacaagtatttgaaacccaactgtgaggatggatccaccactgtcatcgccctcccctttcactgaagctccgctagtactctcattgtttcccgaaagatagccagactgcgatgatccgtcgggaacaattgcgaatcctgatggtaggagagctacataagcagagtctccgccatgcattactacgtttattgctgctgagtcaactggtgcataaactaccatggagcccgaggaatccgtccacgtctcttgtaatatgagcatcgtgctgctgtcgtttgcacccatagactgcaaagccacagtgcaagttagaaaaagatagaaaatactcgaacgagtaaagaaaaaaagcttgttggacaaatcgcttacaccagcacgaaggagtgagacatggttgccatgtctttggcctttggtgatatgcaccatctcctgcattggtccaccattagataaaatatcccactcgctcctcaacctttcatcctgtaagaattcaaacactctcttctgtgataccggaatccaaacagaagttgcagcactgagaatgattccgggtggttctccaggatcatccatacttttccgagtcatcactcttacatcttcaccaacattgtcaacacgaagtttatcccacttgcgcacagtagaggcacagacaccggcacagaagttatccaccatacgctttgccaacttcagcaagctccttctaccaccgagactcaccgctgttgagtaatggcattttgttagaaatacggaaaatctaaaccttagtgaaaaggaatgtaagagctatgaacaagagtaacctatttgatcttcattaggaatcgagggcgacataagagtagccaagtactcgcattgtctttggagagtggcaagccatctctgtgcaccaaagcccaagccagaacttatatatgagcggaacatttgatgaacaccactagcatcgtactctgtatgttcaacccacgtaacctgcaaattaatgatcactcatcaacatacaaaaaaatataaatatatgtatataaattcaaatttaaattgtatcagtaaaaagttggtgctatgtagatgttgtttagggtttcaagtaatatcactaaccaaatcccttttaaatgttaacaatgttacagcttcatttgtttgatatttaataacattttattattaaatgtaaaccttaagcctgattgtatctgtagtgtttcatgattaaattaggttagtagtcttactaaataatgtccacagggtttgtttcaaagtttgagaattgagacaattctctaataataataatagcctataggtaactagacgttgcttaatttgtgagatcaccaaaaaaagattcatcatttgagtttaccaaaagacccttcacaagtttaagggaacatgagatctagtcagccctagattaacctgaatcgtgatataagattcagaaggtttgcatatattaatgaacaaaattaagacttagttcttatttacttatttagagtaattaacggcataaatatataaattttaactttcagacaaatgaatacttaagtttaacttttaacggtaataattctaaaattatatttttaaaactctgtaggtatatttaaattaatttttttgccatttcttattggatcaattaataatttcagtggtaatttatttaacatttaataaaatagtacctacggagttccaaaaatataactgaaatattattatagttaaaaattaaattaggtatttatttacaaattgaagttatatttaagtatttataccctaaaatagtattcttattattctagtgggcaaggtgaaaacactcagctgtcaatttgtttgctaatttaccatgcagcactcagtgttataaaatgatatattaagaatccaaacagattgaaaataaatcaataaataaatattgagataaattttttactaatgagacaaaaacgtggccctgagggaatatacaaatagagcaatttaagataatatcacctagagatgagttgacaagaaacccaaggaaaattataaaataatagcagcatacagatatagaagaaaagaaaaagatgaagagaaaaagtcaaagttgaagtggcactttcagcaagatatgtcatgtcatgtcagattatgtaaacaaagaatcacaaaaaaaataaaaaataaagtcatttttaaagtttcgacaaagagattttttaggaatatatatttatggcgcagctaatatataatgataagagcacataacatgtagatcaatatataatcctatgaaagactggatccaggtcattaagcctcgtagacaataaagaaatggaaaaaaagaaagaagtagagataggaatagaagcatcaaatatatagtttaaacaccaaagattgagagtaccaaggtttgtttttttcttttttatttcttaaattttcttaaacttgggagctgattataaaattactataataataataataataataataaattaaggttacggaaatcgacatgaagatgtacactaaaaatattaaataaaaaataacactgaggacccctgattttctcatcgtttagagtggctatatggactaattaataacagacaacaagcaactttgcttcgatatttgaagattatatgtttatataatgatcaaaaccagaaaggcatcttccaaagtaaaatttataataaagggtacagattcttaggtgaagtccaactatatttcatttagagcaatcccataaaagagagaagcgtttttggtgagcactagtcaagatggtgggaatctcagcagtacatcataatttttcacctagtttttgtataagtctctctcaactaataatattaacaacactttatgcagttatgtcaactaactcattaaatatatctaacaatggaagataatggccatggcagacaacaaacacaataaagcttagccagcgcaagtactagttgagtgtaaaaaacaatttaacaataacaacaagtacaatttacaccagattatttatttggttatttaccttggaatagccatcaggcatatcttgcacaaggcacccagatggaagcctcctacattggaaatatgactctgcatttaaagcttctcggttgatgtcgatggaaacatcgaccacggcccagacaccatccccatgttgtttgcagaacctgatgaactttagcggacgaagaggaaccaatggtgataggacttgaagctccacatgcatctatcatcaaatataattattatttattcaatttattttttggagagcatatcaatggaaaatggatagagcacagtaaaataccactccaagtgctccatttctagttcctcccatcccagcagatatcatctcaatagtggaggctctagagatcaaacaaggaaacatttctatccatcgattctgacaacaaaatagtgaaaccatcaatagtgatgaacttctagcattggaataaaagatcatatgaaggtattcgaaagtatagagtgaaaatttgaaatgcataccgcatccatcagtgtctctacaagtgctaaactattgatgatcaccacagagctgtccctagtagcttcggatacataaccgttgggttttgctccaatacaaggaggaaatgttctcatgtactcctcatggtttaacatttctttacctcctccatcactactcttgatccacatagggccttcagcctgagccaatttcaacaattcatccatagctgccattgctagatcaataaacatagatcggtcgaacggtatttcattgccaaacgcactcatccccattgaagatttcactaaaggcatcatgtgggcggagctagaaactccatctcccaaatcaagccccattggcaatggtggcccaacatttaaacctcccatcccatttcgtcccatggcaagttccaaactggcagagcttggcagagggagaggggcaaccaaggacgagagaggtctgcctaaaaatttgtttgccaaagaacaaatcctactcaattcgtccttcaagcgagcattctcaatcctaagttggtgttcttcaaaagatatctgaccaggaatggctggaccaccacattggttgcacattggatttgacatggcatccttaatcatattgttctcagctcggagtttgtcattctcttgtctaagaataatattttcatggcgttccaattgggtctgattcaaattcatcactttctcattactaaaacaattaagaacaataaataaagcagataaatttgataacataccttcatttgtgttcttcgattttggaaccaaaatttcacttgtttgtttccaatgaaagcctcctactgagttccaacctttgcttttcatcagggtgtggacactccttaaagaaactacaccataaccaaacaaaataataaattaaaaaaaaaaaaaaaacaaaaaaaaaactaca

SEQ ID NO: 294593 - DNA, 3309 bp, Cannabis indica
gatgtccaaaccagactagtcataattcatcccttcttttgagtaaacactttttcggagaagaaaaaaaagttaagactttcagagagaaatgctataccagtagctgctcaaagaagaagaaatagcatattgtgctgattaagatgagtattaccaagtcctgccaagcactgcataccaaagttcatctaaattagattctttacgattgttgccaaacgggatgaataaaacgcacaaaaatccgaaaatgataaaaccaaaataaaagaccctgtaaacatttggctgaatgaaatcacaactgaagaaaaccatattgaataaatgatcccaccttattgattctgaatctggattctgttgagtgcgctcccgcctgttactcctttgaacggagcttggcatgcgaagcaatgtcacgggtaagttcataacctcatgctgacatacctcacatttcttgcttcctcttgaactaaaccatttcactgcacactcttcatgtacaagcctgagggcacccttgcaactgcattccatttttgagtgtattcccttcatcacattcatcgagacaaatcctgcacactgcttcctcttcaggaatctcttcctcttcttcatccatcgttgctggactaatttgatctgattttttcaaaagcaatgtcagtgggggtgatggttccattgttgagtttaagcgactttcataattcatgtgtcggctttaactgggttttggacatgaatatatgttcattgaactaaaattcaaaagacaagaaatgcatccatgaataattaaaacgatttagttttttcttattacaatgggatgttacataccgtcattaggatctggtatgttttgctcattacgagtagcgaatgatacagatcttactataaccatgtttctcccaggaatagagagggaccttgaaactgtagccttatcttcttctttctgcacaaattgaaacaaaacataatccccatctttattcaaattactgattactgagccacaaataagctgacgaccttttaaacaatgacatgaaaatcaaaggtaaacattctcctaagttcaagattcatatgaccacattagtctagttttagtgtagggaaacatacaagtgatttaggccgttcattagacattcttgctgaaagaggtgtggcagcagaaggaaacaattttgattcttgtctaacaggaagtgaagtacatcgttgccaagaaaatacagacttcaagttggctatgatgggactttcaggagctctttgggtgtcggtgtctgagttgagaagagaacttctctcaccctctggtacaacacctttcttcttgaaacttaaagctcgtaagaaacctcccggtgaagaactacctttagcagaaccttgagactggagcaaacccttcccgcttcgactactgccaaaagctacaggtctagggggtatttgaagtgaaatatctgggcgcttcccacttggtccaggctctagtacttcgtttggttttacattctgtgaatcggcctgcatcaagaaaattatttaccatcaatagaatcagataatctttcaagtaatatgttatctattaggcctgggaaacaaaagcatctaagacataataaaccacagaaaaccatgcaacaatgccaaatgacatttcttgagatgttcatatccgcaatcttgttttacaaggtgaacaaataggaacactagtaatttggtatgcaatatacactacattgtacttgcttcttcactaaagagttgtaataactcatgaaacttgctcatgtatgaaatgaataggtttaaaatgtcaactttaagttaattactatcagcattaggcataacaaaagatgggaattcagatatgaagttgttcaatcccaattccggatgtattattataagccaaaaaaatatacttatacgcctagaaagttatctagtcagcacttggctagtttatctatcaatagtaagtctattaatagtaaagcagagaacagcatagtttaaattaaacccactaattaagattatgtcagctatgctgaaactcactcaaaaatggaattagtcttgaaaaaggaatactaaagatctgcactaaattacccacctaggatcttccagaaacaaaagcatattacaaataaaataacaaagaatattacaaggcataaacagttcatctagatctgcaaaacaaccatatttgattgagagttaacagttcaactaagcttaaactagtaaaattagccccaaaagaagaaaatgataaagtaattagattttcactccagaaaactaaatgacccattatcagaatcgtacataaaacccagataaaaactacccataagatgaaaaaaaaaaagcaagttgggccacctaatttaagcatagataagaggtaaactgcataacccagaaacaaaataagtggatacaaatatagtaataaatcaataatagatatgagaacattaataccatgagttaaccaacctgagaagttgattctgcaactccattaatgtcaggctgagcagcttgcattattgtaccaaaggccaccaccaaaaagaaaaactcagaagaaaaagaaggattttgtggaaagtggcaagtttgaagggagtacccagatacccaaaaaggaaaaataaataataataataataatatattatataatctaacaaagattatgaaaggaggacagggcagggcaacccaggagggagagagagagaggaaggaaaaacaaccaaccaaaccaaggaatataataaggctcttgaagtttgatgttctgtgatatgtaatgtttgattggttttattaaactaagaataaagtatgaatatttatttcatagaatagagagagagaagacaagaagttgagttgggagaagaaagaggacgatggtctcgaaccaacattggattggaagaagacgagaaagtttgtccgaggcaggcatgcattggtcccaccacacataacaatatgctaccacatcttcatctcatttcatttctttcatattcccaacttgcattttcctctacactcattcttcgctcttctcttttctacttttttattaggctaataagaatttttgaccgaactatgaaatgtactaaattatatcttatgaatttttaaagtggttaaaaatattttttgaattattaagattgttagatttaaagacttttgtctaattttattcaattttactat

SEQ ID NO: 294594 - DNA, 1608 bp, Cannabis indica
aagatttcaaagcctctttgttcgttgttggaacaaagctgtccatttgagttcaccaaggagtatatgaagattgtacatatcaaggaggttgaacctgtagagttcgattccttaggatagcatgggatcatttgttcaaggttgagttgtgtgcttaagaacttagttgctgagaattaagggggattcattcttgggagatatatcactcataacgatatcatgatttgtcaagatcttgttcgacattatgagtgtgcaaatgctaagccaaattgtctcataaaaatagatattcgcaaagcttatgacacattttattgggacttctttgagaaattgcttgaagctttttgatttctaggacactttcaaaaattgattattacttgtgtaaggtctccttataagtcttcctcgatgatcaatggctctcaacatgggttcttgaactcaaaaagcgggttaagacaaggtaatccgatttctcctcttctctttattttagggataaaatatattactagaaccctgaagaagattgctagggatgttgattttaagtattatgaaaggtgtgctccgatgaataatattacatataattatattttgcagatgatgtaattcttttttgtcatggtgacttcaacttagtctacaagatgttaagaggctttaatttttttttctcagacttcaagtttacaagctaataatagtaaatctgaagtgatttgtagtagcatggatgaggttaaagcgcaaaaattgtaaccacttctggatttaagagagagtctatgctttttcgataattggagatggctatttgtactaaaaaaattacttctaaagagtgtgaaactctggtggataaaatgggtacataccaggattcaatagtggagctttaagaatatctcctttgctagtcgtttgttgcttgtgaaatctgtgctcatttcccttcactcttagtgggttcaacttgtggtgcttccaaagaaagtttttaaaagaataaatgctatttgtagggcctttctctggaagggtgtggtaatggcccgggaagtgtagcttggaaaaatagtattttatttcttcatattagcaatgagtctgtggtcttttaaaggtcattcattataccacactttttgtaattttcccgcttcaagcctccattgagcattcccccacgaatttatagctcttatacatgagtgcgtcactctggctgcttcctagaccgacgactggccatacagaccaacacgagtattttcagtgtgctttgtcctcacttgcacgctttctgaaaaaaagtttctaagaggtcactatcctgaaattaccttaggtgaatcccacttaactataaagttctttatgaggagctactagaaaaaaaaagatgcactttgttgatatatgtaatattaatcaatctatttaagtcatttttttaccgtgtagtcccatacctagtataatctcaaaaattatcacacttgaccttccctaagtggtgtaggattgcatagcttactcgatatttttcttatggatcacaatcgagactactaactgtcacacttt

SEQ ID NO: 294595 - DNA, 1341 bp, Cannabis indica
aaaaaaagaaacaaaaaagaaaatctcatccgcagaaaaaaaaaacctattagtgaatcagagccaatatccccaatcaaatggttaatatttcatcttacgtggacgttccagattattcgcttcacactctggcgatccgctttattcaactacaaccaatcagaacacgccacgtcatttcgacacagatcgaactctcgctataaaagcccaacgtccaaatttttaacggcgtcagaaaacacattcgtctgttctcaagaagataatttcacatttttcactctgttttttcgcgatgacaaccgccaccgaatcccaagctccggccgtcgaagttgctccggttccggcaccggaagtagtgtctaagaaggcagcgaagcctgcgaaggagaagaaggccaaaatcccaaaggaaaagaagcctaaacagtcaaagatcgcttctcaccctccatattttcaggtattgaaattcgattgcgattatcgttagttcttttccgattaagtaaatgatccgatcattgattgtaaatttacattttcgcagatgatcaaggaagctgtattggctctgaacgagaaaagcggttcgagtccttacgcgatcgctaaatacatggaggaaaagcacaaatcggttcttccagcgaatttcaaaaagattttaggtcttcaactgaagaattccatttccaaaggtaaactgatcaaaatcaaggcatcgtacaaattatctgaggcaggaaagaaggagaagaaggtagtaactaaggtttcgaaagtaaaaactgggaaaaagatcaccaaacaagccaagacaaaatcagttactgctccaaaagccaaagcaacgaagaaacctaaagctgagaaagtcaagaaagttacgaagaaggcgaagaaatcaacccctgtgaaacccaaacaacctaaatcgatcaaatctccggctgcaaagagggctaagaagaccactgcttgaatatatgtaattactaactaaaaaagaataatatgaatgtttagcattttcgtttgatgtaaattaagtatttagggtttttcttttttgttcttagtttctgtattagatttggaatgttaataaaaatttaggtttgttaatcttgttatcattgtttgttttggtgtgattaatttgcttaaacatcgaaattcgggtctccatgcattgcgttttagttcttcaatgcatggtgtgatatgatcatagtttttccgtgagtggttaccagggccggccctgaaaatatatgggcccaagacgaattaaattttggggccctcaaaaatatataaaaaaataat

SEQ ID NO: 294596 - DNA, 5585 bp, Cannabis indica
attctcctccggctactccattctgttgtggcctatttgtacatgtgaattgatggcgtattcgacattctcaaagatactcagaaattttatctgaggtatattcaccactattgtctattcggaggcattggattttctttccgacttcttctactatttctttaaactctttagattttgaaagagttacaaatttttccttcataaagaaaaccatatgtacattgagaagtcgttgatgaatgtaatcatgtaccacatgccgctgattgatggttgcttgactcgtccgaacacgtcagaatggaccagctccaatggtgctttggctttgaactttgaatcttcatatggtaattgatgcgccttcccgtattgatagctggcacatactgtcactattctgacctcgagttgagaaagacccttcagcatagacttcttcatcatcgccttgagtttatgataactaacatgtcttagccttgaatggaacaaatttgctgtttcgttcttctaagtcttgtctatataagctgactctactgaaattacatagatagactctaagcgtcatcatctcatcatcgctgttccagagatctcaagatcttggtagatcttgagggctgaatacgacatggaggtcgcatgtcgtaagttgtgccactaatagtaaatttttcttcatcccaggtacatgatagacatcctagagtgaaacttcttttgggctgactctctgtagtcttgagttgttgcccgtcaccactacacgaccatctttgtaatcgatcttgtcttgtagcttctcttcatctactgtcatatgatttgagtagccaagtcgactattcaatcattattgtagtcgattgtttcaggaataatagctgtcaaagctaattcttcttcctccaccgcgaatgattcttctgcgtcccattcttcatcacttgtcttttctgcatttgacgtggctgcatttccttctgcatttttcttcttcaaccaacaatttttagccatgtggccatactttccacaattgtagcattttccatcaaatttattgttattctttaattggccaccccttttgtctttcttctgagctctccctgtttgggagtttccatgatgactatccttgtcatcatgttttctaaaatttctaccagcatttcgtcgaggtcgtcctttcttatctctactacagagttcttcttcgtcactctttaatgaaactctagatatttgcttaactaatgcttcttggtcagctaacaagttttctaattcaacaagagaaggttggcttggccaaccttgtattgcaacaataaaagttataaattctggccttaatccatgaataataattcttctaattctagaatctgacatgccagcagcagagtctaatgtagagattttgcgacaaagagattttaccttagtaaagtattggttgatcgtcatgtctccctgcctgattgagagaagttcgttctccagaagctgtaatctcgtatcattcttcttggtgaatagtgatgcgaaagtatcccacgcttccttcggtgtcttcatcaacctattgtgctcaaacatttcatcttcaactgtggtttgaattgcaaacatggtttcgtccgctttaatcttccatttctttaaagtggatgcatcctccggttgtgtgaattcattgccgctaacaatctctcacaagttttggccttggagatatgcctccatgtgcatcgatcacgtgttgtagttttggttgttaagtttttttaattctaccaaacacttgaagatcacccatgatgtcttagttaaaattctaattttaccaagaaagcttgatttcaacaacaagctctgtagtactaaactacacacgaccactcttaaaaactcatcaaatgactcttgatataaactgacccgacctgactctaaaaccacttattgaacactacaacacataaaaaaacgtaactacttttattattacaaaaataattatactaaaacttgactacaatacacacaattacttattcttttattttacttagactacagacactcactaatattggatctcatttggactttttcacttgtacacacacattcaagagaccaaaagtctatttatagtgctcatgatcggtaattagctagaaaattctagcaattatatcaaaatgggtttggcccaaaaactagataaatctagtaaccttaatttctaaaagtttctagaagtcggtggtgacttccttcaaaatataatcttttctaaaataacatatattatggataaaggaaaaagatacatgaccaatcttaacatcaaagaaggaccaatataatccttcattttgaataaattacaagtataagatgctgtgtttaaatattccttttattttctcttggtgataggtttaaactgctcacacaccataccacattttttggtacaatgtggtgcagcatatatatatatatggtgttcaataaaaaatagcaaaaaattacactattatctttcggctttcttcttcaaattacactgtattacactgcatatataggcctatgtgtaaaagcatagtaaaccacatataggtataggcatagtaaaagaaaagcagacctttttattatggctaattaggatttttgccccctgaattttgatatgtaccaaattatgcccctgaatttttaaggccattgaaaatgccccctgaactattgagattattagatttaaggacttttgtctaattttattcaattttactatttcaataattgtttatgtactaaaccatgttccccagactttgatatctaccaaatcatgtcattcgaactttgacatgtactaaattaaattatgccccctgattgtttatttttgttttaacaagaataatttatgcctagttgaccttgttcttatttttagtagttattagttatgaatacttaatataggtagtaaatatagtgaagttagttcacactggtactttagcctatcattggttaaataattaattagctgaactctgttgtacagaattagtcaaattctaatctgtttattcagttatatgactagttcaaaatgtatccaagtcttattcttataaaaattattaagattttttctattattcattttagacagtggctgaggctaaataaaagagggccaaaataatagttcttgagatacataatgtattgtcaacaaccacaaataaaatctactctcagttttcaagtctgttaatttgttttttaaccagtaaatatttttaaaagaaaatgtgttcatagattaaaaaaaacaaacaaaaatcacaaattcattaaaatcagcaataatctcaaaaaaaggttacattcaatgcagaaacaaactaataaatcatttttattttctcaagaaactcactacaaaacaatgaaacatatcaggccatttcaagagtcttgtagcatatagaacaagactagttctgaaatcttatacaaatttaatctgaatttcaacagtcaataatactccatttccacttgttgcttcattcttttacttgagaagaacatgattaaaacgagccacccaactgcaaatcatgcagaaaattgaattgaaaaaaagaaaagaaggttgcaatgaccttctaatgcagcctcaaatggcattagaaggtcaatttgtacaaagcaaacaccacaaaagattatatagtatgtaagagcttcttttattactaattttgggttcaaaataatgcttaaaagttattttgtctcaccattatagcctctatctctttgtctgagacaggggttcttcttggctgaagggaagcttttcctcccaaagtattctcatggggtgccccccgaacatccgatccttgagcggatttccgatcactggttgcttcttgagtttctgcagctgaaactattcactaaaattcattacacaatttaccaaaatagaaaaactaattgggaaaagattccaaccaaccaacaaaacttatatcactattgcaaaggataaacatggatataataattatcattgtgtttgtcaatctgatcaaataaatgaaatctaatttccagtaaaagaaacaaagctaaatttagtcaatttagaaatcatccattttttatcaacaagttttgtcattttcctactgttagattcaaattgctaatgtcagggaatcataatgataattaataaaagacaatcaacaaaacaaacttctagctggaattattgttgtaatcccatgtgtgagattaagagattctataaaagattgaccaaagatacaaatttttattataattaggatcaaattgtcaggaattttaaacatgaacaacctaaaatcacacattacacatacaaaagaaaaggttaaatgttcattacttccaagatattagatataacccaattcacatttagtctaaaaacaaataattaattcccatacccaattctatgaagatttaacattcaacttaaaaataaaaaaattatttgttaaagaaaaaaaaggaaaaatgaagaacacaggtggaaatggaaagatgaaaggaattaatttagaatggaaatggagaaagagacctgaagatgagggttttgggtgtctatctgggaatttaatgcgaggaattctcttcaaaaggtgacctgctcctcctccccccatcactcacttcttctcctttttctctctctacaatcacaccacacttgtatatatatatattttcagaaaatatatacaaaatttatatttaattaaggctgaggatttttactccccaactttaggatgtattaaattattttctgggtgttaaaaatttttcttaaactattgagattgttagatttaagaatttttgtttaatttcattcaattttactattttagtgattgtttatgtactaaaccatgcatcacagactttgatatctaccaaatcataccctcgaactttgatatatagtaaatcatgccccctaaattttcatccatattaaattttttactaaaattagataaaagtctttcaatctaacaatctcaatagctcaagggacatttttaacgacattaaaaatttagggacataatttaatacatgtcaaaatttgataggtaaaaatcttaattagcctttaattaatagtttcatttactccttgctctattcaatataagagttttttcggctaaacaatctcaattattattcatttgtatttaactttttaaactcaaatggtaaaattttcccaaactattaaaataataataaatttagagtgccatcatgttccacaactaactatcaatataaatacatatgtcatatttatattagtacacataatattattattttaaaaatataaaaattatttcaaaatctataatattttttattttataattttatttaattttaaaataaatgttgaaaattatttttaaataata

SEQ ID NO: 294597 - DNA, 2583 bp, Cannabis indica
ttaatttttagctgtaataatacataaattataattctgaaactttgtaagttacgtatttagccgttaattcaatcattatccatgtattattttttttattggatatttaaaccaatcaaaaatacttgatttttaacagtcaaatacttacaaaaattacaaaattataaattaattattattatcgctaaaaattaaacttaattatttatttataattagaaattaaaattaaaataatatatttatacagcaaattattattttttgtttttattaaagaaccccacttatgttattgaatgtctcaatcttattggtaatatgaagaggttcaataagaattcagaagacaatcacgccagcatctctgattttgatacccacagtactgtttccagggatccggataggaaatttggtttcagctcgatgagggcaatggggatctttgtcgtttttttgatgatattttcggtattgttttcagtgtccgtgattctcaaagacccgccttctgatgctgttttggaaacttcaggagctagagttcttcgaattaactctaatgaaggtacttggttttgtttcgtttgtcacatttgttgttggactttgattaagctttattttcgaataattgtgtatgatattccaaatttgtttctgggttttactttatttttatgatgttggatcatatagtttgagatgtgataatgctggacttcttagtgattcttattattgtttgaatcgttggtttgttctctcgttgaactgttgtggtatgctgaaaagacatttctcatgacatttccatactccatctaagctgttcgattgaatatagtctagtctacgtgtttgagatttgtatcattggttttagtctaagcttagctagatattcatctgacagtttctggttcacagttcatagtgctattacactcgagcatactaactatactttaaactctgttctactacttaatctagtttgagctctgtatacttcttttttattattctttgaaattgagctgaaaaaaagaccattttctttatgaatcttgcttaaattactttcagtatggtgtttggtcttcttttgttcagtagggagcggcataagtggtcctcgctgccaaattatctcccattatatctcttgttgccaaaaaaattcaatccatgatccacccatgcatatagagcactgattggctgcctaataagtattaacttaacgaacaacattttaataatgaaatcccttgctcaagcactttataatagctccattaattgctgtctctcttttacagctataggtacagaggagaaatcatctgacactgttgactatccagtggataaactgctttacggccttcttactgccggctttgatgaaagctcatgtctgagcaggtaccagtcagcttcatatcgcaaggaacggcaggaaaaacctccttcttacctcatttcaaggttacgaagttatgaggctctgcacaaacgatgtggaccttatactgaatcctataacagaacagtggagcaactcaaatctggacaccacagcagtaccacagattgtagctatgttgtatggatttcgttcagcggactagggaataggattctcacattagcctctgcatttctttatgccttgctcacaaatcgagttctacttgttgaccctggtgttgatatgactgatctcttctgtgaaccatttccagaagtctcatggtttcttcctgcagattttcctcttaaaagtcaatttgctagcttcgaccaaaaaaatcctagttgttatgggaaaatgttgaaacataacaattttacaaatcaagataattttaagctgccaccttatctctatgtgcatctggtccatgattatgattttcatgataagcttttcttttgtgaccaagatcagaatctcctccaaaagatgccatggttgatcatgaaaacggataactacttcattccgtcacttttcttgatcccttcctttgaccatgaacttagtaaactctttccaaataaggatttagttttccatttcttgggtcgatatctcttccaccccacaaacaaggtatggggacttattaccagatactacaaatcttatttagctaatgcggatgaaagaataggtattcagattagagtctttgatgttgggactggaccattccaacatgtgttggatcagatcttagcttgtgccattaaggaaaatctgcttccagaaatcagcaacgaagaagccattatcagtccctcaggaacttcaaagtcaaaagctgtcttaatgacgtctttatcctcgggatactttgagaagataagggacatgtactgggagcatccaactgtgacaggggatgtgataggaatttaccagccaagtcacgaggagtatcaacaaacccataagcaaatgcataaccagaaagcacttgcagaaatgtacttgctgagcttgactgatgtgttgatcacaagctcatggtctacctttggctatgtggctcaaagtcttgg

SEQ ID NO: 294598 - DNA, 3211 bp, Cannabis indica
gcaaaaatacggtttttcagaatactcattacactcatcccaaaggtcaaaaatccaaaaaaatatatctcagttcaaactaattagcctttgtaatgtcttgtacaaactggtttcaaagacaattgtttttagattaaagccattgctatctaatgcgatttcatttacccaaagtgctttcctttctcggcgactaataacagaaaatgtgtttgttgcctttgaactcttgcactctttaaaaaaacataagaagagaatgagtgggatatgcagcaatgaagcttgatatgaggaaagctttcgatcatgttaaatagaatttccttggaaaaaatatgctagcaatgggtttttctccaattctggtgcaacttatcataaggtgcattacctcagtttcttattctttttaggtaagttaagaaattcaaggtaatattaatactgagagaggattacactaaagggatctaatatcttcttatcttttcatcatttgctcagaaaccttatcctggttacttcaatacgatgaaactcaaggcaaccttcatggcttacgaatcattaggaatgctccatcagtcactcttttgtttttgcaaatgatagacttatgctatatgaaaggttaatctttcttcggccattgctctcaaatgctcattggacctttactacagagcctctgagcaacttattaatcacgataaatcatcattatctttctctcttaacacaagaagagaggacaaagagatgttccatcaaattttaaggatgcatgtatccaaccacttcatgaaaaatatctcgaattaccatcctattttggtagacataaaatgatttggtttcaaagtatcacatatagaatttgaaaattacttaattcatggcaagaaaagtttttctttattggtgggaagaaagttcttctaaaatttatagttgcttctaatcacctaaaggtttgattgatcaaattgaaaaaataatgaatcagttttggtaggaatcaaatgctacatatactggtacacattggaaaatataaaaaaaaacatatgtcgatcaaaatatgaagtagtttgaattttcgagactttgttcattttaattaggttttattggataaacaagcttacagaattcacttaaactcaaactttttgttgagtacattacttagacatcagtattactcaaatactggcttcttaaaagttgaacttggatctcatccttcaatgacattgaaaggtatcttatggggaggtcaactactaaagaaatgcattagatggaaagttgacacatgggaaaatatattttgtgcatctgatggtcgacttcctggtatttcaaattttaagcaactatgattcttgtgacttgacccttctatgatagtctctagcttgatctctcattataggccctagaatacttcagtgttgccaaatttctttcttccttttgatgtccatcgtattttaggcattcctcttagttatatgcctcacaaagaccataagatatggcactatatttctgatgtatgtacacagttaaatccaaatatcatattaccactaagctctcaaaatcagaaaatgaatcaagctctaactttaaatcacgttggtggaaaaagttttaattttttaaggttcatgtaaatattagaatttatatatctatggcgtgtcttaaatgatttgctccctgttccagcaatcttccatagaagacatattgcagattttagtcgctgccctctttgctcccatcataaaagaaaactacctatcatgctttgtttgagtgtgaaagagcaaaattggttcgaagaacttctaaatttcatatgttgtaacatgactttgttggttatatataaaagttcatcttctaaaaaaaataaattttatttaactatatttattagtaaattactaaattaaatttacaaatatttgttaagaaattattatattgaaacatttagggggcgtttggtaatacttttgtttttttaattttttaatcacaaatataaaagtaaatttatgtttttaaaaaacaaaaatgtgttctataatttttattttttttttattttttaattttcttaaagtcggctccaggcttgagtctggggcaaggctgtggtttgagtccgggactggagttagggccaaagtctgagtcccaaagtccagattgggtcagattttaaaatattaattaagaaaagaaaaattattaaaaaaaattttaaaagtgattatttttgttttcaaattttaattcttaattaaaaattgaatagtaaaaacagttttaaataatatgtttttgaaaaatattttaatttttttaatttaaaaaataaaaaactaattaaaatattattactaaacgcactcttagttataaaaaaaatcaaaaataatttgtgccgactttgaactccaaacatattttagaatataattactgaccatttttcgaaaataaagttttaattactttgtaaaatatacgtaatccatttttttggcagaatacatcgcttctattactttgtaaaataatagtgctaaatggcaattaaaaaacgcctggataatgatataccaatttaaaacgagtataacatgaatttaatcatttttatttcttgattagataaaaattttgaccgtaatataattaaataaaaataataatttattattattaatagggaaaatgatatatagtctaaaatgaatcaagaagtataggcggtccaagttaagaagagggatttttattattttgataaatgccttggtctacaataaactgtaattggaattagaataatcaatgagagaaatctatcggtttaaaatagaaaataatcggaaacaatattttgttatggtgtttactaaactgtcctgaaagaaaactagaatcatattattttgtttacataactaagaaatgtaatcggaatgctttaatttgacaaaattgtcattattagaacatgtaattattttctgtttatagatttttaaggggtatatttgttttttctatttttaattaataaaattaaaattaaaataaattaaataagaaaagggaaagacattccctacaaaaatgcggggagaacctttcctttgttttctccctaatttgtgtg

SEQ ID NO: 294599 - DNA, 6605 bp, Cannabis indica
acagtacaaacgaaaaaaaatagaaaaaacagtaataggtgtaaatttcccaataaatataagttttccttatttagattatttgatattatctttgtttttttaaggaaaatctttattatatttattttattcctatctaatttcttagtcaagaaacagtgtatagatgtatgaataaaagttgtcaaagttttcttatttatatatgaaatttttgttaaaaaactgtccaggttcaatgtatctatttgaacagattgactgtctgtttaaacagattctgactttcctatttgaaaatattttttatttattggcctgattgtttcttgattctttcttcatgacctagaaggtttctaaagtgtataaagacactcctaggtcattgatattttttatatctctttgtgtatcatttcccaaattactttcaaaattagagaaagtttatttgttatgtgaagaacttgagtccaacaagttcttagtattttattattgtattattcaggattctttcttgttgaaattgtacaggttgaacaccttggatatcattcatcaagtttcgggagaagtcttgatcatgagactcttttcgggaggaaaagagcaagttaaacactcttcggaaggaagatttttttttttatgaatcaggaagttttttccaaattaactatgatttgtacaaactataagtaccataaccttcatgtcatggcctgcatatttctatacaagattttacaaagaatgaaaccattcctcatttttttggctaactttctctttgctttacattttctttaattctattgactaactgagccatatttggctattttccttgccataaaatctcatttttggttttccataggttgtataccattctagtaagacaggcagccatcacttttttaaaaaaatttacttactttaatccttttgaatccacctggttagtcgaggcaatgttgtattagtgactctccattgcatccatgttgcaatttcaataagatatgccatagatctgttgcaggaaaaaaacaaatggtcatttgtttcctcatgattgttgcacagaacacagtgggaatctccaacaatgccaaatctatgtagtcttgctttggttctcagcttctacatagaaattcatagaataaaactatgtttaggagtattgaatcttccccatacctactcactccaccgttttttatcttgagcagagcaaagtaatttttaatctgctgcaatttgatatgcaatttgatatctctctgctaggaattattgggtatcaatcagaggccatatctacttttttagagctactagttgtctccaataccagctcccttggcaagggataaagtagctccaccagttttcctctttaaggtaaacactgtgtatccatttgactgacgttttttttttttttacaatttgcccacacgtatttgatcattgcaacttgattccattccttaactctcttgaagccaataccccatgctgctttagtttggcaaacattgtcctaagctatagcacctgccccttgaaacaagtgttggcctttccacaagaattccctacatatagcttcaatatctttgattactttctttggaaggagcatcacctgaccccaatatgcatgaatagttagaaaaatagagttaatcaagacaactctgccggaaaatgacaaatgtcttgaactccatgttctaattcttgctgtcatcttttttactaaagtggcgcactctttgctcgagatcttctctgtacaaatcggaacccctagttaggtgaatggtagttgctgctgagtgaaaccagaagttgctagtactcgagttacatcttgccttggcatgttgctgcaataaattgtagacttagatgcattatggagagccttgaagtgtgagaaaatagttttaggccttgaagcaagtatatcacacttttgtagtccccattatagaacattaacacatcatcaacaaagctgagatggtttagttgaagctgatcacatctatcatggtagaaaaaatcaggtttcatacccaccttcttcatgattcttgtcaattctccaccaggcagtagggttctaaaacctttatcatatttatcacatggcctatccaatttaccaattattctggttgccacatatgaatgagtggccccaaagtcaaagaaaatagaatagtaagagttattgattgagagctgacctgtaaaaactgaggggctagcttctgtatcagtctgagtaagagcaaacacccttgttggagtgggttttgccttagacttctattcttccttctttaaatgtgggaagtctcttttatagtgtctagttacaccgcattggaaacatcctcgacctttacactcacctagatgatgcttcttacagttagggcattctgggcaagtgtatcggctcttagacccaccttgacagttaccacaaccttggttcccttggaaccttttattctgattcgagccaccaaacgtagatgggacttttctcttttgatcagtggttgagtcattaccactcctaccataactaaaggtaggtggagcagtggctccaccaacaatttgagtcactcaagactccaaaatgcacttagatgcaccctcagctcgtagtgctttccccaccatatcagcataagtggtatttattgtaatcattaggtcgtgtctaatctcagggttcaacccatctagattcttttctttcttactaaagtcagttggcactattctcgaggctaacctaggcagtttgtcaaactgtgtcatattttgtaactaacataatttccttctgggtcaactgagtgaattcctttctttttgcactacgtactgcttgttatagcacttcgcattaaacaactcctagattttattctcaagtgatagtggtaacatcctaggtgagagctaccatatcccaccaaactagggtatcttcctggaactggaaggtagcacaagtcactttgtcatttccagtgactcgcataaagttcagaatttgattgataacagttagccactgttcggcttttataacatctagacctcccagaaaaactagaggcgcctgcttacggaacctttcatgcaatggttccattcaggtaggaacaggaatcgaccccacctacacagcaggggcaggagccacttgcacctcaagagcatgcattacaagagcaccctgctacctgaaatgtcgaatctcctcatcttcctcattaattctggcttacattgctataaacctattctcccaatcttgggcagcctgtggtgggttaatatcaccctgaccgcgtgccctacctcttaggcctctacctcagccatgaatatttgggggaaactgaactccctgaccaccactagatccgatcgaattaccctagcttcttgtgttccgctggcatccattctaatagaacaacttgtgaaacaatgagctagcctggtcagattgcgattaagaacaattttaattaccacttacttgagataataaagcatacacctattcagctattaggctactaacatgattccctataagacttttcttataacatactaataaataaactaagaaagcaataaaggcttactaaatcgtgagtcgagcttttctctgatgatgattgtacatattgtaacaatctttggaagacaacttggtggctctaatatcaaattgtaacaccctactaggtcaggcgtgttatcatgatttaaagctatttatgccatccaatgctaatcaacgagtttgttgaaaaatgtgttcaattagaattttacttaattaacctttaattgaaaataaataacctttacataactgggatcccgtagttaaaaatttataaccatattacaaaatattagttacaaaaattttcgcctagcgactattcaaaatacagcctactatctcgaagatcgaacactccaggtctaaccgccccaatatgtacaatctttatctgctcgcactcactgctactcggccttagctttgcccttacctacacatgaaaataacaactatgagtcaacaaactcagtaagaaaagcacaatcataacttaaacttaaaccagattataactaggcgcctatacacccaatcataaccctatcatgtgttccacgcgtacggagtctagaacgtttgtatgaaagtactattgaccataatatcagcctatactcggtactctagtcgtactgatgtgataatgtcaatcaatacttatgtcaaacatacattcatcggtatccaatataaatctatttatattgataccgctatttcaatgtaatctagcagacattcataaacatggacgctaaatatgtaatcacatatgcatatcattatactaatcttacctcgattcaaatttaggtgtgctactcaacttgagtagaactactgcttgacggtttataggcccctaactcacaacatatgcaaaattgataagtgatatgctaaatcactttttgaggacttacactcaaaaataaaagttttcctatcgataaatagcgtgactaaaacctaaatatcaagaaaattctaaaaaatgaggtttcgagaaaagttacccaaaaaaaaggtaggcctacctgtaaaaacgataggtcatttttttgggttttcttcctggaaaaatggtaggtcgttttctcataaacggcatgtcgtttctatagtaagaaaaattcaaaacctcaaaactcaaccaaataaattccaaactttaccaaaagctccaaaatacctaactgagtcataacaagcataatccaagtgaaaaatgcatcatcaacaaactataacaagatttatcattaatgagcaaagcttgagttctaaagctcaaactttatcaaaactcaaccacaagcaacaattcatgcttaaaacagcttaaataactctaaattaacaccaaaaattactctctaacataaacccaacatacaacagctgaaataacaaaataaccccaaaacctagttatattcttgagaaaaaacaaagagaaaagagtgaatgagcttacctcgagatgatttttaaatttctaactgaaatccttgcaaaattgataacctaagtctggaattggtgggattcttcttggggattctagggccaaaaatgggagagagagtttgaagagagagaatgtttttgttatgtaaaaatttgattttcttttcattatcttattagtatttagaatataatacattcataaaagataaaatattgattgatactagaaatccaacttatccctaaattaatactaaaaccaaaatgccttaaataatctttacttctctaagaagtaaccttgaaacctagggatattatggtccaaatctataaccacaaatactcccaatattctaaatatctatccaaaatgtcccattaaaactaagatactaaacattgcctaagtgattctataggccaaccgtcgtattccactattaccgggcataaaaatatgaaaaaaaaacatcaaattcatatatattataattaacacacctagaattcaaatatatcttcacaattgcataaataataattaaaagtttaatcttgaattaaactctaattatttgttaattctcatactaaagctaagcggtcattacacatggactttgagggttcatggagtaaatacttgcctttgatagaattttcttacaacaatagctatcagagtacaatagggatggctccatatgaaatgatgtatggtaggaaatgtcattcccaaattcattgggatgagaccgagaaaaggaagtatttgggtcttgagttagttcagagaaccaacgaggcagtagacgagatcaaggctcagatgcttgcttcacagagcaggcagaaaagttattttgatcccaagcgcatagacatagaattttaggtaggaaaacatgtttcctacaagtttcaccaatgaaaggtataaattgctatcagaaaagggcaagttaagccctataggttcatagggccattccaaatactcaagaaggttgggcaggtagcgtatcagctagtcttactaccagcactgtcggatatacataatgtattccatattttaatattgaggaaatatgtgtcaggcgcgactcatatcttgagttatgaagccctagaactacaataagatttgtcctatgaggaacaaccggttcaaatcctcgataggaaggaaaaggttcttcagaacaagaccatagcattggtcaaagtactttggaagaatagcatggtagaggaagccacttgggaactagagtctggcatgaggactcaatatctggagttattcaagttagattttgaggatgaaatctttttaacggggggataattgtaatgatcacatgattgaaatatggattagtaaggcaattagtattgataatttgtattttataattttatatga

SEQ ID NO: 294600 - DNA, 9334 bp, Cannabis indica
ttgtattttggaaaatgtatttgttttttttctacaatccttccaaatttggagggattaaattttgaaggtttggagggagagagaatgtctccctccatctctcctctccttccttctctttcttgccaaacaagtgatttaatttctccttccacccctctccatccacccaactcaattaactccacaacgggcttaaggagagaacatccccaaagagtatgaaaagaagtttcaaattccttattacaattggggcacactttatcggtaggaaccttatgagtagccaagttgaacgaagtgaaaaaccaatcaaggcaagctctctaaataaatgctttaacttttggaggaatagagagactccaaagatacttccaccaaaaaggacccaaagaagagtcacattgaccccaacccaaaagtctaatagtattccaataactacttttgacagagtaggcaccagaagagttatagtaccaaattaacctgtcaacaatatgtcgtgactcaaaatagacaaaatttgctcagcctcatccaataaaaagaggtcatcaactaggtccctattttaatctgcattcgcatccttcaaatcactaaccatcacaatcttaatactatggacttaatacattaatactttttatataaattttcacaatactttaatcatattcttttatttagttaaacaatataatccaattaacactaatttaactagatatttctatgcataactaaatacaattataaatttacagagaattatatattttaattaattaaattattttgaatacctaaagcaaaatacttatttatttgttaggaactacagaaaaggtaattaaaatgattttctcatctagtttttgaacacttcagctttttgggctttcggccaaacccaatagaagattagaaccgcaaaagctcaattttgcgggttggcgctccattgacaggtttccaaaatcccccgttgtccgtacaaacatttttcaaaaacccttctcttcccccttccactcctctctgacctcacctatcgctttcaagtgtctatggcagcatcaatggtgccttttctcgactcctaactttctccttctcactccatcctcttacttttattactctagggttttggagctatatatattttatttagcattgttgcgactactcgggcgcacttttagggaactatggagatgcgaaacaatggccccgctgagccttccagctacgtcggcggcaacactgccacaccttctggttctcatctccggcaacccaattattctcgacaagctgttcaggtgcctttttgagcaaattttaatgcattttttcgaaaccctaactgttttaaaatgtagcttctactttagcggttttcctttggtaaatactgaatattgtggtttttgatagctaagaaggtgtttgggaaatgcaatttgtcttttttattttagcttcagttctgttgtaaataactaggtagcttaataatcacgacataagttggatttgctttagtttaggttcacctgaagtaacatttatatttgtgtcgagtttcgtagtgtagttataaatttattttgtaccatttctggctgttttgtattaaacttcatatgtattagtttgataataccaaattatgatgtggagttctatgcatagtggtgttacagagtcatagagccactgtttagtcttccagtctacgatgattgatcaattgcttttcctgatagaattatacattcatttacaattgttaggaagccttggagcacttggcatcaattgatcttattgagttatgcaatgaagcaaaagttgagcgctgtcgagcaacaagagacttgagaagctgtggacgctgtgtagagtctgccttgaactcttgtggacatgcttcattatgtacagaatgtagtcagcgttgtgacctttgccctgtttgcagaatcccaattggaaaagaaaagaatggtgttagtctacgtcctcgtctttattacgagtgcatcgatgctggtcttatatcaaaaagatatgatgatagatttcaagaaaaagaagagggagaagagcaaataactgctgatgtcttacacctgtatctgctgttcgatgtggctctagagaataacttagtttctttgatatgccattgtatcctttcatggtgtcttattttatgtattttattattcttgatttgaaggcatacttagctaaatatgccaaaatctcttgatcttttaatcatctagttgggagaatttctattagtttagtgctttattcactctaccctcatatttagttcaatataccaaaatctcatgatctttgaatcacccatcagggagactttctataggatagtttagttctttatcctctatagtctatgccttctgcaatagtattcgagactgagtaaacgaagctgtgaaacagatatttgaaagattaccagaagattattattaacgtgccatggatactttatctacatgatgttttttttgttcatgtatctttaacagtaattcaacagatgttacagatgtttgcatggatgaaagtgctgtgtctagcaatcctgtcattgcttttttgttggatgaagttggtcaaagactggtgcaagcgaacatatgggaatatcataaaggaacttcagggaatttgtatccttcaaatttcgaaatatttatctcactgaagcttggttgtatcttgcattgtgtcctatatattttctattaatatggtgtgtatatcttaacgtgtatcaatagatattcttgatgcagcagaaatggaagtcaggttaagtacacttaagtattctgcccagctagctggtatatccaatgtgcttgaggttttagagtcatccttcaggaattctctagcagctcagctcaatgatttgcacctccttcaagaaagcatatcgaagacaaagcaggtctaaatattgacaactttatattcagttggttttactattatgtgtgacctcattttagttttccttataacttttataatattagtgtgtatgcattatctatagatggtacctaaaaccaagagtggcagccttgtaaaggagttcaaaagcaaacaccaacacatgtggaacattggctaattacaaaaattctttcacttctaaaatcaatggagcctcctttaagaaaccaaatgcagtcataaaaatatcaaaccatctctataatttgcttcattttgaggaacatagattcttattttggttcaaaatgtttgaacttggagtagtgcatgcatgataaagtgtaaggcttgcaaataacagtttcttaagatgtaaattggtggcaacatacacaatttcggagtttagaaatgtttgacttctttttaggtagttttcgagatgacatagttttttttcctctttgactactaagagtatgtatgttttcggatatgcttaatgaaccatcttttgtgaaaagcattcttctgtttgcaaataagtagatgttctttttttctttctcagtatttgtttttgattttcagcatttggagatcatgatttggtgtataagacataagtttcttgagaatgtcgaatctcgttatgccaataccaattcatggcgtaatcgtgtccgtgaaaggaaattagctgcaataaagcgttcatggcccgatgcgataaataattctgaagagtttgttagacaggaaggttcgttgtttattgaagatgcactgactaatcttgaaaaagaacagggggatgcacaagatatgggggaggaattaaaagttgctttgcagaaggatggaatttcattagtttttaggtctaaggtagaggggcttgtaggatgttatccatttgaaagtcttcgagctgccattgatatactatttctaggtggtagttctgatatggtggtagcaaaacaagcaattgtatccttttatatatataccgatatatatatttttattatatatatgcactttgcatttcttatatttcttttagctgaatgaaatcttagttttggtgcatccagtttagtttccttaattcatgatagtttctctattacctatacgatcgacattggacaatgcctaatgacaaatggagacgcattgtagaagacttcgctgcttcttttggcatcacgaggattttattattggaatctttaatattctatcttttggatgacttcacggatgaggctatgcaggtaaataatgattacatttgccaagttcttgtttgtttttctctttagaaataattccatatatcaagtttatcaagatagctcatattttctgtgacattttttttttgtgtgtggaatattagcactaaagagaaggttatcacactagagaattaattcaatttcttgctttctttgaaaagcaattcttgtcacttacaatggatattaaagctaattattatgtagttataaaaatgttaatttgtatagcatgtgggactccacacacattatgtgttatgctgtgtatattttaggtatggatagttgtttatttgcatttagcttgtagttataagattgttttagttaatctgatttgatctgtgagctgaaagagttataaaattagaggtgtaataagtggtctctgtaaaacttataaattattaagaagaggggaaaaagcacaaataatactagagattagatcattgggctccttaaggccttaagatagaattttgtttggattatattcacgaatactgtttttcccagtcagttaaaatgcttatttttccctgtcaatttgtttgatgaatgatttgcaaacttcatttataagctaattacttttatacgaaattatttaggaagcatgtcatctgcttcctgaaatctcaggtccatccacacatcctaagattgcacaagttctattagaaagaggaaatcctgatgcagctctcatggttttaaggtggtctggacaagatggtgtttcacggtttgtttcacttagtgaggctgttactgctgttcgggttagggtagagtgtggacttttcactgaagcgtttttacatcaaagaatgttgtgcactaaagtcagggagaatggggtatttgcagatgcgcatgatgattccaaaggtgaacacaagagttggaaggactgggtggagatattggtggctgaaatttgttatctttgtatacgaaggaacatggtagacagaatgattgagttaccgtggaattccgatgaagaaaaacatctccataaatgccttttagattatgctattggtgatccttcttcaaatgttggaagtcttcttgtagtattctatattcaggtatttgtcatttgcttatatttaactgtgctgagtaattgcagtctgtcgtctgactatattgttagtgtctcatcaagtgtggtttctttatttttcactataaagaaacaagaaaaatcatatttaagttgtgggagtgtgttacatatgattttcagtaattcataattttaaagttatgttgaaatatctgatcatacatcttccactgcctctgtttttcaccggtaaagaaaacaagggaaatgccacacctacaaatcattgaattttacaacataagattttcagtttacttttttttttggctgaataaattcgaagtgaggataaagtatcagattatatactaccctttttggtgtgacttgttcatgtgtttattgaatccggatcctttgcttttgaccattttaagaaatgccaaatgcaacttgaaaagtaatgcatacattgttccagtttaatgagttgttcacttgtttgttgaatctttgatccttttgcatacaatcattttcagaaagtcaattagaaattaaaaagtactgcattacattgttcgagaatgttgagaatacatatttggtacaagttattcatgcttccgagtatgtttatgaataatagtcctgacagatacttgttttttgtttaccagcgatacaggtactctgaagcttatcaagttgatttaaggcttaaaagtctagagcaggagttcattgcaaagaattctgtcagtgaagaagttttatctaggatgagatcagtgtgtggctggagggaaggcttagtgtaagtggtttaaatgtcaggcattgtaaattactatgcaatgacatgttaaattctcgtattctcttttacctgattagatttttttttcaggaaaaatgcatggcattgctaccagaagtccaacggcaacaagtaatgactggaaaattgcctgaaattgctggtaatactggtgatgaagttgaaatgcctgcaaaatctgattttccctctaccaaggctggtagtttattaatcccagcattaaatgattcccctgtggctctgtggactgatcatacaagtgcacggaagccctcactttttgaaactcccttgaaaagagatggatcttttgacaactatcactctaaacttgatggtgctagtttatttcaaaattctgaaatgggactacagcctcaagttagcatcggaaaaaatttcaaatttcaggtcggggacaagtcaattcttcgggttaaacctttaagtacctcaccatcaaaggacgtgaataaaactccatcccgggtgcttactccatcccgggtgcttctaaatagcaattttcgggacaataaatcatctctgctatcaccggaaatgaagacaaagagcgttcctaatccattcctgaatgagagtccatattctggtagttcaacagctaatccaataattacacctagcagtaaccgtggcttgtttagagacttttcacatgacctacagccaagcgtgtccagtagaagggtccatccagaaagagatgatacacctttgaaaacgacttcctcagatgacattatggacgtttcttggaggttaaagttctttttccatttcttccatttcattcttatcaaatgacgatgattccaactatttcaactttaatctgaattgcttgtgatatgttttctgagtttcagccacgggcacaaggacttagctgctgaaaacctagctgtcaacggtggaccgaggtggaggtctgatgaaacaagtgatgaagaagccaatccaagtccacagcgagctgtgaaaagcagtcattgtgccaccccaatgacaggagtgagaagaagcaaaaggttagccaagagatgaacatttctaattgacaaaagcatcctcatcctgctatgattcttctggtattgttggagaaaataaaccctttttggtcagtagtgaaacagagcactggtttttggatgaggaaactgtgttgttgtgtttgctgtttccttttaaagggaaattgcccttatagtgttaacatcttctaatgtccacctgaaagccagtaaaagaggttccaattttgatggtgatctccttgtatcggtcgggtggttggtgactcaaatttgaatttactggcaacaaatgtgtgcaggatcggcgaaagttttggatatgattttatttaagtgcaatgttgaggcaagcccatgctagttttaaattttcaatcttttgataatttgtaattttacatacttcttgatcatagagaagaaaatgccaatatgattaactgaaccattgatggtcacataattttggtatacacagttcatgttggtcatattgattccattcaagtacttgacttcaaaagtagaatacatatttctatcctcagtagtttattcgaaacgtatgagttttaatacgtagtagagttataggttttcttttgataagagaatatgaaaaatataggtaacgtttggtaatatttttgttttaaaattttttaattacaaaaatacaagttaaattttagtttttaaaatttatttttgaaaaatgtgttttataattatttttgttttttaattaaaaataaaaaattatagtatgttttgtaaatttcatttaagtcatgcttggatttaggtctaaggtttggggtcgcagttgaggtttaggtttagggaggtttgggtttgggtttggcgctggagtcaggttcgggttttggttaggggaaagattttgggtttaggttcgggttcgagttcagggctgaggtacgggtacgcgttcgaggtatgggtttaagtatggggttgagagttgggtccaggtcggggttgggtccagggcttgggttcgggttcgaggtcgagttcaggttctggtcaaagtttgggtcgaggttctaggctgggtcagggtttgcgtctggggtcatgggcagggtccgggtgcgggtccaagttcgagttcgaagctgagtctggggccaggctctaggtttagggctaggattcaggtccaaatcgaggtctgagtctgagttcgagttaggggtctaggcctggattcgggttcaaggtctaggtaagtgtttgggttcggggtcggggttcgggttcgggtcctaaagtccagggagaaaatattgattaagaaaaataaaattgtttaaccatacacacaataggagtattccaattttgtgcctgtttagccacttcatttaaatcaatttttgtaactcgcttacaagatttcagcataggttcctcatagtgaagcttagcagcaacactactttgttggtcttctttgagcttagcccaatgtctttgagctgaagattggtagtcttccttctctgtttcctcagcccaactcgaatgctgcagatttgtctcatcttttttgatctcaccattgtttgaagtctcatcagatctctgcaattgcggctcaatcaagtccgtcttctcctcttctggcttatcgatattctcagtcgagttcgcagcttgccctgtagcaacatcctgaatcgaatggggctcctcagtcttggatcgagaaactggctttcgagagatcttcttcttcttcatcgagagagagaaagagagagaagaagctcttgcaaacacctttcttgtaaatttttgcaaattttgttcttctttatatctttatatataaaaaatggctatctaactatttttgttggtttaacagaatatactttagaaataaaagaatattccatttaatttaactgatattgttagtaccgtttattttataaatatgaaaaatattaatattattttatttaagtttttt

SEQ ID NO: 294601 - DNA, 8472 bp, Cannabis indica
aacgaaaaccgaggtacgtactactactagttttacgttttttcgtcgtttttttttttttttttttttttttacaattttacaagtgaacaacaagcattagtcacataattatttctctattggtatgaatagctgaggcctgagaggtccaatgcctccaggaagaaacttttgggaactgaagtcttcacttatgtacagaaagtggattggaaggacttgattctacttcttttggaaggttaccatacaaaagaatgcaacaaaacgactaattagtcctgtaaggttgagcaagaccaaacaacgataccagtgattcagatcatagccgcttgccatgagtgaaccacatcttgttaccagccagactcctgaatacctgtatataaatatgtatacatatataaatatgtatacatatatatatatatatatttgtagcttaaaacaaaaatgggaaagaaaacacagaatatagaacaagtaggttgggatgattatgtcaaaccttttagcattggcaatcacaaaagcttccaaagcccattttgtgtagcacaagttagatagtccatcgacaaatttgttgtgattagtattggttgctataagagtcaagaccacaggaagaagcactgaccactgcagaagacaaagttaccctgagttgaaggacaattttccccataatttcatgaagccaatcatttgacattgtaaagcatgaaatgctcaccagttgggctggtccaggatcaagaaatatggccaaggcgtacgctataccagtcacacagtaaaccagacagaccaacactatgtaattatctgtgaaagatgatctaggattgttaaagaaatagaacatggaaagatatactagaggcttgattagtgtattgaaatgatcaacggtatctttggaaaggaagtaagccaagctactcatgccagaagcgctttctctccaatagtgcagcttatccaatgagaacgatctcaatgctgaaatcttgcataaaagagctgaagtggggacaaaaacaacttacaggtgagaagtgagaaacatgaagaaacacttcacatgacaaattcaaataataatttcaaaatttaatacacaattagcggaaggctagtggcagcattatttttactttatttactggagtggggagttttctgttgcacacatgcaacagctcaattcagaacaaccattgaacaaagaaacttacatactgctatgacggtataagtataaccaagtgacccaaaggtttcatcgctcactttagcaagtgttcctaagcagattccagcgagcaaaagaatcagaaaatctacagcttgtggcctagcttctcgtaatcgctgcttaccaaccctgcacaaaagaacaggtacaaaagatcaagcgattacaaaaaaagaaagaaacggcaatctgaatgacactttgatattggccatacatgtgtggcacttggtttgcatctaagctgagaacaattaatttaagactaaaccaaatagtatctgtatctttctctattttacctctgcaaaagttattaatacaactcttgccaaagattaccaagctaaaatatcagctcctctacaaatgctaatcacaagaattagcaagccaaagtattttttgtgactaattaagtggtttgcattaagatacacaagtttgaaaaaaaaatggaaaaagcagatacagaatgagacattgaatcattgtttaccttccgaggaagtatctatattgttgaaaccaactagcggtttttctgttggataagtcgctagacttcaaaaaattttgttgtatagtgtccttcttcatttcaacattacacttcatatcctcccaaagttccccagcaaaagactgtccatcagatccagcacctggcgtacttgctccatgtgcagaattttcacctgctgatgcagccattccatcagcactttggagcatgtccattggaacggggtatccattatgaagcatccatcttacaggaagttgtttatatgtcacccctgtgcttgtctgtggttttactatgccctctaaaatgtcaataaaatagtctggaggattgacacgctcagggacattaatcccaaggccagaaaagtactcttcaactttctttgccgatccatgatacactgtaagtcctcctttagctaaaagtatcaaatcatcaaacatcctaaacagggtgtagctgaaagcaaaggaagttccaacaaatgcttttatcatgttaggcagaaataataataactatagataaataaaaaagaaaaacgacattcacttcatattcaaatggtttcaacaaagcttagtaaaatgaagtaaaaaacaattcaactgtcaaatagttactgctcttattagaataattttgagcacatgaagcaatatatggtcaatgatatggcataaaccatcagcaagcgggcccaacaatataaaatcaaaagccgaattcctagtactggaaaaagaaaacaacactttgactaaaacatgcattcttggccatgatagatgtttgtaccttggttggtggacaaccatgcaaatattcactccttcaagagcttcacgccttagtgccttgagaagtaaattagaagaggaactatccaacccagaagtgggttcatctaaaatcagaagtgaaggttccatgaccatttcaagaccaacatttactcgcttcctttggcctccagatattccccgcttctccactgtcccaaccaaggaatcccgcactgcctgcagacccaagcactcaataactctttcaacaaccagaaccttttcaggttttggtaggtctgctgagagtctagtcaaaaatccaaaacagggaaacttgtgtcagtaataatggcaatataagctttcaaaaaaattagcaatatgcaaccaaagcaggtatgcaacagatgagagtacactaatctcaaaagagcaaatagcaaatagaatttggttaatcaattaactttcactactaaaatgatacacaatacaacaggagaaaacttggagaagaaataattgcagaatgtcattgaattcagaacaggcaacaatggttgcagggagttagggaagcctggggtctccctgagtatatttactctgtttagaaattcatcgacccttacacaatcagctactcgccctatttatacttaatctcccaacttcgacaactaactacttaggacagcccaacaataaactgccacatcagctagtgttagttacaattagattcttaggcctcctagaataagttataaccagcgatggtgtatcataatagcttaagaaatcaattatgccttcaaactcagtaataatttaaagagtatactagttcactgacaattcatatttttcctagcatgattgactaaattatctagaggggacatagtgatgtccactagaattataaaccaaggtccttccttccaagagttggcctgagttctaaagatggatacataactaataaactgatccaaaatattagagcccaagtgaagtttttttagctcagcttcctgaaaacaaatacagattacaaaaattatgactcttaatgtcggtagttcaaatgaaaatcaaataggatttgatttttttttttaattccacgttgcaactcagggattccatgttggaaaacagccaacaaagtaaaaaaatatctgcctttgaccctctgccaacttgatggtttataggagtgttatcagagatcatttagaaacactgcttacatctaaaagatatatctactaacatctaaaatatggaattgaatatgtcaaaaaaaaaagacatagaattgaatgctggagctaaaattgcaaaatacctgcatctcgcgctgaaccagagattctcctctaccgtcaaatttccatgcacaatatcatcttgtggtacaaaacctatgattcttttgtatgaatggatcgattccacctttccatttatgagaatcataccactcatggtgcagccagtgactttaccagccaaagcagaaagaaaagtggtttttccagccccggaaggacccatgacagctgaaactcggcctggtgatattttcccagtcacacacctcataagatgtttgtttttccctttcaaagtaagggttaaatctttaaatgcaacctcaattgtaggtctcttcctgatatcaatatcactagccattgaaataaccccagagaaagttaagttcttattctgctcctgtaaagccttttccttctcaatttgaccgtatgcgtacttgaaaatttgactttgagtatgcaactgtttgccctttggcgcatgctttttaatatttttatcgcctatctccacgttaaatctttcgtgactatctgggtcttgctcaatgtctttaattatgttcacaaggttgtttttatcgtttttcttgccttttgatgatgcttgctgagatgatgtaccgtgtaatggcagaggtggcaaggtagaatctgttccatgtctacctagtccaaagcttttaagatttgaagattttttgcgagaaaatgtgcgtgaaagctgactttgtagtccaattgcatgcttcttagcaatgtcttttgcagatttccatttttcacgtgcttgtgcagtttctcgtacactttggacagccttttccctggactttgcttgtcttttctctcgtgttgcaaggacttgatcagaacagttaaatataatgagaagaatgaaactcaatccagcctacattgattgacaaggaaaggtcagttctggcaatgttgtgatgcaattgcttacagagatccataccccatagcattgaatgatttcaaaatgtgtcatcaatattaaatgatgtttatatatttaaagagtgcctggacagtatagttgctattttgtataaaatatggtagaaacataacgcattactttaatctaaggctttttcaaaaaaaaaaaaaaaacaatatcataagaagcatataaagaatacaaaatattttgcataattattgaagaatcagttcacttctccctcaggcaatcatgcaagctgaaatttatatatgtcggcgtaactactacaagttgaaaagtaaagaccactcacaaaaatcaggaccccataggcagtaatattctgatttgctgatctaggttcacaagttgccatccggaaacatgctgacaattcatccagaaatataagtgtatacatgccacaaggcaccatcatggaagaagtaaatttctttaacaaaaagaatacgaacattacccatagacattcttatttaaaataacatgaacactgaaatttagtgtgtttagttcaaatgaacaaatatcaatcgtgagagatatctacactatgacaggtgctttctcctgtcaagatccaaaatagtaactttccactcttaacatcataacctaaattcctcattttaatgaattgactctaagttcaacattcagttttgcacaatcatattctatgcgacaagagttattgacctgttgactattaaatatccccatattacttctgtaatgatataattagaccaaagcacttgagctggtctgcttaagagttagtcttagaaaaccattcatgataagccccaatccatgtgtcccacagaagaccgaagcgctgaacttattcctagcctgagtgtctaagtcttttaattgtagtgtaactctttgtacagctggcaattatgaactaagacctataaatagaaacggggattctcttgtaaagggtagctaggaaattaagaagagatttgtctcattggagagaacagccctcttgaaaggctgcctgggagagtttgagcctctcgaaagctcactgtatctatggtttctgtcattgataaaatcattcattgagtaaatttcttcttggtgtgtgtgtgtgtgtctcatctaagatagtagtttctgacatgagatttctatcattgcatgtaagtgagtcaacataattcctaaaaggaaaaattaccttgctgagacgtagaccctgtcctgcagtaatgcctgcaatagcatttaaagaaatggcattagcacacaaaaaagtgaaacaattgcttccacaactacaattttttacacacaaaaaggaacaaatgacaatcatgactgaaaaataacaataatgatactgaaataacagcataagggaaaaaaaaccaatttttttgactcatacaagtttgaaagttatagagaagtgcaaggagttttgggataattatcaatacccactactgcaaggaatttttttgacagtagacggacagtatgatcctgccgaacagaatacctcactagtactcaaaacatcagcccaagtgtctgctcctccacaagtatggtttgactggccaggaggtagctgataatgatatctgtaaaatatttctgctgataaatattaattcacactaataaaaaataatgaaaatttgagaagaacaaagaaggttgagcaagaatatgaacttacggctcacaaacaccagaaactttattgagttttgaaagagggcagtaagcacccaacggacaagcttcatggaacataaaaggtttagcagtattagaaacgtttccatagtcaaaaatttttgtttacgataacaccataaatgacaagttttataaatgtgatgatagatacatagacattgcacttgcattgttatcaggtatttaaagaaatacttacgaatcatgcaagtaagaccatgagggcagaagaaaccctcacaacaagctgcgcagtcagaagttctaacaggcatatcttttgaatttttaaggtcaaccttgcttgagccagaactacaggcccagccaggctcacaaccagaaacccacgtggacagattacagttcttattaggtttcaagtaattggttttctgtaacgcctcactcacgaacaaactactgaaatagtacttcacttctgcggccgtgcatatcctctgcataatgtctttttttgtttttccaaattaaaaatcaaccaaaaaaatgaccagaaataaacatcataaatttcatataaaattggtacatacaaatagatggaatatattcagtaaaccaaatagtttaatgaagaagctaatactttaatcaatgcaagaaaggttaaactatctaatcaatatatatatatatatatatattctcgtaactccaatagaccagctagagatatgatcatcacctctatgatgtcataagtaaagttttattctgtcttgagcctatgcattaggtcaacataattcttaagtttaactttttcaccttttgtctttcgactacaagccgaaataaagccaatgtctttcgagaaattgaaagctgcattatactcagcatccctgaaaaattatttaaacgttaaattacaatatacattacaagttcttttctacgttaaaacaatcaagtggatgaagaaaaccatacacatcagttatgcagaaaccaaagttctttttaatgtcacccttaaaaatggcagtgaaattcttgatttggttattgagaagctcggagaaaatgtcgagcgccgctggattgttgatctgcttggcatcttgcccagcgacgaacagaaagctcgatacaagcacagagaacactagaacaagcccagagaaaccgccatttgcctttttcctgctcatgatcgcctaaagaaaaagaaaggaggctcctatcgaagtctgttgctagggtgtgaagacgaagataggatgcatgtgtggagaaaacggagagtgaaattgggttgacagaaacaggggatggaagatgggtaagaagagagagaaagaaagcattgtttttctggtgtagagagagagagaaacggagggtatgcaataattgatggaaggagctggtttttagggagggaagaaatggcggggaggaagagttggcgaagtacgtgggagagagagtgacgtgttgcaatacggaccaccgttggattcaatttcatgtccaatttcaaatgaaagtcgttcggtctgcgtgctgtcacttcattactccaaaaatttaaaaaacacccattttattatttttatataattaaaaaggctgcaccttacatttctcattgttttagtaaaaaaaaattaattgttttttatataagcatgtaaattataattatttaccaaatacaaaattttacaataatttattatacaaaaagcattgtttgtaaaatattatataatataatgtgatatgattttgtcccgttattgtactttcactgattgtaatccgtgatgtacgacagccgt

SEQ ID NO: 294602 - DNA, 2282 bp, Cannabis indica
ggggatcactaacaaaccttaggcctatataaatagtgataagctagggtttaggagactgataatccttgatcgcattataattctttagttttggaagtggaagaaactaaaagggcatcattcgtttggaaaagtatcctatggggtcgtgatctatggaaagaaggatgtcgttggttaatggaaaatggtgagactattaacattcgaaatgatccttagattcctaaagatcatgtgggttgttcttactccttccgaggtaatactaggcttcaaaaggagagtgatcttaaagtggatggtggctggaacatgcctctcatcctgtcggtatttgatgaagtggaggctaaagaaattttgtctatttcttcctcctcttttgttagacaagattgtttagtttggcattttattgataacgggatatatacagtgaagagtggctactggagtacaatttcgaggctcgatttgggtcaagtgtctacttccttagggtgccttcggtggtggttagttttttggaatttgagcattcctcccaagattaaaaactttgtgtggaaagcttgtctaaatttcatccctacctatgcaaaccgtactcgtcatggtatcaatgcttctacagtttgtcctatttgttggcaagataatgaaacaaccatccatatggtcttgccactcacttaattgtgtttgcaaacagtggctggtgagaggcctcgaaaagttcactgtaatatcaagcttttttaagttttttgctggcttgtttagatgtattatttactcaagaattagaagagttattggtcctttcttggcgcatttggcataggcaaaataccttcgtgcatgagcataaacttttgaataatgaattagtaaattcttgggctttcaggtacctttgacagtattaagatgcccaaattcacaattcaaatggtggcctgcggaaacttgctgctaacactcttggggtggttgtggaatcacctagactgattcttggggatattaatcttttcgttgatgttggtattagcattgaaaactggaaggttagtttgggtgctgttatttctaactgtcaaggtcagatttttccttccgcgaggacccctatcgtcgggacattctcacccctagttgtagaagcggctactcttctgcaagggcttcgactgtgtttgcagctgggctatactaacatttcttcctttactaattgtctttcactttgtgcaaattatcagtcgtcatgcaccccgactttcggagcctggtattattgtttttgacatccaacaatttagaaatccttttctactatttctctccatcattgttataggacttataatattaatactcatgctctttctaagacattatctttatctaattatcgcacttggtgggccgaacttcatacgggttgtattgtccattcgactttttggctttgtgccttatgggaatttttcctcaattttaaaaaacaaattactggtagatttataatttttgttagaaagaattatttcatttcatgcgttattggatatttttttattatgaatgtatttttcaagacaatatgatatatggattttcttgaaatttatgtccttattcccaaaattcactagcatagaaagatatcataaaaattttgcagccaaaaaataaaataaaataataaaaattaccctaataataatttcaataaaatattaacaattttatgatgattatgtatagtagttaacatagactaaataaccgtcgatttagtcaatcacagcatattggttcttgctagaatgtattagaatgaattatacatttagggctcgtttggtttgccgtattgtattgtattgggttgtattgtattggattgtataattttaatacaatactatgtttggcattgaattgtattagtgtgttgtgttaaattatacaatgtttggctcacattgcattgtattgtattaattaaaatttttgcaaaaaattcaaaaaaaaaaaaaaataaaaaaaaaactgaaaaaaaaaaaattgaaaaacaaaaattaaagacactaactttttaaaaaaaaaaagtaaaattaaaaatttaaaaatatttaaaaaaactaaaaataaataaataactaaaacacaatttttttttttttaaaaaaacctaatatcatatgtgattctaacccaaataataatgtcaattctaaatatattgtcataaaaaagtaaccaaa

SEQ ID NO: 294603 - DNA, 8628 bp, Cannabis indica
tttttttttttttttcaaagtttgtaaactttctacatagtgtttatttctttattgtgaaagaacccaacatgttgtttaggtaattgcattccatagtcttttccttatttttgatctggatcctaattctcaaattaataagaacatatcatggcaatgatgtcatatagataatcttgaaagtagtgtttgtgtttagtcattttatgaaatctttgaaagatgaaaaatagtagtcaatccgttggcataggcttgcaaaaagagaaactatgaaaaaacttgatcctaccatgatagtttattggaggagatgattgggttgtcaaacttctaaatggttcaatctctaattcgttgtagtgatagagatggactaaaacaacaatcacgtgaaaaactataaaaatattgtacagaaatgtaaaacaacatttaaattaattccaagcctaccaagtagttctttatacaactagggtaaattctagggttgttagtctattcctatatttgtgtagttaattattagtctttgtagctacttgaaagagcttttcaactacaattatgattcaattattcaaacccgcatggtatcaaggtcgaaccctaaatcataatattttaaccttaaagccctaacgtcataatactaatggaaagccctaaatcctaagtatcataacgaaaatagaacgtagtctttgaccaaaaaaaaatctttctcttattgctaccaagactgttagttagggagctgcagttagttcagttagtggttgacagttgactgttttaatagttaactaatcgagttagctaatagttaatgattaattagtagttgtttattagttaacaactccacttagctttcttattgacttcttaggccattgtaatagatacaaagcgttaagcttgtacaaattcattcaaaggcgataaaagaaccaattcatttattttttcttgtttttcacttgaatggtgatgtgaattggaatcaaagacttgcattcattccaaacaaactggtatcagagcttggattcgattgaaagacttgaatccattggaggattaggagaagaacaaagatcttatttgttcgaataattgattcaagggagagatggggagtgcgaagtttgatttggagaaattcatagggaagaacgactttggcttatggaaaataaaaatgagagctcttctggtacaacatggacttcaaggagccaaagaaggagaagacaagattgaggggaaggcagaaaatgagacattcgaactgctcgagaaaactcctagtgcaattattctatgtcttggagataatgtcttgctgaaggtatcgaaagagaagagtgcaacaagtatggaagaagcttgatcaacttacatgaataaatccttagccaattgattgttcttgaaacaaaagctatacgcctttaagttatctcctgaaagatacattaaagattatcttgatgacttttataaggttatccttgatcttgaaaacatagatgttaaagtagaagatgaggatcaagagatcatacttatgaattcacttccaacagatacatatgagcatttcgtggatactatgatgtatagaaggaactcattgatattgtacgaggttcacattgctataatatcgaaagagttaaagaagaaattagaatagagagatgaaatggcaaaggaagttctatttgttcaagggaaatagataagagagataaaagggttcaagaaaatggcaagaatggaaaatctcatccaaagcacaagaagaagtgttacatctgtcatataacgactcacttaaaaagagattgtcctgaattggaaaatgttggaaacaacagaaaatctggcaatgttgatattgcaaatggggatgagaatgatggatatgacaatgttggagttatggtggtgtcaaatcaatactttggactcgattgggtaattgacttaggttgttccttccatatctgtccaaatagatctcaattttgcggctgcaaggaaattgagggtgggacagtggagcttggtgatattagagcttgtcgagtggttggaatgggatttgtgaaaattgagttgttagtaggaggtttgattgaactccaacatgtaagacatgcactacaaatttagagaaatctcatcttaatggctatgttggataaagatggctatctgatgaaaattgagaacagtaccatgaagattcttaaaggatcaatggttatgatgaaaggatcaatgctaaatggagtgtacatcctgcaagagaatacaacaaaggaacaagtagcagtggcatcaaaggctatggtaaactccactatgctttggcatagaaggcttggacatgttagcaagaaaggccttgagattctgtcaaagcaaggactacttggtgaaaatattgtggaacgcatggagttctgtgaacaatgtgtgttagggaaggcaacaagattgagatttttggttggaaagcacaacataaaaggaactcttaactacatacatttagatttgtgggggccatctagagtaatgtccaaaggtgatgccatgtattttctaacctttgttgatgattattcaagatatttgggtgcacatactcaagaacaagaatgatgcctttaagacctttatagagtggaaaactttgatgaaaaatcaaaaagataaaatgattgagaattaataatggattggagttttgtttgatgtgtttaggaacaattgtaaacaagttggaatagccaagcatttgattgtaagagacacaccatagcaaaatggtttggctgaaaggatgaataggacaatccttgaaagagtaaggtgcatgttgatttatgctagtttgccaagagacttttgggaaaaagctatgttagttgcatactgcccttcctcagcaatcaacttcaaaactctaattgagatgctgtcagggaagctagcaagatatgatcacttgaggacttttaggtgtattgcatatgctcatctaagacaaatctctatatggtctaaagcaatcttgtagacaatggtacaagagatttgatgactttgtcaccagatctggattcaagaggaatgcttatgacaactgcttctacatcaagataacaagggtgagattaattgtttacttgctattatatgtggatgatatgctcatagaaagtaaagaaaagtcaaaagtaagtaaagtaaaggtaatgctgaacaaggagtttgagatgaagaatcttaggccagtaaagaagattcttggaatggagattttgagagatagaaagagtagaaggttgttgatctcttaaagtggatatatctccaaggttctcaaaaggtctgggtttgagtatgttaaaagagattaagagaaaatcatagttgactgaagaaagaataggagatggcttgcttgtttgacgaaaattattcaagaaagggaacaagaattagaaccctgccggaaaggagaaaacaagttcaaaatttgaaagaaggtattttatttgtaatcaaacaacacaccttaagagggacagtccaatcatgaagtagtacaatatgaaaagatatggaaatgttgattttggtcgtaaatgggaatgacatcgatggctatgatagtgtaagtgtatggtggtaacaaaggaaattccataccaaagatgtgttcttgattcagggagctttcttcataactttcctgataataaccaattcaataattaccaagaaattaagggctgcattgtcatgcttggagataacagatcatgtcaaattgaggtaatggtatagttgagttaaaactcagtgatggaaccgttaaaacttagagcaagtttgacatattctagagattaaaagaaacttaatctcaatgctaggttagacaaaaggggtcaagaataatcatgcaaggctcaactatgaatgggatctatgttctgcaaggaagtctagtttagagtcaagtcaatgtgatgacaacaaatgtaagaaacaaaacaatggtttttcataggaggtttggtcacataagtcatggagtgcttaaagtttcaacaagagttatgctcatgtgatcaagataactagagttaagtttggaattggaattcataaatttaagcgcttcctagactacttgcattcagatttgtgggaccctcaagaacaagttcgagaggaggttctaagtagtttatatcctttgttgatgatttttctaggcatgtttgggtattccatttgaaggcgttttgtgctaacaatgttttaacctaatttgcatgaaatttggtattggaaggcactttatagtactaaaaaccccacaacaaaatggaatgacaaaaaagatgaacaaaacaatcctagaaagggtgagatgtatgttgattctcttggattttcttaaaattttctgggctaaaattgttgttacaacatgttaactaatcaataagtgtccctcctctactaatgaattcaaaacactaattgaactataaacatggcactatgctaagtatgagcaagtaaaggaagcttatgctcacattaagcaaggaagtgcatatttgtggtatatccaaaagaagtgaagggatacaaggtatggagtatagatctcgaaaacaactagaaatactttatcagtatgggagagccactttcttaattttgttgcccaatttgttactctctttggatgcaatagtctcacgttagttgaatctagcttccttgctttatccacgagtcaattggccaccatagtttgctttcctctttttatcccacaagcacataacagggtggaatacacagataaaaccataaatttgaggagagaccttgacaactccatctcggatctcttgcaaatattctaactttcataatgatcaactaatgttcgacacccaactttaatagatgaagcctgtgaaattatgagaagaaataaaagacaggttgcccgactcccatgagattgacaaagccacctcaccttcctgagggttaaatggtgaaggtaaaacaagccttgtgaccaccaatcccacgactctgtggttttctagagctggaggacattcgtctctccattgttcgtgctgaaggactcacatgatggttgtgtggtattctcgaagaggaagaagaagaagataaagttgatttggcttcaccatggtcccaaaaggtcagcccattaacttaaatatgtaggttgagataataaaaagtgatttcatttctaggaatatgaagtttatggtttaatcaatttgtcatgtttactcatttgggtcatatctgaattaacattcaatgggttagttgtggaccaaataagaaagagtttaattgcatgagcttttctaagttgggctgactttatatggatcatgttggaaacaatagtgaatgggtgggctgtagcatgggtttgatcaccaattggtagtgttttagtgttgaattagaggggagcctcttactgaagttattctcataagaaacggtttgtttgcccactagtaatgttgacttcttgcccacctttggtagcaccaccagtagctcttcctcctccagcattgactctttctttggtgtcaactccttctctggcgtcgaattctacttttgattcttttccaaactttcgacggctaatacaagtaccctggttggacttctcttaaggtcagactcgaatagagccacgaaaagagtccaaccgcgatgctcaatcttctccaatgacttctcccgcttccgctgtttctccagcatacataatcagtgagccccacatgttggttcatcgtataacctttgaaccccaaaataaggatgaagtagaagaagaagaagatcgatcatgaaattcagagcctttctcccttcctgattacgaccattaaaactccttctcccaatcgtgataaaaccctgcacatgaagacgatggttggaaccacgatttccggtcgttccttctctgagggtgatgactttggtgagtttatctttgactatgtcttgtgtagcttccaatcagtcttgggcaataaccaagtgatccacacctttttggacataaatttcactccatgatcctttaattcaactttatagtcattgagctgaccttgtacaccagaaactactgattccaacctatccactatggtttccatcctcatcgtcactctcttacaccaatatgataactatgatatcaaatgatagaccttgttgccacattcttaagcaagtagcaaaataacacacacaatagcaaagtagcattatggagtagaatgtggaagttaatattgaatatatgagaaaccaattataattgattagagcccttaggcctctttaatgcaaagattttacttagtacattgcaaagataaaaaatgctacgctactttttatccatcgcattgtcattttcaagactagagttggagaggacaattgacaatgttagggaaagtgatggactctatataagaggtgaagagagagcgcttgcctacatatttctaccaaccaaagtataatgagattcatttgttgcatttttcgtctaagaatgagattatttgtaggttcaaactctaagtctaaaatagaatgacatcaaagctcttgcactgaaatttttgacaaaaataggtttattttgaagttacccgagcataatggggtgatagttcacttgatgctatttatttgataaatcaaatgccttcaaatgttttgatttttttcttaatgtactatgtataaaatatttggatagccccaatttaaagtatacaaaaattttgatccacggatatttaattcttaaagtaaacattaatagtgagacttcaaagtgacaagcaaaactctaacctttatcctccgaatgcctttagaaaagaaaaatgagcatgagcaaaatgtcttgatcctacttatgtctcacattcaaaaatctcttgtaaatacactattttgtcaatttgcaaaacgtgtcagtgcttcttttctcaagaaaatgttatacatagcaaccctttctcccttgttcttattaacatatgggaaccctccaaagtcactacttctcatggtaactgttggtttattatgttcattgattatggcacacatatcacttgggtctatcttcttaggtgcaaagacattaccatgtatccattcaactagctagaattgacaaatactttaattcagcctttgatccattttcacataagggattgttaatcaaacctaatgtgtggatactcctaaacataatagttttttcgagtgaaaaatgttatctctagaagtagcttgtgcttgtaattgacaaccatattacattcttcaaaatctctaccatcgcgtttctcctaatacaaagtttttggttctacaacttttgaaagtgttcatcaacgcattggagtaaagtggatccttgagctcttaacataatttctcatggctagtctcttcccaaaaagactatcgttgctactcttggagaaaaaatcgcagttccaaatgatgtcacattgtttttgataatgcttcgcatttctttccctcctcgatttaggggagcacattcatcacaaggaagatgcttagtgatcatgggattagaaatatcactcaattatcaatcttcaatacatccctctccttccaagccaaatcgatccactatcatcatcacccaagtcataaattcttgtgttctattcttttaagtcaaaaattttctaattttcacaacatccatcaaaactaaaacatgaaaaaagagatatatgtgtactctaaaagagaaagaaataatcaagttacaaatcctcaacacatgcaaaacaccaatttgatggattcttctccacaaaatcagtatgatttagagaatcattcctatagcattgaaagtaagtcttgcactcaatatcacatccccaagtttattattgtgatacttaaaaatattaagtatgatttagacactcctataattgatgtatttttaagtatgatttagacatacctatagcattgacctagagtaatttttggatgggtgatttcgtgggaagttttcccaaagagcgcggagcggggacaaagcatgttggaaacacttgttttggttagtagggctagtcgtcaattcaagaagcagccagagtgacgtactcgtgtataagagtcattatttcgtgggtgtaagaatttagtggaggcttaaagtgggaacgttacaaatggtatcagagtcttgacttagccggaagtatagtcaacgaagatgtctggccccgtaaggggggtgattgtgataataagtagtcccgtgatccataacggaaaacggcaggtaagttgtgtcacgtgtcatgattctgacactgtgtaggtatgagattacacaattgaggaggacttaaatggattgatggaaactacctatatcaacaaggtgcatcttgtttt

SEQ ID NO: 294604 - DNA, 4603 bp, Cannabis indica
ttgatacaaaactgccaaatcacaattacgtcttgtgtgtttggctacaccatcagccatactattaaagttacgattgataaaggagaaacaacatctagaaaaactattagataaatttagaattagataaaaaacttttgctaccctccaatccggaattactctagttgttagagcacaaacagccacttttgagtctgaaaaaatctgaacttcagaccaaccatcctcagcagctttgttaagagcaagatgaattgccattaattccgcttccaacgccgagattgcctgaaccttttgggcattaacaaaccagcaacctgttctcatatctacactgattgcagcaatgcctgcatccccattgagccacgaagcatcagtaagcatataattctggtcaccctcattcattctcatgttactcatgctgtgctgctcatctgaactcttttctgcctgggctatgttaacttctccattgcaatcttggacaaaaaatgacgaagccttcatttccaaggccttgtgctcaatgttaatcaaggcagtcttagcgttaacgttacaagaacgaaaacacatagagtttctctgctgccatatttcttccagtatgcagccgaaataagaaagtaactccttcctgtctgagacgtcgaaagtgttgattagagagaccaacgtattaatcattgtgtctgcagggatgctatctatcttcaaagccaatctacacccaaaccagacagcttttgcaaagctgcacctccaaaacaaatgggaagccgattcctcctctagatcacagaaactacacatcttatcttgaaggaaaattagccgagacttagtaggaatggcctcactcagaattctccagagaaagattgaagttttaggatggatccctggctcccaaatccatttccaaatctgctcctctgaggcaaatcttcctttattatcagtgatataagcagctttcacggagaattttgcacttgagttttgcttccaaaaaacctggtctttgaaaggagttggaattctagggattttgacaatacggttacccaactcatcaccaaagatctgcaatattatttccacattccactcattacctagagatacatctccaatagtctgaatggtataacctctgcctttgatactgttcattagagacacaaactcaggatactctaaccaagggatccaaggctgactccaaaagttaattgaagtacccgaggctgccaatgacaatgagccgttgaagatcgctgttctagagtccaggatacacttccattgataggagtcactgcccttttgcttaacacaccagaagttttcatacttacaatatttttgaagcaaacatgagacccaaggtttgtcttcagcagtagcaaggctccaagctagcttggataggagagctttattcatttcttcacattttcttagacccaacccgcctgaactctttggttgacaaattttgtcccaagccttgaacgccataaatctattcttttccatattccccatccaccagaattttctcatcaaggaatctaaatctcgacatgtggacaagggaagcttggaagtggacattgcgtatattggcattgctgaagtcacagatttgattagagtaaggcgcccagcatacgaaagaagtttcattttccacccttctaatctcttcaataaattttctttgagtcgcatataatcctcttttttcctccttttaaaaacaaatgggtttcccaggtgtcgttcccgaccgttcacttgatcaatgttcaactcttccaaaatcctgtcttttcttctactgctcaaattttttgagaacagaacactcgacttaggcttgctgcaagattgtcccgaccatttttcgtaagttgataagcaatcaaggagtgcccttgcttcattctcatttgctcgggtgaagagaattgtatcatcagcaaacattaagtgagaaactgggggggccgaaagtgcgatcttgataccatggactactcctttagcttctgctcttcggatgagttttgaaaggacttcctgacacaggagaaaaaggaacggggaaataggatcaccttggcgcaatcctctctgaggagtaatctttttgagagggcatccattcaagagaactgagtaagatacgctagtaacacatgccatcaggagctgtctgcacttactgtcaaagccatatgctcccagaattctttctaagaaacaccattccattttgtcgtatgccttgtgcatatccagtttcaccgccataagaccaccaatcccctgtttatgtctaatcttgtggattatctcctgagtaaggatagaagactccccaatccaccttcccgggatgaaggccgattggaatggggaaatcaactcattcatgagaggcctcagtctattagataagatctttgcaattaccttatatgagaaattacaaagacttatcggtctaaactgatccatagtcaggggaaattccaccttaggaattagacagataaaggtgttattgagttgcagatttaggatgccactagtgaaaaattccttgaccgtgttaaccaaatccgaccctactacatcccaatactttctgaaaaagcatcctgaaaacccatctggccccggggctttaagaggatgaagatcaaagacagcccctttaatctcattttccgaaggaatcttagctaaattaacattggtgctgtcatcaatcttcttagtaaagagttcatcaatttccccatctaagcacggttttgaagaggagaaaagctccaagaagtactggtttatcacatcagcaatatgtcttctgtccttccacactttgccatctttatccttcaaagcccatatattatttcttcttttccgtatgaccgttgcagcgtgaaaaaacttggtgtttcgatctcccaaagccaaccaagtctccctagacttttgtctccacatactttccagcttagaccaagcgactgtcagattctcttgaatactcagttcttcagttctaaagtcatctggccgagcttgactttggatccattctagcctgctttccattgccttgatatctccttcaatggttcctttgtgattctttttccaggcttgtaaagccttcttggccttgctaatgttctgaataaaagtcacagtagcactaaccccgcgagaagaccaagctttgacaatttcctccttacaggtcctctcccaagaccaagcttcaaagaaccggaacggaatgaaacccttggcagcgaacaagtgagaatcaaagataataggagcatgatccgaaattgcaataggtaagtttctgacaccagcagaaggatattccaataaccaatccggagaacataaagctctatcacctctctctgataagaccacccgaaaactgattgttctgccaagtaaacttattgcctataaattggagatcgattcccccagtagtatccataaaactttttagccatttagtatccacattggtaactctacgacctcccaccttttcctcttggctataaatacaattcaagtctccaattatcatccacggatattggcaattggagaattccacttccatactcttccaaaaggcttctttaacactcaaataaggagttccataaaccgcatagagtttccagtgaatatggttttgaaagtcccaaacagtagcatcaaaaaaaccttcatcaaagtagtttattaccaaatttaagttgttattccacatgaagcaagagcctccagccaaaccaaccgcaccaacactaacaatatttataaatcccagttttctagctacttcctccataaaacttttacttgcttttgtctccatcaaaaaaaatgcaatccaccttatacttactaacccaagccgaaatggctcggggtgtcgggtctctcgcgaggccccgacaattccaggataggcaaatcatggggctctggggggcatggtaagggccgcctcctcgcccgtaagaaaattttgagaattttcgacatgaacttcaaataaattaagattatcaatgatatttctaggagaacttacacggtcactgcggttttgttcttctacaccagatgaagaatttccaagattactagtatccctcactcccatctttttcgcacgggatccctttttcctccttttatcgtttttaacagaagaagaagaagaagcaccagagcctatcttgaatggagtgtttggagcaggggagaagctgggaagatcaggaacctctgttgaaaattcaatcgtattctcctcagtatgttgaacgtaaggaaccaaagtgaggcttgccttccttttacgaggttgaggacatggatgaactagatcagtgacatcaactgggtcatggaataatgtgggtattggttcaaatttatcaactggtgctgggcccatcaattcttcagccagcccaatctcttcagcataaatgggccaaggaaagtgggtgggctc

SEQ ID NO: 294605 - DNA, 11861 bp, Cannabis indica
attcataaaaaaaaaaaaagaaaaagaaaattccccttaactaattaggagtcacatatatttccatctgggcttttaggcggtcaagggcccaatatcagagtttcagctcagcctcagcttcagcctcagcctcaccactattcactatctccttttcctctgtctggacaaaaccaaacttcataacaagaagagaagaccagagaagagaagagaagaaaatgaagatggtgatataattattattgggaaatgaattgagaacacatcaaggagtttactttcctctgattctcatctacgccatacttggctgatccatggctgccacaacaagcctaagcctgctcccccaaattactccttaccgttcccacaaattaagcaacgataaccgtctcaagctcaaatgcctccggccacgtcttcctccgcctctgaatcttaattctcctttatccttactttcttcctccatctccaggtacttcttcaccgctttcttatatatatacatatatatatatatatattctaattgatgttgttatttgttattattagggtttctctttgttaattcgttttgttttctttttcactatacctcaggcatccaattcgagctgtctatggcggttcgggcttctttcccaagactaatggttgtagtaacactagtattaggcataagtctgtgttgagtgagcttcccctcgccaaagctgattctttgagaccacgtcattgcgtttcgtgctctctttgtcgaagccgacggggctattcacgtttcaaaacgtcaataccatctgtgttttctgataaatcttcgttttgcttatccaagcccaaacaatgcgatgccctggtaagtgttctactactaataaaaatagcctttatgagtttttttattagcaaaatatctttacaaaaaaatttattagcaaaataaacttgtatggtcatcaaacgaccatagatttacactgtcatgcaaaacacgatcatagatttacactatcatgcaaaacgaccatagatttgcaaattaagcgaggttattttgcaaatttagtattttatattgttattttggtaaatttcactactaatattcgtacagtaatcgcacttttattatgggttaatgtatcttctttctttgttttgctcgtacaggttccatgtgcaactgttggtccggatgagccacacgcagccagcactgccttgccagaaggtattattgagaaacaagacttggatttattgtatagtggagttggaggagatgacaaagaattggatgagttcttaacttgtcaacttccctctcatccaaaactctatcgagggcaattgaagaatggcatgcgttatcttattttacccaataaagttcctccgaacaggtaattttcaattcatttctcattttatttttaggaacactctgttattatgttgttcaatacgaattttagtgtggtttccttcactcaaacaacatttatatgcactatacattttcccacttcaaaattgttgggattttaggtttgaagcgcacatggaagttcacgtaggatcaatagatgaggaagatgacgagcaaggaatcgctcatatgatcgaacatgtagctttccttggaagtaaaaaacgtgagaaacttcttgggacaggggcacgatcaaatgcttacaccgattttcatcatacagtgtttcatatccattcaccaactagttcaaaggttcattattctctctttcgcttcactgtgtcttaatcttttctcgctaatcattctgtattagtccaattatttttcactgtttctgttgggtgttatttgaagagtttatttttgaacttgcacttgactatgcgtaatagtttattggaaaaaaaaaggtatattgataatagtgtggtgctttcaggattctgatggagatctacttccatatgtattggatgcgctaaatgaggtatgaccttttgggtttgcttcaataatagcattgacttgatctgtctttcagtcacaattttttcttcaaatttctttttcatgtgcttgcaacaagtttaaattgaaagatgtcattctaagctgacattattctttattttgtgttgtaatagatagctttccatccgaagttcctttcttctcgagtagaaaaagaaaggcgtgcgatactttcagaattacaaatgatgaatacaattgattatcgtgttgactgccaggtatgaactgaagatatcgttgtttggttatatcatattgcttattactgtctcaatcaatgtgtatttttccttcctttcaaacacagttactacaacatcttcattctgaaaacaagctgagcaaaaggtttccaattggattagaagatcagattaagaagtgggatgctgacaaaataaggaaattccatgaacgttggtacttccctggaaatgcaaccttgtacattgtcggggatattgacgacatctcaaaaacagttttccagatagaagtacgtttacacacacactatatatattataaatttaatgaatcctctttatgtattccaagtcagtgatctttcattttccagtttacatctagaatctgtatgctgactcgatttattgcttatttgcaggcagtctttggacaaactggcacagaatctgaagctgtctctccatcaagtcccagtgcttttggtgcaatggctagtttccttgttcccaagctctcagttggcctcggtggaagtttatctaatgaaagatcatctaattctgtagaacaatctaaaatcttcaaaaaggaaaggcacgcagttcgtcctcccgtaaagcataattggtcactccccggaagcagcacagatgagaagcttccacaaatttttcagcatgagctgattcaaaatttttccttcaatatgttttgcaaggtactgactactaaggttttgaggctacgcatctcttcctgagtatactacagggctttcagctgaatagcttagtcaaatagaatgctaagttaatactggttttctactcctcaaaaagttcctggaagttacttatgtattgagatgcttacatgagtgatatcattttcttgaaaacattgttgctctaagcaagtagaatgtttgtttaaggacacaatttagattgcctttctctttgctttgaattattagctgtgaaatttcttgcagattccagtgagtaaggttcaaacatatggtgacctaaggaatgttctgatgaagagaatatttctatctgctttgcattttcggattaatacgagatacaaggtgtgtttatagtgtcatatcaaatattctactgtacactcttcaaaattcttgactggttttttatcattagtacataatactccttagtatattggtttccccctttttgaacatgtgttaatcttaatatggagtcatttgattcttaagtcatcagtatttaggctttcagaagttcacttcaactgttttgtatatgcttaagtccttattttggagagtacttataaatttcctagcttgtactgttttttctttttcggctgttgaatagatgccttaaagttagctgctaatccattgtaatttttagagttcaaatccaccatttacctcaattgaattggaccatagtgactctggaagagaaggatgcactgttactacccttactgtaactgctgaaccaaagaattggcaaagtgcaataaaagttgctgttcaagaggtttgtcattttctaccttcatcacctataatattcacaagttcggtcttcctgttctcaatttgatgcatttctcccccttgcccgatgagcaaagaagctatttgtttaattgatggcaatggcacaaataatctggtgccatttacttggttttcttagcgaggctaattgtttttgagttgtttcaggttcgtcggcttaaagagtttggggttaccaagggtgaattgactcgctatatggatgcacttttgaaagacagtgaacatctggcagctatgattgataatgtgtcatctgtagataatttggattttattatggagagtgacgcgttgggccatacagtgatggaccaaaggcagggacatgagagtttggtaactgttgctggaacaattaaacttgaggaggtaataactttatgttatattcaaaaaaagaaaaaattaactttatgttatataaggcttgctctgtcattcagaatctgtgctgtgttcagcttgatgatgttctgtaagaaatttaactgtttaaattataatgttaaattaactggcagtcttgttaaggtagtgtgtctagtgtggttttataactttacggtgaagttttatttatctttgggtgtgttaagcagtgagcaaaatattaagcagttgtcttaagattatatgtattgatctttaattctcagttaccgtaatttttcattgacttgttatcttcgactatttttttatgtaggtaaattttattggggctaaggtgttggaatttgtctctgattatggaaaacctactgcacccattcctgctgcaatagttgcatgtgttccgagaaaagtgcatattgaaggaaagggtgaaaccgaattcacaatattccctagtgagattacagctgctataaaagcaggactgaaggagcctatcgaggctgaacccgaggtgttgtttatttccatgctattaactttaacctcttgattgcattgcatgccaacaattttcagttgaagatttttggtttgatataaatttgacttgtttattgcagcttgaggtgccaaaggagctactatcttcatcacaactacaggaattatggctggagcgtagcccatcctttatttccttaagttctgaaactaatgtctcaaaaattcatgacaaggaaacaggaattactcaatgccgtctctctaatggaattcccgtgaactacaaggtatgtgacatgatttattcagttgtaagaacttattatgaatatttattttccttataatcattggacgggttcttggttaatggatgatatataagtatatttatacatatatatatatatttatgtatgtatacttttatgagtagccttaaccaactcttggagttagcttcatatctatggcttccccccttctttattgatttttttaattgttctaaatggtgatgctgtttcgcattaaaccaactcatgtgatgctctattcaataaaacattcttccaaagaaatgtggtcatcgtccccaaattgttatttccttcacatgcagatttcaaaaagtgaagcccgtggaggtgtaatgcggcttatagttgggggtggacgagcagttgaaagttctgaatcaagaggagcagttgttgtgggtgttcgaactctcagtgaaggaggacgtgttggaaatttttcaagggagcaggtttgtaaccctgtattcattggcaaagctaatagcctaatcaattatacgaggttttcatcagggttccagtattttgcttgaggacaattttttcgttcattgtttttaccagaagaaaatttacaaaaattttgagagttaactgcatgatatgttttccctgatagcatgtacacattctcttctccaggttgaactattctgtgtaaatcacctgatcaattgctccttggaatccactgaggaatttattgctatggaatttcgttttactttaagagataatgggatgcgtgcagctttccaattgctccatatggtattggaggtaaacccatttgatctgtgtctactagttttcttttatatgtgataaagaacaatagtgtatctaccacaaacagagagaaaatagaggaaaagaaggagaaacttgattgaaattaggaaaacgagtccaggatattcgagagacctggtttctctccagagccaaggctcattccagccctaaacaacaacagtgtataattgattagggtattcgtgcccagccctaaacatctcatccctatttattcccttaaaactttccaaaccaaacatacatcaaaataaatcaaaacatagagcaagaaaccaccagctttccaaaaatatcccaccccaattcttctcactaattatggggtctcctagcatatgtgtagcagattgttggtctatcaatatgctttaagatgttttcttggttgctgctagtgctacaaaaggatccactcattagcacttctgtttccatgggctcctagcaaataacctttggaactgatactaattttaaaattttttctatgctttgctgttgcagcatagtgtctggctggatgatgcatttgacagagcaagacaattatatttgtcatattatcggtctattcccaagagcttggagcggtccactgcccacaaactcatgatagcaatgttggatggagatgaacgatttgttgagcctactccaaaatcattacaaaatttgaccttgcaatctgtaaaggatgcagtcatgaaccagtttgtaggaaataacatggaggtgtgtgattcttactgtatatattcttttatgaaattgtatataaatataacatttctggtcgactaattgatgaataattgtttttcaaggtaagtatagttggcgacttttctgaggaggatatagagtcttgtattcttgactacctcggtacagttagagctactggaaatctcacaagtaaccatgatgagtatgcccctgttgtttttcgtccttctccatctgatttgcagtctcagcaggtgggatgagaaactaatagattactgaagttttaaagcttgttttccattaaaatattattcatagttgtctctgtttattccatcaggtattcttgaaggacaccgatgagagagcatgtgcctatattgcaggtcctgcaccaaaccgctggggttttacagttgatggaaaagacctgttcgagtcaattagtagtatttctactggtgatggtgagttgttgcagcatcttatgtaaaactaatcatttgagtgatgtacagatattaatatggctagggtatatgcagttccacaaccagacactgaagaatcgcttactggggctgagggttttgaaaaggatttgcaaaggaaacttcgtgggcatccacttttctttggtatcactatggggcttctggctgagattattactcgaggtagtttttcctgcacacaacttaataagcacctgaaaaggctcaacttcatgtatcagatgcattcagtcatatgtagttctatatggtgtagtaacattcatgcacctttagttgaaagttaaattcataaatcaaatacattttgccatttgtaagctctataatattcttccgtgattttgcgcaggctgttcacaactgtacgcgattctcttggattgacgtatgacgtttcatttgaattaaacttattcgataggctgaatcttggatggtatgttatttccgtaacatctacaccaggcaaggtgaggagtgaatttcatcttgtataatttgtgtttttggcctcttttgaaccacttcacacagttttgactgaaaccaaccttcaggttcacaaagctgttgatgcatgtaagaatgttctcagaggtttgcacagcaacaagattactcaaagggagttggacagggttggtttcttcgttttttttttgtttgtgtgtataatatctatttatatatttggattgcacatgatctgagcttattttgatccttcttttgcaaactgcaggcaaaaagaacccttcttatgaggcatgaggctgaaatcaagtcaaatgcgtattggcttggactcttagcccacctacaagcctcttctgttccaaggaaggtacaatagggggactctctcaagatcagcctagctaacttcccttggaattaagtgttacgctagttgtgtgtgatttcattgtcttatttgaattttggtgcaggacatatcgtgcatcaaagatctgactttgttatatgaagctgctggaattgaggatgtatacctctcatatgatcagctgaaagtagatgaggattctttatattcatgcatcgggatagccggggcacatgatgatggggagatcgtcgttgagtcaatagaagagggaggatcgtcagatgaaggctttcagggagttggtccagtgggtcgtggtttatcaacaatgacaaggcctaccacatgagggagcttcctctccctcatcctaagatgagagctttattctccaagtaaagcgattaactacgatgcacgtatgaataattatcataattacgttaaagatgatttgataggttcataatttcatgacgagaccagtggcatggaggtgctggtatttgtgctaattttatgaatcgattttcaggtttgaaggagtggtatggcttgacatggccttgctggaagaatccagaatatggcattgccatggagcaaccctgctctacacaccacccaggcaacctgaaaccagcttctttgcaaactcactgatgcagattttttgcatcctcactatattgttgttgtacaaaaagaaaggcttattttgcctataggtgaccaatcataataattattctctaaatttttttgattgtaggatgaaattttgtacaccaacaccatatcctattattattgtacttgagatattgcgcaagaaaatatagacaatgttgcaaaaaagtgcaattctagtaactagtaaacatgctgttttttctttataaattttttaagttatatatatatatatattatgaatattaatattaattgaacaataaaattatattaaataattttaaaatatattttttttttgaaaatgtatttatcaaaagaaataataaatgagaaatttagtttagcatgtttaaatataaagcatgattgtttcaaaaaaaaaaaaaaataataaagcatgatcttttaatataccatcctatttaaagtaagatacttatacgttaaatatttttttctcttaaaaatatctttacattctgaaaacactctctttctctctctctgtcttgttgtttttaacctgaagttccaaaatctttgagctcaaccacctcgaaacttctgaaatctctatccattgttagatttctcaacttgcttgtttgtatttttttcttttgtttttgacaatatcgcaaaatatcgttgaatattactatattgcgaactatcgttaaatgtctctaattcacaatatcgttaaatgtcacaaaattactcaaattttcacaataattaacgatgtttagcgatgtgttgtgcattttttagtctcatatcacaaatacttcctcaatcattgctaaatacgcaaaatattaccaaatatcgctaaactttatccctaatctaatatttggtctattattgtaaatacatcgcaaaaaattgcaaaaaactagaaaaccaaaagaaaaaatataaaaaaacaagagaggccatgagagaaaacgacggcggggcttgcgaccgttctaggttgtatatccatatgtcaaaagacatttgaacatatcatccaagtggttatctggcacgtgttctctttgtagagaagcatcttgtcaaaatcgctatgagcaagacaaagttccatagataatctataatcgttggtcttttgttgtatatgattcctaggcctagttacaataagatttttctgaatagtacaagtagatacgcggtctcagaatataaactcgctttccatacattaatacatagtttgctctagaaatggatattaaaatctgtgaaaagttaaacttagtgtttatgaaattgggaaactaaaatgtgatttctaataaaatttggaaataatttccaaattacaattgagttattattctagctctgactgacactaaaaactattacaattcctagttcagttattttgtatctcattgtaagaaggagattcaattttatttcctgaaaattgaggatagttatcatttttagatagaatatctagaatatgtttatttgtgctactcattttcttagaagaaaatagagcaacatcataagtagatgtttataaactttcttgtcgaatgatgtattatctttagaaaattcctaatgaaaaaactaaagagaaaaattaaagggcaatttcgagaaaataacaacacaacgatgtcccagtaggcgagagccaaagttattattattttataagcttcttcattgtttcgacattgtaaaccctagtccaagttttcatcatagggatgagacaactagatttcacatttgcaaaatacttatcttttgagatttaacactgttagattgtctaacagatgaccatccgtaaggggacgatatttagcgccttgaggtcctattaaaaacaacaactaagttagaccaaaaagtgagatctcaagaaacgataaatgtcattgcctcacgatcacgctgaaaggagccgtgtataagtagtttaagaggcaagatctgggaactgtcacatcttggaagtagttttcggaagatttcctccaacaatgtcaagctacatgtgattacatcatgcacatcacaagcatcacttatatgaaacaaggcaagcaagaaagtctatgaaactatatactcgctcaatgtccaaagatgaacacaaaattgctatagctgtaggaatactcacggagcagattctagggaaacatattgaaaagagaattgagcaatctggatgatttttatgaaagagcagagaagtatattcgtgtggaagaagtaatggaggcttaaagaaaggcataagtgggtactcatcagataactcgtatgacccctgcaaggtctgttaaacaacataccttgatacctacgagctgccacacctagaggtgcctttttccttcaaccccaaaactaaagcatctaagaaatcctactaacagagaagattctctagttggcctcatgaagcaatagcgaatctacctcacttattttactatgttgtatgtaatcaaagaggacacctaaatttggcatccagtaatgacaagtgtaccatggtatttacttgtgagtttatctctatcaatgaaatgttggattcccatcttacatgtgatgtcggtcatgcttcatccatccattcaacttttttactatacttgacaaatgaaattgccaaaaataaacaaaatgatgggacgataaaagatgcttaatgttattcgcgcttccagaagagtgacacatggcacttccgacttaagatcagtccgtaatagcctgacccaaaatctctatcgaaaggacagatccaactaggggtggacatttaatccaatccaatatttttttcctcattcgatccaatccaatcaataattagatttgaaaaatcattatccgatccaatctaattagtagttggatttgaaaaatcatcatccgatccaatccaattaaacctcaaaatccaatccaatccaatcattggattggatcggttttttaattagatatgtaattacatacttaaattttaatattaacttaaaaatatgaagaaaaatacgtaaaaactaagtatcacattttatttaagtttaatacttcataaacatactatcgttacaagtgtaatatagccaaaaaaaattaaataattaaaacaacaata

SEQ ID NO: 294606 - DNA, 3395 bp, Cannabis indica
gacgaagtgtattagactcatagaataaataaaaaaagagtacttactagtactatttatgtaagtactattttgaattttgatcttgactaaaatttgtaatgacattttttttaaaaagatatcatatttaagataattaagtttttataccatatctatcaaaaatatatcttcatttttccatatttgtgtaaatagcttttttttttaaatcaaattactaaaacgggcctatattcatgacctaaagttggcttggactttggtggaataaggtccatacagcagacgcaagaccatcgtcgtacatcttccggactcgacaactctttatccaaattgcttcataccaactttcgagtccggaattggaaaacaaaacacagcgtactaaaaaagcgagccaaaaaaaaaagcaaattaaacgcttgggctctcactacaacttgattcgacccgactcgaacgcacgctaatccaattctttttcacaaaagaaaaagatcgtgccacagaagattattggcctaattcttgctcagcgactcgattactcgaactcagtctcggaccttctgatattccaattcctactcgcaaggaccgagtcacttctatggtgagaactccccacctatctctttaatttttcatttgggtagaattttgagcttttttcgattgtgcatgtgaattacagcatttcgagactgggtttggtataacttctcttactttctaattatttatgaccaatttgtacatgggtcacgggtcattacttttaactttgagaaaattttattttgaatgattgaattctttcaatttcttgctaattttacctaagtttaataattggctgcaaatatggaatctttttttttcttcttaatggagtttgaatttgatgattttttattgtctaccttttttgtatttagtattatgagccaaagattcatgtcttgctattgttctaatttattaactttgtataagatatttttaaaaaaaaaattctataatttgttatttgctaaattgtgaattatatacacacattgcattaattatagtagccagcctgcattttaaagtttgtcattttgtttttgtttatccttatgattttacagttggtgtgtttgagttgcatgtggtggatttatcatggaaacagtggttggagttgagaatagtgatgaatggaagtttgaggaaagtgggttttttgaaaacagtacttcttctttgtcttcacccaagtatattgccgatccagttgtatacaagcttgttcgggtacatttctccttaatattctttttaatcttgttcacttcacttatgtacaaaaatgtgtttttgtatgcttgtgaaggcaggaaaatgtattgaaatccccttctcttcttgagagttgcatgtggcacaggcccaatcttagatgagtaatgaaagtgtaggtgtaggtaggatatgaagttaggtattttaaaacagatatctattatcttgtataatggttagttttgttgattttgatgtcctgaaatatttgactgcactgcagccattatttgttaagtgcaatgtttttgacagggctagggattagaattactgtataggatatttttgaattaatacggaagctctatgaattgctgtttttttttgttgttcttctatttataatgttctgtgattcaggttgaatgtgatgggagatttgtccctgcaacagacgatgaagtaatggaagttgaggattttcttgtagatgacaaaactgaaatgcttgtagatggtgggaagaatgcagagtgctcgtcggatgatggacttcctagtgaaatgcttcagttggacagttcagaaggtttttcattttaccattatttttttattaatacatattcatgtctacctttactattactatgatggtcttgaaactatacaagctacacagaatgtatttagttttcagaatcaaatcaagacttctgtatctatcaactgcaaagattctagccttttttgttttttgaagaaggggtaaatgatgggttctcttccacttcagtttcttgtagatgtcttaaaattcatattttcagtctgaataggtggctttgatcgtttttatctaatttcacaggaatatttaggctgtttttaagaacatcactgaggttttttttttttttttgttagatttccttctctctatctctattcaatttaatgcagtgttgttattacagaaatatactcataatgagatagatggtttatctggtattgtagatgaagattggctatcgctatcattccaaaagttattatgtttcgcctaggctttttctttttattttttacgttttgtttcacatccaattatcactatgttgcaggtttgcctcattccggtaatgtgaaagctgatgatgaaaagttgacttcgagccttgaggtatctgtgtgctttcttcttcgagcatttttatgtttaattgtggatttgcttgtgcatcattatgagctttcattgattagtgggtgtcaacaaattacttttaggaagaatttccaattggatggaaatttggtctctaatgaattttaggtgtttaatttggattgtggcagagatagtactagtaaaaagtaatgaccagtttaaaatgcttgaagtttagtgttctatttatgctgcaatagctttgtcttgactcctgttgttcattgttaattgctatatacatatattcattataatcaagaaaaaatcaattctaaacttcagtatgatcaattaaatttcttgaatccttctcagctgtaaaactattttgttgtacatttaattgatgttaccaaaagtaataggaagtgtctcctcgaatcctgtggagctcctgatgattgttctgcttttattaaagcagacagcagagttttttcgttagcgtgttaaattgtctgtattggtaagaaatctactcttaaatctgcacgcaggaagttgtcccttcatcagcactaattgttgatgacaactgcaagaatttatcagggagcattgaggagctgtctaaaccttcagatgaacaaccagatagtgcaccatcaacttctgatgtctgcaataatcaaaaacctgatttttataagttgaagggggaaatatgcttggacaacctctcaattaaagaacttcatgaatttttcaaagcaacttttgggcgggaaactactgtcaaagacaaattgtggcttaagaggaggattacaatggggttgactaattcttgtgatgttgcaaccacaactttcacaatcaaggacaaccacagtttacgttcatgtgtaggtaaaggcaa

SEQ ID NO: 294607 - DNA, 7579 bp, Cannabis indica
tgtaattatttttttgtttattagatgaaatagtgctttctatgatagatttgtcttctcaatttcaattagtttttactagatcgaaatagtgttttctaggatagatttgtcttttaattttttttagttattttaaaaaaaaggcattactagtatttaattaaactagagcatacgtgttgtgattatatggttaattatagtattaacataacttaaacatcatttcgagtttgattaagaagaaactttaaaatgtaaaagtgaaaacaaaggcaccataggttcttacaaattgagccacgtattggatattgcaaaatcaacatggaaacctaattagacacaaaagaaaatgataattgagatgagaaagttgaatgatttttggagaaattaagccaagtaagcatttgacctaatttttccacttgttaaaaatattactataagcaacataaaactttaatagagattattatccatgatcgtgttggtcattattagtcaatattcagccatattgataaaggcctataaagaaaatggtctgaattcagcgaaccatttaggcaccacttacctaacatatttctgattatgatttcatataaatatataacattttttatttttattgtaatgagttgtaaatatctttggttctaaagatcaattttacatatgtttaatttgaattattttgtacatcaatcataagtattttacattttattgtgcctcaatgggtcagctagcaaactgagtaggcatataggtaaatgaaaagagaaaaagatgtaatattttttctttctttctttcttttttttttggatcgacttaaaatttgatggcctcaaaaattggcaaacacaataagtctaatctgtgtaaacaaattgcatgaaataaatatatgaaagggatgaaacaactacattcccatagttcaaaaaggcctggacctcttactgatcattgagggtccacaaaatccagcagtgctgaacaaaacaaatttgggcctttgaaacaactgggacctatattatgtattaaatgatattgagaggtcagtcataataatctcctccagtgaatttataccctctcaatcctaaccctttgtagctcacatggttctacgtctcactttttctgcgtttcaacacagcagcaaggtcaccatctgccatcgacgaaagccagtggtcctgtatctgtgagcgtggaattgaaaaacgaaaagggggcatttcatttcatgtcctgaaaatgctattaactatgaggaatgatttattgggccaagtgtaatgatgggtctttctcaagtcgcaggacaaggttttaatggtccatactgagtaaactgacactaaaatggcttaatggtttttattgtttgacaagttttttagccatagtcattgtagttaacttatgaggtatagttcttaacttatgaggtatagtgctttgccattgttcgtaaaagttaaaccaacaagctcgacctttacactcattgttactagctgttaaatatgtaatacactggttccatattacatcaaaacatcttccaaaaagcctaaagtaattggtaaaacaagtatatgtaaatatatatactctgtacaagtatatccaatccaagtatcggtatcaatattactacagaccaaatttatgaatctcattcgggacttctctattattcatgagcttatccagaacgacattaaggtctactgactgcccattctcagtcattttcttcactgtcgctctcaccatatctctccgaaatcccattcctacaatattatcaataacatcttcaatgggaatgctgtctccagcctcactagaacctgattcactatcaatctcagaggccattggcaatgcatgaggtaatgaattggaagctggtggctgtgagaatctgtcttcactacaacgggccgaaagaaatggtgcaggttctaaggaattcattattgatttgctgtactgagaaggaaaaccagaacgtgaaaaaacgtcattgaaactagaatctctgcttggttgagcatgctcaggatagtagtaccctgtagtttttgaaggttgattataacctatgttctggtttgaactaaaatacatttgtttcgtgggaggagcataggcaggtgcattataggtctcatgggtgtttgtgttgtagctttgaggtggcatgtaagagatctctttaaaattgtgagccaatgaaggatgataggtttgtggttcaacatcatgagaagggcttagtagaggagatggctgcaattgtgaggccaaaggaaattgtggggcttgctggtaaggttgatatggtgctgtagatgttgattgtggttgctgaattgggggcatacagtgatgctgttgtgtagattctggattaaacataggcggtggcaacgagtaattagattctgcctgtgaaacagaaatgttttggttctgatatgcttgggctagaaaatgctctgctgttggcagaggaggcaaattttgatgggattgaatttgaggaggaggaacattgagatgatcaggaggaaaatgttgcggaaaagtaacaatagtttggtttgattggttactatgttgttgaatagatgacagcacaggaaattgttgtggaggagttacagaagtgatatttggttggttactatgctgctgaatagatgataccagaccttgacatgaactagtgtgaattttggtcttctgattttgtgattgttgttgatcttttaacatttgaagctttcccaattgcagttgcactagtgatatctcttgtttatctcttaagtcttgaataccaccttgaacctgtgcaagtatacccacgattcagaagaattgtgttgagaatggagcaaggtagccttaattttggtcaaattaatgaaaacaaaaggatgtaaagaaacagtacaaagaaacaatacctcattgagaatattctctagctccctcaactttgctccagattttccctggttaaactcagatgatcctttcaattcttcaacagaatactctatttttcttgttctattctctagttgacacattcgaacactaataccttccacaacatgtattaaattcttaaaatgcgcctccattttgagatcgatcacagatagtagcactccatcagtagaagtctcaacctttatgaatccagatttcacaaaaaatcaagataaacccataaaacagtgattcattaagaaataagtatagcaattacttgcaaatgaaggaaacataaatgtaagttgtaacaacttgaatgtgagtttaagaaggaaatcaaattaagtgaacaagttcctccatttctgtattagtcaagctcaaagtataaatcgtaatatcatattttcattgactaagtcaagctcagatgactcttcactgtctccaatacctaggattgactcccaattcaacaattttactcaaactcgcaaatttccaattccgaattccaaaacatgaaagcgattctatcgatcaaaactcaagcgaaagtatatcgatgaaattcaaaccaaacctggaaactggaatcgcgtgagcatggtggaacgacacgtcgtatagagtggaattcgaagctggaatcgaaatcgtccttgcctatgtcgtatgagaattcatcggaatcggatcgaggaagttccataatccgcttgtccataaaatcggacgatttcatatcttcacccgcgaatttcatcagattttccacctctttccgagaaagaaaccaaaacggaaaatggttcagttgaaaaaaagagctcgacaacggatgcagtcgaatcaaatgacacgtgtctaaagcagccgtcgatatatatatatttaaatatagtagcccagcccaataagagcccataattgttagcggcccagttcatgtaataagaggccgacggccaattcttggcccctggcgcgcatatgatcggcgagagaagcaaaaatggcggattctgcagaatccgattctcacaacaccgattcagtatttgtttgggatgaaagctctaagcttttcttccatgccaggttttctctctctcctccctcttagattttgatatgtttttatctttcaagtttatgtattaatttatggattttaatggaatggcagtagtggattttaccacgacccaaacgctggctggtactatagtactaatgatggtctttactacaaattcgagaatggaaactatgtgctccttcattctgatgcggagacggtacttaaatttgagctttttctcattgttttttattttataccattttgttttttggaataattagctataacggctgttttttaagcaggctgataacattgatatgcctcaaaatgaagaaactgttcatgaaaattcagttcaagatgaacatgaaccatctacaaaagatgaatgttgtggtgatcaaaacgagaatggctcattctttcatggtgatgattatgaagctgatttgtcaaatcctggtaagatttatttttgatgttatatatatttgggaatttttgatggattaggaccccaccaaggacttgaattgaatatttgatctatatttactctctaatctttgaatattgttcaaatgaaatgaaatttatatacttgtaaaggtgtttggtatagtttcacattgcattttaatctgattttaaatgtttaaagaaatataaaattaagaaggcaaaggatagagtgacaaatggattaattttcaattgttttttgtaaaatttgctagataaatgtccttcctaggtgatttaaaatatggaaattccagttttattctatttgatctggatttttctttaatctagaatcagcaaaccatttcacttgcagtgaacgcagattgtagaagcagttattctcctgaaaacccacctcctccatcagaatggtatgttattaatatggtctttccacattttttttttcttttatctttgttggaattgtttttccaaaccgtagttgttggtttttcaggttagaagagacactcattgatctttacttatcgggctattcaaaccaagcagtgaatgctggtgatgatgatgatctgaaattggcaaccaaggagactgataacattgaatttcaagctgatggtcagttctgttttcttgttcattcctgcatttgtattgctattctatggccctagtttacctaaaatggggtgtttggttggataccagtgaatgttgatgattacgagttagaagagggtgagtggattcctgaagacgattttgatgtaactcaatcatgtgaaaacatatcaaatgaaggtattgctactggctatagatcttttgctagataacactcttttaagtagtaatatgtgtaattttttgtcactctctagtgattgtgaaaatattggtccatctactgcactggctttatgcaaacaaacctgtggcacaggtgcttcttgggatgaagagaattggagagctcagtatggtcaagtcattcaaccttccgaagagactattccagaggtccctgccgttgatttatgggactggtctatggttagggggtctagaaaagatggtaaaggtgagatttcaaggcttgtcgggagactgatgaagaggtctgccaagctccatccctctatgcctactggtggcggtcttctgaagactgcaccaatatgtgaagtgcatcttgatctggtacgagttaaaacaggtttgcctttcttctttcatttgtaaagcttctattacggttttggtttaatgtaacataagttcaaatttattgattcaacatcatctgcttgttcatgtttattcagtgtaacgttatacattcagatgcttatattttttttttctcctgtgccaggacaaatatataagttacggaatccgagtgcaaaattcttaggttccctgttgacgtttgattcttctaacccaaccaaagactggggatttcctgaactgtcatttcaagagcaaccccgtccttattctaaatccacggagaagatagaatcaaaaactgctgatggtttagttggcaatgattttcctccatgccaagatcaggttccatctttggacaaggtaaatgtgatattcaacataataattggatcctgagatctaaacttcttctttattactattacgactttttcgagtttaacattcagtgcatccctgtctcgtccaattattacgagttagatgtctgcacttttgaactttgacgaagttcctacattgtgcttggaggttcaaattgtatcccaagtacttatgtagttacatgtcgtgtctaactgctgcttatgtatgtccgatttaataatttgtcagttatatttttgcctatttaattctttgggaacacttgttgaactaccagaatagaagctgtgcatatagagacagagccgctgagagaagagccttgcatggaggattcggtgtgggtccaggacaaaagaatacaatggttggtgatatgccatcctcacctgtttcggactctacagaggaagctgcagccgaggcattgaacatgtcatttggagccggaagttacgccagaaaaattctagaaaacatgggttggaaagaggtaaataaatcctactttgcaatttagtgacatgactataatgaaagcctcgttaatgtcccttagaggaatattgttactggatgatgggctagtatgaagcatcttgtatattttgcaccattttttgtagttattattttggcgattgccatcttgtaatctctcacctaatacatttccatatcattttgcagggggagacactagggaaaaccatgaaaggcttagttgaacctattcaagcagaaggaaatattgggagcgctggattggggtatcctagggtaagaagaagaactaagcattgatttgatcacaatgcccagcccaccattaccacactttgttgacactttttttctttttcctgcatttcacttgatgcttctgttaactagaggatgtgttatgctgtaattttttcaaaggaagagaaagtgtagtgaagtgcgtcaatagtattggcaaaaaaaaaaaaaaagctttgctagctgttatctattttatttggaaaatttgattaatcatgcgggcattaggcccaaaactaaaaaaaaaataaaccaaaagttagatactctatgaaatgtagaattatttttctcttggtttcaaaaatgcccctcccaataaaaaaaaaaaaaaaaaaaggtaaataaccattttggatcctgtattttgcaaaagttacaaattggaccctgtattttgttaaatgataaaatggaccctgtattttttaaaatagtaaaaataggaccctgagcttaatttttgacaaattttttttttaattacaaccaacttgaagacaatgcttaatacgaaca

SEQ ID NO: 294608 - DNA, 4106 bp, Cannabis indica
ttttttaaaaaaaaacaaaagaagatgaagaaaaaattaagagtgatgaagtaacagaacagaaatgaaataaaaacaaattaaaaaaaaaacagttttgagtgaagagagagatttgggcataagcgtaggcatagagagagaagagagagagagagagtggagacgaaactcaactcagttcccaactgaaatggacggagctcagccacagccaacggacaccgtcatgtccgacgcggcgcatcccgaaccccagccccaaccccacccacccatgggtatggacagcatccccgccaccctaagccacggcggccgattcatacagtataacatcttcggcaacatcttcgaggtcaccgccaagtacaagccccctatcatgcccatcggcaaaggagcttacggtatcgtctggtaatttcatccttacctttccttttgttaatttcaatatgaaatgaaagatcaaatatttactttattaattggataaagatgattgtgattcgtgttctcttttactcattagctccgctttgaattcggagacgaacgagagcgtggccatcaagaagatagcaaatgctttcgataacaagatcgatgccaaaaggactctccgtgagatcaagctgcttcgtcacatggaccacgaaaacgtttgtgccctcatttatttcattcttattcctttttcttatacaaatgcattgcaatgtagtctaaaggtggttgctttaacttttggaatgggatttttgaccctcttctcttgtttttggtgatgcaggttgttgcaattagggatattataccaccccctcaaaaggaggtatttaacgatgtttacattgcttatgagctaatggacactgatcttcatcagattattcgttccaatcaaaccttgtcggaggagcactgtcaggtttcattttactataatctgtctttgaccctttatttatgcacatcgagcttactagtttccaaatttcattgctttcgttgtaactgtaactgatcatgaaaattgactcgaatcctgccaatcaataatgagaatgacacagttgaagtctttcattgtagataagcttctttttaaaagttcataacttttcatttttatatttttagtgttggagcttcctcgtaggctcattcttactctacctaccatctttaaatcattcatatctgctgcaattttattatttcttttaaatttccttttgcagtatttcctttatcagattctccgtggattaaaatatattcattctgccaatgtcctgcacagagacttgaaacctagcaatcttctactaaatgccaattgtgacttgaaaatttgtgattttgggctagctcgtgtcacctcagaaactgattttatgacagaatatgttgttacaagatggtaccgcgccccagaactgttgttaaactcagctgattacactgcagcaattgatgtgtggtctgtaggctgtatttttatggaattgatggaccgaaagcctcttttccctggcagagatcatgtgaatcagctgaatttgcttatggaggtattttctttttgcaaaatcagattctcacttgtcagctttgtgatatttgtttcgttttcaatgtttgagctaaactgaaatgtttgttagttatttcctgctgaagaggatggaagaattgcataaaaaatgtaaagaacttaaagagtgcaaactggtgttttattaaaaaatcccttaacattgtgtttcatattggataactttgtcactcttgcggtatagcattccaggaatcgctgttgtttatttattttttttccaacataggcctcgtgtgcagtttgtacatgatttgaataaggtgtataattgtttactgtaacctgtgtaactaacctcgcagcttattggcaccccatcagaggctgagttgggttttcttaacgaaaatgctaagagatacattaggtcaatgacagttcaacgtcggcaatcatttactgaaaagtttcctcacgttcatcccgcagcaattgatcttgttgaaaagatgctaacatttgatccaagacagaggataactggtgaatatgtctttcttttcatacacaggtctttttttagcttctatgctattaaaccgatatgagtatattaatattttgtgtcttgcagttgaagatgctctagctcatccctacctaacatctctgcacgacatcagcgatgaaccagtgtgcatgactcccttcaactttgactttgagcagcgtgctcttacagaggaacagatgaaggcactgatctaccaagaagctatggcatttaaccccgagtatcagcaataatgaagatggaaagatttcgttcctatttattagttttatcattacgttgattagtgtggtgttgaccggtctatctctctctctctctctcttcttttagtattttccattgtgtcttatgatgatcgatttcttaatgtaaatatgttccatccgaaacagggtggtaatcatgccaaaaataatcttttctcagcagcggtatttatggtgtttgtttttgctagtatcggctttttttgattcttattgttgtttcatttgagctgttactgacttatgatattaaaagaccttttcattcctatgcattattaaaaatgcatttttttttttattttcttaatacaatgtcagcatgtttcaattttattcttactgatttacagttacatttcgaaaactaaactccccatgtatccatgggtaaactttcatttgaaccatatcaatatcaaatttcaatgttgaagcaaacttagaaatgtcaagggaaggtgcggaataaaagagaaaaaaaaataactaagagacattaaaaattatcaaaggggaaaacatgaatctaagaaacaatggaataatttgtacacccaaatggatatcatcacctaatgatataaggaacacaaaatctattacaatgactagctcttgacactctcaaagaatcttgaaaggggtacaggtccttcagccttatcatcgttaccattcccagcgtgcttggtctttgatttgtgcttcttttccttcttagatctcttagaccttgacttagatcttcttgcttccttctcttcttcatcactgctagaagaatcctctgacgagctggacgatgaactagattccgatgatcttcttcttgaagaatgctaaagcagtagaacatttcttagatttgtattatagcatttgagatttgtgcagataaaagataaatgaataccaaattcacacataatcatagagagctagtattgaaacattaatagaatttccatttagaaatattgggataatttaactatgcaattctccctccctcttcatatccattagtatagtttgctattattaattaatcttttttcttaatatctaataggagtgagagaggagcattaatcaagttaggcctagaagtagtagaatatataaataaaaatggtatgaagcttttcaatgagtgaatctaacagaaaacatcaaagataatttaaagagaagttgaactagttcttaaagtaaaggaggagaatatctgatcagcaatgaaaagaaaagagaaacctttttccttttgctgctgctgctgctgcgcttctttagatctttctccttcctatctaaaatgaaacatagatatagaaagagacacatgagataagatagtagtgaaaaggggaataattgagactgacatgaatgaaagagtacctcttttgcgagtagaagaagaagaggaatggtttcttccttgggagagtttgcgagagcgttcggcatcaagttgagctcggtactctctcatcattctatcagtgtctttctcaagctccccctttcgcagttcatcttctttttgcttcttcttgtactcttcccaggtaatggtgtgagacgttttaaggctggccaaacgagccgcatgccactctggtgaatgaaatgaaccatccacctgcgactctcctcatcagttatgtcttatacatatatatatata

SEQ ID NO: 294609 - DNA, 2728 bp, Cannabis indica
gtaatagttgtagctttatcatcttttgataacatatagagttactactcataaatttatttattttactggtttgcagatcggtgtttacaagagtgatgactgagagcccaagtttgtttgagtggtctctactagctgaggcatcacctgctggcctacttgctttcatatgttggaacgcctacttcattaataagatttatgatgtagatatgtctaagtaagtaacatattttaggggtcttattacatgaaaataaaaactacatgcccttttaaaatgaactactaaaactcaagtcttttataatacaatacaattgtgtatttcagattgaacaaacattatttaggaatagcagcgggtgaagtttcggtaaaatcagcatggttattggtgatattttatttgttcagtggattgataattatgggattatggggagaaccagtgattactgctctctattgccttggccttttccttggcaccatctactcacttactccacttattaaagccaacaatcctctcctgcttcttccggtaactatataatatatgtacaattatatatggtattcgtttttattagtttttttagatgattttatttaaataacccatagtgatttaatttgcagatgttgctcatcaataacataatatgtcatggtaccaaaactacacttgggcttacatttaaatggaggtgccttaaaaattttctatttcaactaataattaagtttcataatatacatagatatgggttttaagcacatcatgtgcaagtgcaaaaatatggagaaaatatactttttccataatttatgataaaaatttgagtaactaaaaaacttatgagaaaatatttataagtgaaagactataaaaccaaagagtaggagcaaagaagaaaagtagaagaagatgaataagtaaaatgaattgctcaatcatcaaatgattaaccttagatccttatttatacacaatgtttgtacaaaatattaattactacatcaaacaaaaatgagctgagaccgactataataacagaaaattaatctaacaaaaagcataattgatttaactaactttctattagagtacaaacacttgaaaaatcagctaacattttgttatcctaaatatccccttaagtccccttaagtgacatttgtctacaccaagtgtcaacttatcatttgaaagaacaaaatagctggaagaggctttgtgaaaaaatcaaccaactgatttgaagagtcaacataacgcatattcaattcttgagctaagattttgttacaaactgtcaaccaactaacttctacagttaattagtttgttcagtttttactgtttgtacctaactgtaactaattctgtgacattcttgttatgttttctttagttggtctctcaatctttctgtatctctctctctataaataatgaaatggttcttctctttggcttaacctttacaagccttagagactttgtcttcattgttttctgttgtgtgcttagtattgataggttcatacatggtatcaggaaaccactgacgcaagtctcatatggatcctcaaattctcgaaaatccaccgcgctctgctactcaaactcaggggcaaagctccggcaatgtcctccccccacagaactggaatcctttccagaattccctaaactcttctctcactgtaaaactcgatcgatccaattacctcgcctggaaatcacaggttgttcccactatgattggtcatggccttgacgatctgctgttcaccagagttgtacctcctgaaagactggtcactggtgcccccaatcaagaattcatcgcctggaaaagaaaagatcagctacttctcagctggcttcgatcatcaatggcagaatccattcttggatctcttgctaatcgtctctcatctcatacactctggagagccttggaacaacgatttgcctctcagtccaaagctcgacttctacaaataaaatctcaactctcaatgatttagaaagggaacctatccattgctgattacttcgacaaggtcaaggttcttggtgatacattgtctacagctggtcatccgattgatgaaagtgatctcatcatgcatctgctcaatggtttaggtccagaatacgatccagtagtcgttcatgtcacaagcctcgttgatgatctttcgttcgaatccattcagtctcttcttctcactcatgaaagtcgattggaaagacattacaccattggagatcaaccatcaaagccctctaccaatctgtctgtgagctcttcaagattttctacaggttcaagaaccagtaattacaatggcagaggtggtgcctcaagttctttcaatcgtagcaaccccagaccccgtagtcgtggatatccctcaaataggttagtgtgccttagtacgagtatgaaacattgattggaggcagggggattgtcacaccagagaataggacattgagggaactataattgaatttcaaataacaatggctaaatctcagatgtggcgaaggcaagggcacgatactcagattttgtattggacttgactaccactatttgcttctttgaacaccagatgtggtcaccctatttttgaatccattcaacgttcgataatttttttttatatatatttaggtggcatttggtaatacttttatttt

SEQ ID NO: 294610 - DNA, 2498 bp, Cannabis indica
gccccccccccccccccactcgattgggtaaagctgaattgtgatgttagagtggggttggataacatgtgtgcaactgtattcgcaaaggatcatgttagcaaggtgatctgggttactacctctaaactggagttctctgatgctctttgcgaagaagcggcggcttgctatctagctctagagtcagcgaaggatcgtgggttaaagtttattatgattgagagtgattcgagaataggattaatgctcttaatgggaaggattcccgttggaagcttgagaactatgtctcattttgtattagatcctctcctttttttgttggatgtattttcgaacatattagtagacattgtaattttgcagcccataatgtggctaactgggcgttttcccaccagaggttcggttccctaccaattacctctatcccagataaactcttttgtaatgaccaggaggtctaattgcttttatatatatatgcacacttttcttacaaaaaaaaaataaaaagatctaatccacacttatttattaaaacttatacatgcataattcatattttaaagaaaaaaaaatagtaaagtgtgtttgcggttatagttctctaaggtagtttttttatggtttcttactctgttcttcccctccttcataaattttcttctgactgctcccttcaatcctgcaaaaccaccaattttaatttgcatcatgaatcttctaacaaagaagatgaaggacacgatgaaccttagaacgattcaaccctaattcttgacaattatgctgagcgaacaaatagactggacaatgttttgattgcgagaatcctcactacaaaatttgtctttctatctacattgcaaagatagatgagagatcattggaatggtagatttcacactaaaatcactaaaaatatgtctgatcattttgttcttacattcggatgttaaggagacaagcagagggtacttctcagtgagccttttcacttttaaaaccatcacattgtcttatacacgctaagtcctttacaaaatatctcattcgaagatcttatctactctcattttcgggttcaatgtcatagactccctttttttagcaaatctaaggctttggccaaacccttaggagacatcattggataattttagaagtctcagaagtttcggtggaagaaggttggggttcatttttaagatttcgagtcaaaatagatgttactaagccattgttaaggggtcgaaatataagacttcagcaaatacgcgataagttctgggtggaattttgctatgaaaggctttcaaaatggtgtatggaatgcggtaggcttggtcatccttttcagaaatgtttggagtggatggaaaaaattgataatggaatcaaacttgaacttccatatggacttgaactgaaaggggcagaacttccaactagaacgatttctccaagaagaatgcctagccacttctcacgcgattggctcgtaatatgttatctacaacgattccaggcctcttaaataggcaagcatctcaaccttcgccacttctaccagaggagtattcagagtagcaacaaagtaacaatacagcggcaattattcaaggatctactcaaggcaccagagttgcttctactttgatcactgatgttgcatccatgtctccatgactaatcctagtaatactgccactcctaatattttaattgataccatggagaacaatgctactatgaagagtagaacctcaggcacatcgatttctacaataggttcatctacaccaacagttacgatttcggatgtggataacttgattgatctttatattcatgcacaagtagacctggccattttgtcaataccaaccagaaattaacctcaaaagttgctgcaatttcacatgtcaaaaaacctattttgacatcacatagcaataacaatcacaagtcaatgcatcttaacatgccataaattaaattaacatttgtctccttgcaagctactactacattggtatcagattctattatcaacaggtcaatagaaactgatgaaaataaagaaaataacttcctaaatatgcaaagcaaaaggcagttagaggctatgtcaatgtggaagacaattaaaaaatgtaggggtctcaaaacttcttcacacacttcatttttatcaaatgaggatgggttaaactataatgttttcgagtcagctgtagactctttttgttctattgacaacacagtggtggctgagttctcgccccgctaccagccatgaaaatagtcagttggaatacacatgggtttggtgatccaagtgcattctatcatcttcgattgcttgtcaaaaagcaatctcaacaagtactttttataatggaaactaaattatgacctaatgtaattgcttagtttcgtcaagctttaaattttaacaatggacttgaagtccctagaataggtttagg

SEQ ID NO: 294611 - DNA, 1235 bp, Cannabis indica
ttccttttgtttctttttctttttttgttttaaattaaaaaaaaaacaaatttttatatatagattgagagagtgattgagtgaggcagtgagagtctaagatagattaaacaaaagtttattgttgttaggttagttttatcttcttctgttgaatacacatttttggagaaaaactatacttgtttttcttgatttcaagtttatgcactcaactggcatgcaaaattacggttgcgatgctactgatggcgtcgtgccaaccagcatggaaaattacagttgcaatgatacttgatggcgttgtgccagaattattgccatggcgagttattaatgccaccatgagccagttacaaaaaaatcgatgatttccccagggtgtcaggcactgcattacaggtattggcgtcgcaccacgagtgccgtaattgtcagcaattgttaggagaaatttgtcattttgaaaaaattaagagattacacttttaatctctaaggatcacgattagatgattgaatactgaaacaaaccctagaaaaagaaaaagaagattggaactaaagttagaatttgtgaatcgtgacaatctcaaactaatttcttctcttttttctttaattttctttttttgattatgtttattttttaaacaactatggttgtgtttatggagattatgaactactcatattttaggaattttaatggatattatcaaagattacttatgaaataatgttatttggtttttctttcttccattgttatgtgatttattcatatttgtatttaatgcatgtttgagattagacatgcatcttttacgtgatttatgattctaatataaaatttaaaaagtaaatattaaaaatgctttaattgactaaacacaggttttgatgcaatacaaaaatatttgtatagcttgtgtcacactagattactggttaatgtgaattgtttgtttaattatctcaaaaatgttatagttattcttacaatttagtaacttaatgtcctaataagaattttagtaaaattacatagaaggaggaaaaaagattaattggcattattgaattaggtaattgaagcaatggaagttatttccctttaatttttcatctcttgattgaccccttttatttatctatttaattttattccttaaataatctattctcaaaccaaagttttattttggccaaatagaaacaaagattcaatttat

SEQ ID NO: 294612 - DNA, 4914 bp, Cannabis indica
tacccctgaactattgagattgttgaatttaaggacttttatccaattttagtaaaaaaagtctaacatggatgaaagtttagagggcatagtttagtacatgtcaatgtttgagaggcatgatttggtagctatcaaagtctgaggagcatgatttaatacataaataatcaccgaaatattaaaattgaattaaattaaacaaaagtccttaaatttaacaatctcaatagttcaggagaaatttttaacgaccaaaaaaattcagggagcatgatttggtacatgtaaaagttcgagagataaaaatcctaattagccaaaattatttatttcatttgagattcacttgttataaaaaaaaaacagtaccatcaatgtgtaatgttttggtgtataatagtgcaaatatcattattagaattcaaaagtcattatcataacaatcaataggtcattaataaagattgatatggtcattcaaatacatctcccatccatttaagcacagatatacatgaacctatgtataaatatgtataattaattttactatctcaatccatcatagagaaagagactcaatattacatgtctcccttcctttgtgatgatgatgatcaatgatgcttcaaatatgttttttatggcatccagagctatctaaatacaaaaatcttctttggatgggaatgtcataaactttcaaccctcttctttcttcttccgagtttattaactcaagaattcgagctaccattctcgaggttcttgtcatctgcagcatcactgggatgatcaagtccactcggaatctttcctggataattagttgttgaggggtctgagcctgccatactggacattgaagagttcagtagtaagggtcattttttaccgaaatcaaattaatttcacatggtttcgaaatcaatctataagaacaagcttaaaagagtatctacaattctttgttagctaaccttttatcgatgatgaccatagatcgaagctcacagtttgcaaagctgcaaatatattaaaaacgaaaggttatttactaaagaaaaatgccatagaaagttggttagttaacttgattgcatgctaagaataagcctctgcaatacacttactgtttgcctatttcctttttcaccaaaggatgacaatcatctccacacacctttagtgtatgaaacaaaaagccgctgtgagtaacaatggcgatctccttctcttgcctcgtccacaacctgaaattatcagcagtcaaattaattaaacaccccagatgcatcataagaattattgagcataaatcacagaagttgtatggtctggaggcattattatttcctctagacctcaaaaaagggctcgggttagtgaacttaaaataatgcacgagatgataaaattcaaccaaagtgtagttccttaaaattacaatgtaaattcacagaatttaaaagcactgtttcttcatttattctagaaagtaactcgattatgccattaaaaagtcggactaaagaaaattgcagattaaatttaggaattccaagttatgaaaaattctttaaacttgcatccacaataataaatagcattataattttgaattattttaggagctgatcaaaacaaattcattgtcctagtcctagtagtaacttaccagttgagaaatttcaatcctctggctgcaacttcttcttttgtctctctaacagtggcgttccataacacatcctcgtcactttcaatctgtataaatacaaaagataattcaaaacaccaccccaaatataacaggcatcatagatgaggatttagctagcaaattattccatgtcatttcatcacaacaacacttgccagtgaaaaatcaactgctggaaatagatactgatattcactgatgcttctcctcttatcacaaggatgaactccctgaaaccacaaatattcacaaaaaaagagttaaaaggccttttaaataaatacgactcgaaaaacagaaaagaaagtatgcgatgtttagtatgtttcgagtgtcaagttaatgaaaaatgaaattttaatagttaaaaacctctcttagtcaatgaaccaaaaaaatctagtagcaatccaacaataagcaaacccttttaattattcatgtcttgtcatttggttacacttgaaatgtatccttgccaaacttatattttcattaagatttgtgtataaatgtgggaaagatatattgtcgttcttacataccagatgttcacgacaaggctctactgctaagattggtggggcgtcaagactagaaattgcagggcgttcgctattccctgcatttgctgccatcagcggcactatatccattctatctgtgtagccctcacctccaaacactccaacagctgtttgcagtgtcctagaatatcaaagtcagaacaatacaaagcttagcggcatgtaactacagaagtgtgtactctcaagggaagttatatcaatggctcttagagaaaagaaccatcattgagttttttatttagtaaatgatcatgtttataaacttattaacatagtttaccaaattatgaacctgatccatcaacatggtttatcaaattttcaacatagatcatcaaattatcaacttggtttgtcaacatagtttctataatttagagaaagatcggatacgatattgacaatacccttagcaatttagtactaatagataacattagtgtgccattagattcatcaattgtacttatatctgattaaaactacaccgaaaagactgcaactttaatttttgccatacttctatgatacaacagtacaatttatgtgtgacttcctcacagcatgaatgagaatatgattttaacatttaactatatttatgtataaatcaactcttcccaaattcaaacctgtgcatcagtacttgacaccagttaaagataacgttagcatgagaggaagctgtcatattaattggtggattcttactgttttttaccagctacattcgataacagaggctaagaaaaattctaaaaacatggatatgagaattgatcctagcagaaaattacaacactatggagatgaacaacaagataaccgatgaatcaataagtacattctgattctagcatactaacatcatataaaactttcgaaactacaaagttaaatgcaatactgtaaagggtgccaaatatattattgatctaaagttattttgttatgttaataaaggttccagaagaacagaaataagtctaatcaccttagcaaaggagaaacaatgactaaatcaatcttcttgtaaagcccagatgaatgaacatgcttacgcaaattgtctacctgtcaaaagcaagaatactaatgtatttttctcaagaacatggcaatgctaatattgctatttgctatcgaaaaatattagatggtggacactcctttccattattaactcaatgatgattttaaagaaataaccatatacaatgactagcttcttacttgctgccagcccagtggagtaagttgtgcatcgaaaaaatcgggattcaagtatgctttgtagttcttatctccttccacattgtggataccttgggcatgcctgacctggatgtatttttcattcaaattgcaaatttagtcttatcaaattcacaatgaacagtgtatctaattgatcatcaaaaggtttgaatcaacgattaacaaatgtatccgacttgagatgaaaggattacaaaccagatgaatagtcttgcaacggtgcaatggaaacaaactaggagttggagcagtactatccatatctgtgaatgtaatcaaagtgaataattcagctcatatcaaaagttataatgaatttcttgaatgaaaggtgacccccattcttcttcaatttgcacatttcaacaagacaaagggagaattacacaatggtcagaagaaagtaccaattaatttttacctccctaatttcattagatcaaaactaacataatcactagtccacattctcaaatccaagaaacaccccttctataaccaaaaattccttcaaaaatcaaattttaaaccaaatcccaagactcttcttcagcttcaaaagacattaacttttcaactttattaacaaccagaaaatcaataattggtatgtataattcaaccaagcaataaaatcccaattctcaaatcccagattagatatcagattaaatactagattcccatcaataccaataaaacttccataaattatgaaacaaaaacaaacccagatcaaatcaaagccaccaaaacagaaaagcaatctactttaccaattataacagaaaaagaaaatagaaatttaaagatttaaagattcaaacttgaaaggtgttaccggatgaaatagagagagaggagaaacaaagagaagatagaggaggtggggttgctgagaaggacctcagtgcagaagaggaagaagaagagaagcaatgagagggaaagttgaaggaaatggtggtgatggacatgtcgattgggaccagtccaaacccattgggttttgtcttattcctttttgtttcaaatattaatattttaggcaactatccaatctccatccaattaaattcttttaggatcatttggtgggctccacactctttttttaaagagaaatagagagaaaataataataataataaggataaatagcggcataagtacccaaaattttatgtttgtaagcgtcataaacccaatgtttatttttagcagcataagtacccaatgtttgtaaaactgtaattttcttccagttttgtcagtacagactctgttttgaatttattaaaagaatatttagaagtaatt

SEQ ID NO: 294613 - DNA, 1876 bp, Cannabis indica
ttataagattgaaattagaaaatatgcctattatttaaagaaggataaatggttaaaataaagtggtaaaattgtaaccagtgaggcccattaagtggtcgcccactagagtgtatttttgcccattattttattcttttttaatccatataattaaatcctaaatcctagttgaagtactataaaaggaacacgatgctctcattctcatccaactctaaacctagttttctaactctatcggacaactagtagatgagagactctttcatagtgatttcacccctcttgttattcttcataaatcctcaagactttagtgatatagtaccatggacacatatagcaagttaaatacttaatcatagtgcggaagaccctggttaaccaaatcgaatgagagaaggagatccaggctcagatcttgttattactctacagtagaaaggaacaagggttagagatctgaacagaaggagtcatattattttgtcgccatcaatgtaaggttttctaagctcttccgtgtttaatttcatcgaattaaagaattcatatttagggtattaaccaaaataagttataaatctagatcctggtaaaataagttccaacacaactgagtcaactgttgtttttgctactatgcctgttgcaatgtcatatgaagcagctcctgctattgctactcctcctctaaaaagaaccatgggcgatctacatcatatgaaaactcgcggaaaattaggaatacacaagcaagcaattgaatcaggttatgatagataaaattcttgctttgacacaaaatggcacctatactctagttcccttacctgaatgaatgactccaataggttagaagtgggtgtttaggaaaaaagaaaactcagatggcatacattacaggtacaaagctcgtcttgttgcaaagggttttcatcaataacttggctttgatttcactataacttttagcctggttgttaaacctgttactattaaacttgttcttattctagctttctctcaaggttggtccattaagaaacttgatgttaacaatgcatatctcaatggaacactcaaaaagaaaatgtatatggttcaacccccaggatttgaaatcccttctgcccctcaccttgtttgcaaactgcacaaagcctaatatgggctcaagcaaacacctcgtgcagattcgacaaacttcattaccatctcctagaacttggctttgtttcctctaagtcatatcactctataaagcacacttccaaatttggtactatggtgcttgtttatgttaatgatatcttagtcactggcagcaacacgacagttatcaccaatcttataacagctcttaacaatgaattctctctcaaagacattggtgatctacactactttcttggagttgaggtcaaataaactccttgtttacacttgtctcaagccaaatacatttgagacttgcttttaaagttcaaatgtgtgatgctaaatctgctcccacttctatgacaagtggtattcgtctctcatcatatggtagcgtgaacgagtttaagatccccagttataccaatcaattgtaagagctctttagtattttcgcatcactagacaagtgatcttattcaacgtcaataaagtttgccaattcatgcataattatctcctttcacactagttagttgagaaatgcatcataagataccttagtggcactattactcatggtttgcatctcaaaaagcctattctgttgggttttatgccctaaataaaaccccaattcaatgtaatccgtattattcaatatcaataaagaaacaaaagtatttttcattcatttgtgtaatttttggtt

SEQ ID NO: 294614 - DNA, 2019 bp, Cannabis indica
aacaaggccttagcggtcatctctctctcgaacctccaaatataattgagacccacaagcaattcagttatggcggcttcggttttctctttgtttgcgaagaatagagtctgtaatagaagaacattggttttgggtaccaagttctgttgctcaaagctcctctcattttgccactttatcatattgtgagccaagggagaaagccaagccaagattctccccaacgcctcccgccactctccggcaaggaccggatcgctcgccgagaatccaacccctctcaatcgggacctcaacgaagatcttacgctgttcggtagcatcgagtacaagtcgtccctcgcatccacacccaccaactgcggcgactttatcatcttctccatcactatgatcaagttggcgtagtggagcgctagccccgccgctcccagcgtcgtcgacggcggcggctttagcagcttcgagttcgactcaaagaacccagtattaacagtagaaatcttcttattattcggttcatcatcgtcgtcgcgcttcattaacggtccagaaacgaaatgactacacgtatcgagattggatgggctttgatgatgatcggatgggtgaactgttgcagaagcagagagactacgtggcaaagaacaaggggggtagtgtgctcctaaaccgaaaacaagcttggttctagctaaaattgtgaaaatggatctgacgagaacagaagtaacagtatcgaagcttcggctccagagggacctctctttcaagtacttcacctcttgtctttgccacaaaatcttttgctgaagatccgtaatcttctcctctagtttactactaatactactgttactcatgctaacggcgtcgttttggctcatctgcaacgctaatttcctcaaccctccttccataaccgagagatcatcgatctccctgtaaagtgcagccgttacggtaacgtaacggtccattttcttgttcttggcctccatgtctttggaagagagaacccagccgtgtgggtctcgaccggaatctgcaaaatctctgaaacattggtcgaaattccaatgattaacgtcgtcgcagcgcttgctgattcgggcgacggacttggcgagtaggcggatgttttcgacgatctctgcgcaggcgagggcgagtaggaaagcttcgtcgttggagatgatcttgcgaactccgtctagtgagattgagtcgttacgaagacgaatcatgttcttatcggaaagtagttgccatagatggatgagcttggacatgagtccagcaatctcgaatgccaaaacaccgacgtttgatgatttcttcattgctggtgatgatttattggggtgagccggtgctggcgatgatgaggatctaaccacgtcgaatttgctggatatagcggtcttgaccttgatcagccatgtctctagcgccatggttatatatatgtgtgtattatagtaaaacaaaaaccagaagaagatgaagaagattagatatagaaaatgggtattattagaagtaagagatagaaagtgaaagatgaataattgaagagttgagagaattgcagagagagagaaagagggtgagaaagataaggatgaaagagaagcgaaagatgtgaaatcgcagagtgtagagctcgtggagtgtttcaaagtgttacagaaagagtctaattagaaaaaaccacaaacctttcactcagaagttgatataaagattaaatatttatatatatgattattattattattatattattagtgtataaacacattatcaataaataaataaataaatttatgtatctttatatattaaaagtgcctatctaacggcatttcttggtttaacagaatatacttaaaaaataaaagaatattctgttaaatttaacgattacatttgatctcccgttaataaataaacccaataattaaacccaaaaaattaatcaatcttttaaatattaataatctctttttaaat

SEQ ID NO: 294615 - DNA, 3077 bp, Cannabis indica
ttccaacacttgaaggagatccaggcccaaatcttgttgttactctacgacagaaaggaacaagggttagatatctgagtggaagaagacatattatttcactgccaccaatgtaaagttttcttaactttatatgtgtttatttcttttgttttaggaattcatgtttagggttttagattataggatataatcaacatacatgttagtaaatctagatcctgataaaataactttcaacagccaaagccaaagccatagctaatggtttctgaacaaattgttgcgtcaacattgatcttgacactgttatcaattggcttgatccatcgctcagcaccattgcccacaaacaagaggttcaatgagggaatactccccactctccctcaacttttatcgacgagactgtaatgcaaccgataccacttcagcaaccgaccaccccttctgctcccaaaccgtatcatcatgagttccacaaatagctcaacaaaccatagctactgtagctactctagactgtaatatgaaaacttcatgtttgatagtgactatttagtaagaaaagtgaacaataattactataagaacacactaaaatttcaaaatagaataataatgaaaaaaataaaagctagtgattcttcagttaattgttgccccattgatcaagtatattcttttataagtggtctttgtggtctgattctttaatggaattcgatctcttgatcttcaagctcactagatttcctcaattttggacttttgtctgtctagcaattattgtaatgttgaattttagaagtaaaattgactagaccatcatcaacttttctttttctttttctttaaaaacttacctatagtcaattataaagatcacatattcttttcccatggaaccaaattattcttttcccttttggtgctagtggaactctaatgagaagtctaatagacttgaaaagatgttcttataaccagttcagtttgattcttaattataatcttttggaccacaaaataaaccttttttttctagaccaaaactcagtagaaacattattaaataaatatatctgccttccaacatcccaacatggcttcattttaaaatggagtactttgagtttgagctactgaaccaacctcatatacttctgctctttttctaatttcttatttcatttcttcttcttcttctttttctgtttacaatattttattttagtcacatgcacataaacagttattcactacaaaacatcttattttctccaatggagttgaagaaaatgatctttttcggtggtccttatttatgaattgggaatatgtaagcttgaggacaaataatgaatttatcaaaagacaattatagtgaattagaggggatatttctgattgtgactaatcaggcatcttttaatatattaataaataaatatttgatgtaggtataatggaaaacataacaaacaaaactaagcctagagcatctttcctaaatcatatatctagtaagaaaaattgtaaataatgaaaaaacataagttatatatgagaggttcgaattggcttatgaaatgattgataacctcccactcaagatttcttttgtggcaaaagaaataaaaaattgttaatataaattggatgaaataatataaagcaaagaagtaggtaagggatggaaaattctggtctttcaaccaccaaacttaccctttcatgtagcacatggcagctttgattacatatcatattcttgtcttgaatgaattgtattttaaattctaataaaaccctttaagcatgctctggtattctcttggctgctattacttgaagctccaaaataaggccaaattgcctcgataattataggtttatggtagtaggagaaactgtgccaactggcaagaattccaaaaaatagacccaatttcaagtgtcttgatttttttctttttcaaatctattattaatgttaaggtctgaatgattaaaaaaaaaatcacaataggaatgtggactcaaccaactagtagaggaaatcaatcaactaaccaacatttatgatcattaagtgtttgattataactgtcatggctgttaggtctaagagcccatcaacatgaagttgaagaagaagaagaagaaagaagaggatacctattgcccttccatattcttttttcttattattattatatgaaagagcacttgtcatattgcagaaaatagtcagtttttttttccaatgatttgctttgtaacgagtaataatttatgtgtgggacaatgaagttaatttatctacttttggtctaacaggttatgcagttaaaaagctttatttttgttttctccaaattgtagtattgtaactaagatccaaactctctttcataatattttatgcttttaactcattctgctttttctttgcattatgtaaatcaaatgttctagtgtacagtattttttcattattagcatcatctatgaaactcccaatgttattttgaactgttcaaaacgtcactattatctcagcaatctcgttttccaagtcaacatcttcactggggaaaaaaattgatggttacatttatttgaattcaacagtacagtttttcaaaaggatatattgctaccaccaatttttttaatctaatttttaaaatagctaaaatcttctcttttttatttgaataatttaggcccaactttttatattttaaagataatttttggcataaatatttaagtttaagttgtttataaatatttaactttaatttttcatgataaaaagatacttaagtcatattcttaaaacttccatagttatatagccaatagatatcaaattaaatttttattttttatttaaaaattaatttaaatataccaataaaaaaatagcacatatataataatttgacttttaaaagtcaggaacctacaaaaattatagaaatataacatatgtactagggtgattctacaatgcacccccttaaaagggatgtactgatgcatccttgacttgtttcggcatccag

SEQ ID NO: 294616 - DNA, 2997 bp, Cannabis indica
ttattaaataaaataaaaatcacctataaatttctcataaactaagaaaatagatatacatatatacttaccacctgtaaacacactcgtcttcaagcaaaaaaagataaaataaaagaactccgtcaaattgttctcaattccgtttactccgttaactgtatggtttttacttttattatcttatctttctacttactgatagtttctttcatgtgatattattctgtgtttgttgtcagttcagtagaaacgaaacgtcgtcgtttcttcacatcattataataataaattaatatattttgtcttctctcttaaataaactcttatgatagtgatagaataaaatatcttaaaaaagcaatctttccttttctagaaaagataacaagatttctgtatatcgccggaatcgaagaataggaactatcatcggcggcggaggcgacgatgggcgcgtcaaactccacggagagcgtctcgatcgaacaacgggaggcagagtccattgctgcctcttccggtgctctcccttctcttcacaccactttctccaccctcgccgatcccaattctcatgcaattcccctccagtctcttgaggtaattcaaaaccctaacttcctgatttatgattaatcgagctacgttcttagattctgctactgaattggagttatatgaatttgaacataaatatttgagtttcaacttgctgagtagtactattccataacaatgttttaaagattcgtttgagaatgccggatcataataaatgataataaattgtttttattttctaattatgaatgaaattgtttttgtcttgaggtccaatgagccaagaacttattatgttcatgaagtatttgatgaaattgtctgttgtgatatatgtaagttgttgatgatgagaaaattaaaagttctagtcattgctttcaattaatttaccgtttagattttgtttgttgataaaatatgatatttactttaagttgatttaaccattacatctatattagcacaatgctcttaccaaacaaaggataggacaataatgcaatacttaattctgtttacaaccttaatcataaaacaacaaatgtagtctaaagtatttttggttatattttcagaaagcttcagtttgacttacaaagattccatctctgaaggaccgtcaatacctgatgcttttccggatttgttggatcatttcgggtcagcaatggtagacctgttttttatgcctgaaaaagaaggagtgagctgggtagagtttgttaaaggttataacaagtgctctgctagaatgtcttcctcaatgtcactcaataacttgttgagagtattttttgcaactgcaaagaaagctggtcttcctttgaacttggagttcgaatctgatgatgcggattgtaagatcagtggttttcttctgcccactgatgtctttttgtttttttggttatgttggaccatgttatgggattctcataatttgagatcttcaaaagcaaaagcaattctatgccttcctgatatcaatcatctggtgaaatcagttctaacatcttcttctgaagttagtagcagtttgaacatatgggattgcgaccttttgggcctggaagttcaacttcctgttggaaattttattagttggatcttgtcaactttatcaagcctccctgattgcttttcacaatttgtccatgcaagaattctgagctccgtcactcaagaggtatagcattttttgtattcaattgaagctgcatgcaggatcttgtacatactgatttatgatattttgttttttgttttgtctacttttgttgtctcgtattctgatgatgcttttccctgaaattttatgttggccaccatagataggtttctaattgcttaatctttgtaattgcagcaggataattcagaatcctcacaatcatcagaattaggagagacatccacatccaatgtatgtgtttctcatcttttagcacgtggaatagcatgggcaatatcccttaccatgagaaacacaataagtgaagaattatctagaatatgttttttaagcaacatggaggcagagggagcagatgaaaaccttctttataggtttgtcattttcgcttcagaagttttttttcttgtttgggctatattgggcagtgggcacttgcaatgttttccaacattggtgatgccatgttttaaaatgttgctgattctgttgttcctgtttttaacttataatttacttggtaggtcatctcttcatggaagagggctgaatcgcctctggtctaatgttgaaggttatcaaggtcctttgattatgttgatatcttctcatttgggaggtgcctctgagggtaatgataccgaaaagaaatgcattataggtgtacttacacatcagggatttgaaaataaggatacgttttatggaagttcaggaagcatatatgctatacaaccggtcttccacgcctactcatctactggtatgttatcagatgacaagagttgctgtttttgccaattcaaaatgttatgaactaaataaaatgtatatataacaggtaaggagaagaactttgtctatagccacttacatgctactggatatgaaccacatccaaagcctgtgggtattgggtttggaggaacagctggaaacgagagaattttcatcgatgaagattttgctcgaatcactgttcgccatcatgcagttgacaagacttatcaacatggctccctcttcccagaacaggtatataataacattcctaacgctgagttgattttgaatgttgttaacaagatcagattaatgttttaacataattgcaacaatttcagggtttcctaccgttcgaagctccgatttccgaagtggaagttttggggacttggtggaggcagaattaggaaagaaaagataagttgaaaagagagaggagcttttcactgagc

SEQ ID NO: 294617 - DNA, 4982 bp, Cannabis indica
aaataaaatacattcaaaatcttaaaaagaccaaaatcttaaataaaactagcaatacgtggctcggcatgtacattcacctagtatatatatatatatatatttatatatatactttaatttgataggatgtaattttgtttaatttgggaccgattatctgcaatgtaattgcgttaatatacaacatcgttacacaaattaatattacgtaaataatttaatatattgcaatgtaaataaatatatatatatgtatattatattgagaaaaaaaatattaaatcgttatgtttaaaataaaaaagaaaaatgaggaaataaatattaggaaacgaatttagactggtgaagtctagctccatgtattgtgttaataagagcattgttatttgacactagtagtgcttatacctggcaactggttagtgataattatatgggactcgatatttaattccaccagtagtaatattaacatgcaaaaaagtgctaggtgtcttttattatttctttgctaatgaagaggccagggtgtgctagtatctttagaaaacattaattaatgatcaagttttgttttattattttttaaaaaagtaactcataagtacgagtagcaaaataggtttcgagacggcacacgaacacgaacacgacaccaaagaaaattgtctgtgaaggctcataccccaaggttgtgggtccgtagatggttggagttgtgtattggggtctaggaggtaatatagatggaaccaagagttgtagtgtggaactgttgacactgattgaatgtgttagagccactctaaaaactcgagtataagcctcttcctaaaatcttgggcccttgtcaaaaagtctaacaaagtgtcaggcctttgtctttgcatttcgttccaaaacagggatcctgccgaaatctccgattgaacggccactagcttcatgtcatcattaactttcgtcttggttgttgcctccattatctgttggatataagctttgaggctctccccaacttgttgcttgatgttggttagttagctgacctccatatcaaagtccttcacgactacaaattgcttccaaaatatggactgcagatccttccagtttcggataaagtcggacagcaatcttttccaccaatccttgatatatttggacaaggtcaatgagaaacatagatatttcccatcttcactgacttgtgctactcacattagcctaatgtactttcataggtgggcattggggtccatttttccttcgtacagctccatttgcatcaaaaaatttctcgtagttgtgcctcaatgattctctttagaatctagatcctcatcttctgattcagatatgacaccactttatttctgaaccaaacgatcggtgagttttgttaatgtggctatttggtcctctagtcgcctggtataaggccttgctttctattgttgatatcatttctgaaatcgcctccgcgaggccttgctttcttgcccttcactctttctcatcttgcattcaggcgatccctaaggtccgccactaacatgatgtcttctgggtctagatcttccacatggatgctttggttaacataattgttggggcattttttccaccctctaacattgagcctttgaacctgagtaccaggcccattgttccacacaactctgccccacagattgattggttgacctagccgtgggccttgggtgtccacttctttgtgttgaggttggtcaactgtgtttctgttgttccatataacattgttcatgggtcttcacggagggacacctattacacctttcccattgtcatttgctggggccaagagcccaactccaagatggttaaatttcttagtaggagggtttttttcgggaaggttagcttgagcttgtagccgtaccagagtttcttgcatctggtgtgaggcttcttcctgctctgctaacctcctttgggtatctgtaagctcctgctggagtcctattacctcaggatcctactcgtagtattcttcttcatactcttagttatggttttaggcgtggtcatcttcttgaccttcctgctcatcctcatcaatgggactgtccaaaactttctttaagcaatgttggtcttcttggtgcggatggtttcccacctccgatgtttccatgtccctcgcgacacccacctgagcatctgtcgggggagctggttctccccatcattggcgacatcatccctaccatcttgagcaggcggcttgaccactgcctttcaagttaaatcattgttgtagatgacaactatggtaaatctttctttagctcttaatgaaagcaccaaatatttaccgagattttttgaaactggttataaaataattatgcttaagaaagaaataatttaaagaataaaaccaagattttacgtggtttatgcgttaatgagcactagtcaacgagtcaatattgttgagttgaaaagcttcaaagtatctttacacaaatattttttcccaagaagatgaaccctaattctttgcccttttctcagaattgattttctaacctttttcgtgaagggatactgttctatttatagaatagaactggatatggatgaacccaacccgatagaatttaaaggtgtcaagtaggcccactgatagggtaaaatataatatatattaactttaggaaaattaggtgaggcacaatttacgagataatcattcgtccttatgagtggggaccaattatgatgttaatgtcgcgagctattgtgatgctactgagaatgtcagagaatatagcattggacaaaacggtggttgctttaggtggtacacactttccttgggcctaatgtaggggacaaacccctgacgtggtgggaccccgtgtctgtaggatgccacctaggatgatatccgaaggcttccaaatgtctcttcaatttcccgtatctagattgtcccatgagggcatccagatagatcttgatggacccttcaccttctgggccaaacaacatttctcggaccgtagtggtctaaacttgtcgcgtctttaagttgaccttacatttggattcggagccgtagcttgactccgtaattgggtcgtcttgctaacttaattgggctcaggattgggtctgttttgattgattttagattttggaaacgcacatgtcatctattcagaaatacagataatatatagttaattatgacactttttgagtctaattgataaatatatctaaattgtattttttttgttcgataattatttatagttattaaacttaaaaattgtatttaaatagtttagaatcagtggcaaaattggaaaaagataaattattttatttaactgaaataaaatgacaaaaattaaagcatgggcctacactatgtgtttcggccatgatagggttttttagctcatttgtcttttattttagctcatctcatctaaacataaccctagtgtgagtctatataagaaatatgatgagagccttgtcctataactcattctaacctaagacaactactcaaagaggctctttcctaagccaatttcgaaatctcaatgattgaatagaaggagttgctttattttgctaaaataaattagatcgatcttgataaaataagatccaacacggtaagccttggtcgaaagaagaaatgtggcggcagctttaaaggtttaaagaaaaaccctagcaaagccatatcattagtccatctctatagtggagttgttatcccttgtaccaatataatattgtacttgaactgtttttacgtgtttgttttgtattttgataatttcttcatccctttatataattttataatatatgctatctttggaagcttatttactcttttaattataaaaaaatcacaaccattacttaaaaaaaatataatgattaaactagattgtatatataataacggtcaagattcaaatctcattaagaatattttttttaagtttacttttgtctttaacaaaaaaaaaaaaactaacgcattcctcactttaaattttgcgatcgtcgccactgacaacacctaatatagaatatatattacaaaattagggctcgtttaatacgctgtattgtattatattgtattgtgctgtgttgtattgtattaatattctttaatacaatattatgtttggcattgacttgtattaatagattgtataaagttataatatattttcaatagactcgaccccaacaccaactacgggtccgggtcccggatctaggtttgggtccgggtctgagtccagggtccaagtctagggtccgggtctgggtcccgggtcccgagttcgggtccggatttgggtttgggtctcgggtcccgagtccgggtcctaggtccgggtctcgggttcgggtcctgtgtctaggtctcaggtttgggtctcgggttcgagtcctgggtctgggtctcaggtctgggtcccgagtttgggttcaagttcgggtccgagtttgggtaagagattggtgttgactctgaatcctttgtaaatattataatacaagataatacggatcatttgttatgtattaaataatacaacatacattgtattaaaattttagtcgtaatagttaataaaatacattgttttattcaaacatagtgttatttattatttattactatacgatctttatacggcgtaccaaacaagcgattaatgtacaaattttatcagtgatgctgatgatctagtcacaatacgtaaaaagaaaaagaaagaaataggtgtggatattttgtgagcttatcatctccactcatatgattgcttagcaaatgttttaatctattttttgacgataatgtcgtcttaatagaagctgaaaattttgactgtacgattgcctttcaactatttttttattattgggaaaaaaaa

SEQ ID NO: 294618 - DNA, 2471 bp, Cannabis indica
tttatactttaaaatatttttctttttgtattttttacggaattccacataaaacccatattgcaactaacggagcaacctaaatcgtaaccaaaatctatatagcacctcacataaaaaccaccggagaaacccaaactgtatatttgaaaaaaaaaagtttaaaatattatatgtggtaatttccctttattattaattaaaagaatttttaatatatcgtgtcttgttttttgggtttgtcatatatcgtgttttttgggctaatctattcgtgcttacatgtcgcgcattttgtgcttctcgtaccgtatcgtgtttaaagacatatttttcgtgtcgtgtccttcttaattaaggacatatttttagtgtcgtgtcttgtcatgccaatctgtaacatcgatcgtatcgtgtcgtactcaaacccgtattttttttttttgcctaatcgtgctcgtgccttctgagttcatgccggtttcatactgtatcaaaagcccgacccgtatttatatcactacttatgaccacataaacaaattgtttttaaaaaacaatagtaaaatgtaattgaatcggaatatttgcagctatttttaagttagaggaaatttttgcaaccaaacaaaatatatatacaaaactctttaagagtcatattttgggaaaaaaaaacttatttattctatattatttatatattttttaaaaaaattatattaataagatcctaataactttttctagttcaatgaatacgctaacagaatcataagagtagtttaacaacttcttccattaaagtactagccaactttttctctaattattctcaattttctaggtgaaagaaaggaaagaaaaaaaaaaaacaaacaaataaactacgttgaggctttgcttttaattataaatttatttcctacaatttgatcttttttttcccaaaggatcatttataattaatttgaatttctttaaacaaattactgtttgaaaaagaagagagaccatatgaaaaggagtagcaataatatatagttgtacttaattttatttaactgaagaaaaaaagaaatcaagaccaaccatacaaaaactatctaataattctcaaataaagtggttctgatcatttccttcaaaacaatttacatctaacaagttttttttttttcttgcaataaggagaaataaatagtaattgagttttgtccaaaagaaaaattagtaattgagttgtagagttgctgaaaggtctttttcaaaaacgaattttcaagtttggtatagtaaccgaatgagttacttgactagttactaatggagatcaacattgttgtcatgttatggatcatatattgcatctcaccaaactaagttaccagttgtggtcctattagtgggaagtgaataagtactaaaatatgtatacaatgtatgtactaaaatattacataaataaataaataaatgtaccaaaacagtaatgtgacactgcttttgatcagtacgttttatttgaagatcaaaaataaatgtgtgattattgtatgtaatattttggtagacttatcataaattctaattcttatttgaagagacatactttggaaaagcattgttaaaaataataagagggtatatagtttaagtaatcaggtacattggcaggctccacctcttccattatttacaagctacgagcagttgactttagttataggtggacccttagtagttgagacttaagaaattaataataataataataataataataataataataataataataatatgtaaaaatttgttcaaaataatagcagaaatcaaataaattttctaaggtgggagtaggattctttcttctctgcgatgaagaagaagaaaatggatttgaatctgctttgttaccgagatgattcaaaatggagatctgcttgagcgttctcacccacagccggtgttgagttgaagtgggtcataggtaaaaaaaatatttgggtctttactataaagataaatggtatttttaaaatgtatttttttatttgggcccctaaaatgggtaaatcctaggcgtgggcctagcccgcctatgcctagggccagcctgttctcacccttcgatgcttacggatttgaatctggatactgcagtggaagatgagggttctcaagaggggcagagccagaatgaaaaattaaaaaggtcaaattgtattatatttaaatgataaatatttcaaaatatatattattaaattcatgattaaaataaaaataaaaaacgtctttcttgcatattacgaaagtcatctataagtgagtttacactaaatttttcaataattcattttcgagtaatttaaggcacaaatacttaagtttaattgtcagttacagattaatacctaagtttaatttttgacagtaataatatctaagttatatttttaaaa

SEQ ID NO: 294619 - DNA, 6215 bp, Cannabis indica
tctttttttctttttcttcttttgatgttttttcttttaagtcaataacaaggatctatgagttgaaatcaataagtgagattcttcaacaacctttgattttacgcctattcagatgtggctagttttttcacgctactcttcaatagtaattcatcacgcttatactgatgaattggatttatgcttgaatgtaaaaatgcataagcaataacctattgtgcctcgacactggtctatctcactgctagcagatagcttcaacaaacaaaattcaaagcatctcattcgagttactaatagactaatagtgggggtaagagcagccaagctgaggcaatctcttggccaacttttcaatattctacatgcatggcaagtgtctgacaccaataggcattgggagcattcgcaatcgacaacagaagaacgacctgatcttcaccaaggctcaactcaccaacatgatggtggaaaaggtgatggttgatgatagaacatcatcacatatcctaattgaataggccctaaagagaatgggttagcccttgaatgatatagagcaatgcaatcaactcgtgtatgctttaagtgaagccgacatcgttccctatggtaaaatcaaattaccactaatagtcgaaattgtcttacgactaaacaacactgcgactaccttcatagtggttgacaacaagtctccaaacaatgtaatgatcggaaggtcaactagtgataactagatcgaagatcgatcttacagaagatggtctttccttgtaattgatcaatcgggtcatctatccttggcaaatgatacttgttctttactgtcaatttattcatttctcgatagtcaatacatcctaaatgttccgtccttcttctttacaaaaaaatcatcgcaccccaaggtgaggtactcggtctaatgaatttcaaatccaacataccctgtaactgaaccttcaactctttcagctctacaagtgccatctgatacgaagctttagatacaggttccgcccccggaatcaaagtcaatctcctacctcagtagttcctctagaaagacatctagaaactctcgaaccactggaacgtgtttaggtcccattggtacttctcttgtggtatccaccacattggctagaaaactgacacatccatcccactacaaatctcttgccttcagcatcgagattattggaattcaggatccttgaacccttcccacaaacacaaatgagtcctcaccctcatgttcaaaagtcaccatctttcttttacaatcaatggtcgtgttacactttgctagccagtccatacccagtataatatcaaaattttctagatttagttcaattaaatcgaccaaaaattctcttccctccacatacactggagggacctaaccaacctgctagagataaccaattctccagtaggtagtaaggtaccaaaaccactcggtaaaacatcactaggtttatgtagatttccagtcactctacctgacatataggaatgtgtggcaccagaataaattaaaacagtcaacatagtaccatcaatagaaatctaacttttcacggtagaaggaccagcatcggcctctgcctgggtcaaagcaaacactcgagcaagaactagagtgtcatctttcttttgtttttgtctcttcaatgattgggcaatttcttttcaaatgcccactaccctacactggaaacaggcttgatcttgacattcgccctgatggtgtctgttgcatctcgagcactttggataagttctctagttttcatttccccctcgttaaaaaccttgattaccttggaatctcttttcagtacctgtagctggtggatcgttaggtcgtttcctgcggtcattagggtcaacacccttactaggacccccattagatgtttgtttccacgaatctcttctcatactattccttttctgaatttgatcttcatcatcctcagcagcaaggactagctcaaccaccaaagcataagtttggacaacccccagttgtttagcagccacaattacatcccaagcaatatgttcttccaatccctgaatgaacttggcatgtctagcagcctcagtggccacttcatcagaggaaaactttgccaaccgatccaattgagtggcatattctgtcattttcatactaccttaggttaaccgtagtcactcttccaccttagcaactcatatggattcgtaatagtattttttataaaacaaggttcggaaggcatcccaactcatgttattcagatcatgacccttagatacgatttcccaccaaatgcgagcaccctcacacaacatgtagatagcatatcgaacccgatcattactctcaactctcatgaagtcaaaatggatgttatcatgctcatccattcctccgccttaagtggatccgcaccacctttgaacaccagcaaattctgcttcttgaactgctcatacaacgactctagatgattttccacatcctgtggcactactagaggtgctggagggttaggattgggattaagaacaggctaagcttgctgctctctcagctctctaatctaatcaccctgttatcggatagtctcttgcattgtggcatacttatgttcccagtattgtggtaatggaggattcacaccctcactgccaaccctgagcccggaaagcttgcggttaactctaccagatcggctcgggtgcatatcgaatacaccaacgatcacaacttttcaacttttagaatcttccaaatcaaaaatcaatgctaataagaatttccatacgtacatatacatagcagcagtatctaaaacctatgatgtttttctaataggtagctcattcaagtaagtagataattcaaataattaactagtaatctaataatcacctgacaattagcacttactataaaatgagtcgaatgagtcttcgcagccaacgtacatatcaaaccagtctttaggatctttaaaccttggtttctctgataccatgttgtaatgccctgatccgtaagggtgccatgtgtgtacttttataaattaatttataattataaattaaaaatttaagaaaagtgcagtttaattaaaatttttagttaaatttaaacttatcttttcattcaaaatactgctagattcggggattcccttatttataaactttaacaacatgttaggaaacggttgttacaaaatggggttacattttcaaaacacgatcaaaaggtggatcttgtccattgaaagccaagacacaatggttgatatgtacatcactgggagacctctaactcatggctggtccagttttcccttccctttacctacaccttgaagcacccgcaagtcacaaagactcagcaagaaaagcaagaaaactcagacattgcttatagcataatttcataacaatgcacaacttataaatgcttcacacagtatagacaattactcaatacataatccacatcatataattaattacttgtcttataagactaatcgaccttgatgcctcctaaagtatccttaccactcgttaccaacgagctttatatgtcactatcgttgcctaattaagcaactgataagtagttagcctatcagcagtttcaaagtgagtagtaactcattctcaataacggtaattaccgtatctttatctcaattataatcgagtcacaaacaataataatcattcctcacttgacatgtttaagcagtgcaattggatttttcttacctcaattcaaaaattaggtgtgcacgctgacctaagtggaacactgctcgacgatcacaggtcctatgtcatgacaatataaattggtaagcaacttaatcaaattccaaaataaaccctaatttcacaaccggacaaaccctaatccccattaacttagaaatagcttaaacattaataaaataccctaaactaggttctggaaaaacaccccgagcagaaaccagtttcaaagaaaaataggggtttccccctgctggccaaccggttgagtggttcctcagtgacctgtagaatcggtcgaccggttcttgtagaatgggaataacctggtttttcacttcaaaaccaaaccaaaacttcttcaatcctgctcaaacttttcagaacacttctaaaacataataataatgtactcaagtattcaatactcagtaacaccttaaaatatcaaaattattgagtgaaaattgagttcttaaacttaattctcctaattctagacctagcagccaaggagatgatcaattcacacacaagcaaatcttaaattaattttagaaacatattttgaactcaattttatactacagccccaaaaccacaaaaaccctaaccaaaactcaacctaaaccttaaaattcaatgagacaaagagcgagaacttgcctccaagcttgaaaagtacctagtgttagctaattcagcttagaattagttgattgtgaagaaaaatgctttgattcatgctggctcctagggcttcaaaggaaagtgagagaaatgaaaattgtatgttttctttattattttctaggttactaacttaattatctaaccaattaataatgaaactaaaggaaataaacttaattctcaactagtaatttctagcccttgacgtaaaacaaaataataaaatttagtaagagacaattttacccctcttaaaacataaaaaataatccataacccaagggtattttggtcatttcaaattattccaactaatctgacaactcaactttctaaactagtctagtataattccaatatatctcatcattaatcgtcgtgacatctctgaataatccattgagtttctacggttcccaaattcgaaaatattttatttaaaaaatagtatatacaatacccacataatctcctaaaatctctgtaattaataaattacgctttatttaatcattcattcaatattttactaattaactcataattagctgtagtaagatcattatcctactctaatgcccatatgattacatatttttataaaatatgtccaattaaatattattatttttctggggtattacaccaatcaaatatatctctcgtgatgttatattccatgaaaatgtcttttcttttctttcaaccacatctccctcgaagattgacaactgcttctctcaagcaatactccccaatcaaaaactagtaacacaagcatcttgtcaacaagtaccaaagtccaacacacaaaatccttccacttacctggccaatccccctcaggccaccagaacaggtcaaatagtaacaaaactagcatatttacaagattatgtgtatcatgtgacttccattgcacacccaatagagccctttttatcctatatcaaactgcatcctcagtttagagctgttattctagcagtttattctcacactaaaccacaaaactatgctgagacctcacagttaaaatattagcttcaagccatggataattaaacttaagctttaaaataaataagacttggattatgactaaattaccccaggaaaaaaagccattggatgcaaatgagtttacaaagtgaagtataacaaagctggagaagttaatcgattcgaggctcgtctggtagccagaggttacaaccaaaggcaaggaatcgatttctcataaacctatgcacctgctgtaaaatttaacactttaaaaaatattcttgctttggctgctataaataattggaacattcactaattagacataaataatacctttcttcacggggacctcatgaggaagtctacatgaatatattgcctagatacaaggctcccctaaatacaatttgcaaattaaataaaagcatttatggcctcaaataggcctcacgacaatggtacaccaaatttagtcacacgttacccgaggttggcttcacccagtccatctcaaataattcattgttcaaaaaatgtactgtatccatcttcttggctatcccaatttatgttgatgacataattgttgctagcaataataaatcaacgatctcttacttcaaatagtatctggatattaaattcaaacttaaatatcttagtgtaatgaccgctttagtagtttggattagtaaagacaattagcactaatt

SEQ ID NO: 294620 - DNA, 2220 bp, Cannabis indica
tagacataccgcaacagcaaggcgatcagagtattcagattgagtcgcgaagagccgcatcttgagaaaccaaacagaaaatttgaacttagtatcaagtgaattatgaattccatcaatgattgaaatgaaagctgatctaattttagaaattcataaatacctggatgtagataaaggcgcccgcggcaattaagaggaggaaccgaaaatcacagaaaaatttagccatttgagagatttggatcttaggaaactaagaaggaggggtatgtatcatatattcatatacaacaatgtctcagaaatgggatttacgtatggttttaggtcataggccgtcgtcttcgtcttcgtcttcgtcttcctcccgcgtttactactgacagcttctctctctatgttgaactcttctcagttgctaacttgcgccattttttcctttgagaaaatttagaccaaaaaaaaattaacatcaaattatttttatagaattagtataaatagttaagtttaactattaattataaataaatatttaatttttgataataataatacttaaattataattttagaacttacttagtaataaatgttcagctattatctacttattatttttttattagtatatttaaattaaattttgaacaaatcgagctaagctacatatttgaacggcacttttcttttgcattttgaactttcttaattaattctatcctgattggtataaggagttattggatgagtgtattcatgctttcgcaaaaaatatataaagagattatcatatttgcagaagatgtatttgacttcgtgggactgtgtgtaagccgaaattgtttaggggtattggctttcgtgatggatccaaatgtaataaagcggttattgcaaaatatctttggacagtatttttaaagcaatattgtttatggttcaaatgggtacattgcaaaccacttaaggttagctcaagtgaccataggtggtgtgtgtgtcttggaggtcctgggttcgagttccaggtaaaacataattgtaatatataaacgcttaaatcaaaaaaaattggtacattgcatatacttgaaggatcaaaatgtgtagattcatgagcttaagcaagatgtgagttggtattgaaaaaagctcatgagtcttaggaagactttctcctagaatgaatgagatccaagccacttgtgttgggaacaaatccaaagtgtgtaaaatgcataaacacttcttacaaaatgatgatcgtgttgcttatgtgggtgtcgtgtggtgctctcattccgcccaaagcatcaattcattatttggcaagctttaaatagtcaccttttgaggaaagacaagctcattatgagacaaatgagaactgattcccctttttgtcttgtttgtgagttagaactcgagagttattctcatctcttcttctcatgctcattcttatggagagttatgcacctcattgcacaatagctaggaagcagttgttggccaaatgtctaggattggattgagtagttgaattgtaagatgtcgaagaacttattgcacaatgtactttatacagcaattatatggtgaaataggaacctatgtatgtttgaagataaatgtttggctcatcaatattgatcctcttgtcaaatagagcattaagactagagtattatttgttaaggttttcaaactgtataaaatggaaaaattgattttagaatttgtaacaatgatgttgtttttaaggggtatgccccagatttgataaaaaattaagaagaaaaaaagtaaaattacaataacataatgttttttcaaatctgatttatacaaataccttttaattacataacatctctctttcttccatttttatttttcaaacataatttctctctcttctttttatttttaaaacatattatcatcattgcttagacttaagaataagtaatatcgtaattactaattagcttttaaaaatagttattttaaaatttattaaacatatattttctcgctttcatttaaatcaaagcaactaaaattatttagtcgcttatcaaattctcattagttatatttagagatagaaattgggccgctaatgtacggggaatgcaatccctgtccccattcccgctacctatttataccctcatccccgccccatccccgtctaataactaacggatt

SEQ ID NO: 294621 - DNA, 8991 bp, Cannabis indica
caaaataacttatacatcatctgggtatcttcttcttctctgattttgatctccagacttattatattattatactgtggaacttctagtagtgtttggagggagagaatgaggatcgagccggagattgatggagtatcggcttccaggaatcatttggtttttgcttactatgtcacgtatggcacaggccatggctttggtcatgccactctcgtgtgagttgaggtctggtttttttttttttttttgagatttggtggttgattatggatggtgtgactgatcatggatcatggcggatggacaggtggttcgacatctgattatggctgggcatgacgtgcatgtggtaactggtgctcctgaatttgtttttacttctgaagttcaatcacctcgcctattccttcgcaaggtttaaactcctcactttcaattcaatgtgtcttctcttctatatctctaatgattccagttatatttgattatagttttgtaaaattaaattaggtgctgttagattgtggagcggttcaggcagatgcattgactgtggatcgtcttgcttccttggaaaaggtttttcttttttctttttgtcaattgtaaaattaatgaaaagcttttgaattgtgaaaacccatttgtcattgtttttcaatttgggtgtttttttttcagtattcacaaacagctgtggcacctcgggcttccattttggcaacagaagtggagtggcttaattctattaaagctgacttagtggtaatacctacttttcttttcattccttttctcaaattctcacacattacaaaatagtgataattaatttaattgtgctgatgcatgtatatgtatttgtaggtctccgatgttgttccagttgcatgtcgtgcagcagctgatgccggaattcgctctgtttgtgtcaccaactttaggtatatgatttcttttatcgtttgtagcaataatttcactatatagcatattgattttcttccttgttcttggggtaatggaaagtcattttcttttttaaggttccctggttatgtatgcaatttttacttagtgtgatctcactgcgactttgttagccttcttgatttttaatttaacatcaatgaatctaaaagctatatttctttcaagtcattattggcttatgaaaagtacttcttcgttatatgatagaaatggcatttattaataattataagtgttttcatttatctaatttcttaatttgcactatcacagttgggacttcatctatgcagagtatgtcatggctgctggacatcatcatcggtcaattgtttggcaggtaagttttacttgctatatctaaatacagtagttttctcctcttaattggcgattatcctcttaattagtgttgccttcactcatttgggtttttgagtgttatttgttggtgtcctccagcacttgataaacttgtctctcttaaaatgtgatacagatagcagaagattattctcactgtgaatttttgatccgcctgcctggatactgcccaagtaggtttatatgacatatttgctagattgtgggatcacttgttacactatgttttgtttttatatgtatgtttcccaaattattaactaatttttctttgattttctacttataattacagtgcctgcttttcgggatgttattgatgttccccttgttgttagaagattgcacaaatcccgcaaggaggtctgcagctcacagttttctgtaaacaacattagtttcttaattaattcatgatctcattatagtttcttctttaggtgaggaaggaactagggattgaggaggatgtgaagctagctattctgaactttggtgggcaggttagcttaattttcttatatttattggaaatttgacttcccaggcagctgaggataatgagttacatatttattgtaatcaatcattaggcttttcctgagattgcatatcaaaagtgatcgcatccagtttattctgatcacacgttgtgtcttttctattttgcagccagcaggctggaagttgaaggaggaatttttaccttctggttggctgtgcctggtaattcttctatcttattctataaaatttttccttaaaagtatgcaccacatgagcaaacccctttcgtacactttttgttgttgcttttattaagttattttggtgtattaggtctgtggtgcatctgacactcaggagcttcctccaaattttataaagctagcaaaagatgcgtatacacctgatcttatggcagcatctgactgtatgattggtatgtattaaacttgtcaatgcaagctggattttgttgatacagaatgaattgaatatatcatttgtagggaaaattggctatggtactgtgagcgaggccctggcatacaagctaccttttgtttttgttcgccgagattatttcaacgaagagcctttcttaagaattatgcttgaggtatatttaatttattaattacttttgctccttatcattttaaacctgtaattaagagaacctgatgttttcagtgctccttctggtttactctcatctttttctcttttttcttaaaaattcttgccaagaatttgatgagttttggtgcaataattatttgaacagtatcatcaaggaggtgtcgagatgattagaagggatttacttactggccattgggcaccttatcttgaacgtgcaattactttgagaccatgctatgaagcaggcatcaatggtggtgaggtatcctcttcacttttggacttctctgattccttatgtttaaattatgtgtcatcacggtaatcatatatactttagggaaaatacaacaggtctaacaattttagtttggtatttgatcacttagtaattagcgccaatggtatgatgattcttcatggattaactttaatgtttaggaggaagggatttgagaaaacttccattttgaaagcagatttgtaatttcaaagctcaaatccctgaattgttgaaattgtcaaatgattgtaaagtatgtcactttttaataattatgaaatgtgtgttggtttgaatattagaatctgattgtctaagttttttttccttttttttttcaaaatgtgtactcctgtctaaattggtggtttgttgagagtcttggtaactctggtttcttgcaaggcatactataggttcatgattattgggtaggcctaggctttcacattgaaggttgtgtcaagcttgctagatatatgttcatttcttaacagattatcttattattattattaacagaaaaaaaaatcatattttatctacaatgtcattggcagtgcataaagttcagggaaaagatatttattgttgcattatgtgcccttattacttgtctaaagaagtttttaaatcacaggtggcagctcacatattgcaggagacagcttttggtaaaaactatgcgtcggataaggtaaacgatgattttttttccctcttacaattaacttaaacagaaaaaatctccgttggagcaactcaggtcactagatgtgctcagtattacagtttaaaatctcaagaaactaaaatggtataaattatgccaaaacaaatagaggatttgtatttgaaaggaaactatgcagactgaatatgtaatgagaagaaatcgggtacaaaacaaagcttacatttttcgtgaaacccatattatgaaagtaaaagttctgctaatgaggaaggacgatttacatcgaaacttttgttctgctcaattgaaatgtagcttagtggagctagaaggttgcgtgatgccatcattcttgggtatcaactacaaagggttgttgggcgagatatctgcattccagattggtattcaaatgctgaaagtgagcttggtcttggaagtggatcaccctctttccaaatgagcgagcaaagctccttaatgaactcgtgagatttaaatttttattgcagttttattctggtaagaaaacaagtgctattgcaatttgttttgctttacatcattcaacttctgttttcagattcacagaggacttcgagattctccatggagatacgcaaggtcttccagacacattaacttttttaaagagcttggcagaattggatgctgtttatgatttggggaaaaattctgagaagcgccagatccgggagcgtaaggctgctgctggactttttaattgggaggtctaactatctaaactaaaatttcataagttatttctttctagtctttgcattgtgcttttcaataaataagattatgttcttgtttattacatgaaagtatgcataatagttccataccatcacatcttataattgcaatgaacaattgactggttatttcttaaagttttcggtacacaatggcattgatatgcaattgacttaattagattttggtgtttttcatggcaacattgtttttagaacttcacatgggaattatgccttaggaatggttttcattttattctcaactatcagacaaatttggattagttacagcagacacatattacttatccacaaaaattgaacagatgaaaaactttactatgataagatatcatgtgctatagtgcttgaacatgtttgtttgcacttttatgaatagaaagtcatgtatataattttctagaatcagtattgaaacttttaaaatgtgtgcatgtttcaatattgattctaaatttcatcttcggtgctactgggcagactgggttggaacaaatataaatccaattaggattctttagcttctaatgtacaagtttttccgttactaactttatattacacataatatttggattacaggaagaaatttttgtgaccagagcacctgggagattagatgtaatgggagggattgctgactattcgggaagccttgtattacaggtactgcatctctcactatatttcttagcgaacaaccttaataccctgatctccctccagtggtcattatgctcctgctttttctgaatttgtacctcatttctgtcaacagatgccaattagagaagcctgtcatgttgctatccaaagggttcatccaagtaaacatagactttggaaacatgcacaggcccgacaacaagctgaaggacatttgacacctgtcttgcaaattgtaagttcaagttgattttctcttctattttttttttctgtaaaagtaatagacatagtagaatggattgaatatattaaatttataatgtaagcttgttatactgtggttagagtatattgaaatgaatcgtgtatttagagatcaaaacagaaaagttgtattagatgcatcaatatttcatttttttaattaacaatttttttttgttattttggtaggtgtcatatggttcagaactgagcaatcgtggcccaacctttgacatggatctatctgattttatggatggagaaaagccgatatcatatgagaaggcaaataaattctttgctaaggatccttcccaaaagtataccaatcttctttgttgaatatgcctgtctgtatcttttcctgaatatcctacttacatggtctgtgtgctcttaggtgggcagcttatgttgcaggtgctattctggttttaatgacagaattaggtgttcgttttgaggatggtttaagtattctggtatgtgtttcttatcatcacttttaatttttcattattgtggtaaatcaacgttctcattcattggagttcattgttgtaggtttttagtacccagggttctatgcaactggttatgtcaactgcatttttttaaagccagttcgaatatttaaattttgtgtacaggtagcttctactgtccctgaaggaaaaggagtatcttcttctgcttctattgaggtcgcgaccatgtctgccatagctgcttctcatggtaactttgttattttgcattttccaacttcatagtgttgttgtattatatcagttgttagctatacagaatgtattcttagtttatgcttgtttcttatgaaaatgacagtagtcagtctttgatgagttctactataaggaattaaaaccaattttttagtaaaaaactttatcttattcaaaaaggtcatgggtgccagtgatattaaaaatgtaaaggtttgaactactttatttaaaaattagtgcattgcaaatgtgctgcttttacagtgagacatacttctctagtctatatagttaggtattgaaagcactatctttaactcgcattggtgctctgtttaatcagatgattaactgaaaccaaaaaaagatcaggatggaggaacgtaggtgaggtggcatgttagtctggagattctgatttttttcttgctcggtagaaattctaaaaaatagtaaaattcgtatttactattttgacaaatgtcagtttccattgtacctccaagttatcaaataaatattagctgtcacatttaactctattcactgtaaatttcattgaaaccatggatcacgaagaatgcttgagtataagtaacataatgctgctttcttttgtgttcttagagcttcgtattattgtagaaattggagtagaatgctttttcctcattttcggcataaactactaattgtcgaaatagactattttgcgtagacaaattatttaagccgactgctctacgttgcaggattaactattaagccaagagatcttgctttgctttgccaaaaggtatgactttaaaagatgttatctccaatacttattccccgatttctattgagatgtatcgaatttcagtctcttatctacttatcagtttgacaattattttcaaattggtgattaggtggagaatcatattgttggagctccatgtggtgttatggaccagatgacttcagcttgtggtgaagccaataaacttcttgcaatggtgtgccaggtactcattgatgagaacaactttgcgttgctgctattgttacctagattagatgataattgttaaatttacttgtcattttcagcctgctgaggtaattgggcttgttgaaattcctggccacatacgattttggggagttgattcaggaataagacacaggtagaaaggcttcgttattctcgttttgctatatgttggtgcattgtagcttgtgtatgttggtgtgtcatctatgattgttgctttatgtcgtggatgggttttctgaactaacgactttactgggtcaagaaagcaattaaataaattcatatgaatttgaacagttgaattactttatctctttttattggtgcacagtgcactattcttattcttatcaaaatagtgtatgcttcctgaactcacaaataaagagggttttatgtttatttttctcctttgtagcgttggaggtgctgactatggatccgtcaggataggcacctttatgggtcgaaaaataattaagtccatagcatcttctattctgtctcgatcactgcctgatgcaaccggattcaacctcgatgagttgggtgatgatggtattgaactgctaaaagcagaagcatcgttagattatttatgcaacctgtcacctcataggtaaacttttatatatagctttttctttttcttttgtgaaaggcaaattaacaaacatccaaactgctgagtcatgcaatgcaattaatttggttatcatactcagaatgaatttgtcttatttcataaaatttttggtgtacagatatgaggccgtttatgttaagatgcttcccgagttcatgcttggtgagacatttgaggaaaaatatgctaaccacaacgatccagtcacagtaattgatccaaagcgtaattatggagtgatagcacctgctagacatcctatatatgaaaatttccgggttaaggttagaatttaattgctagttaattgttatgcatcaatgaattgcatgtggaaaagcatatcaaagcttgaatatgctttcatcaaagggtgtgttaatagttaattgatgtcttctcaagttagttactcactcgtaacgacactagatgttactatccttctcaggtcatatattacaggcagtttacttccacctgatttgatgtttcatgttacatacgcaacatttttgttataactagggcggcattaatgtatactctgccaagtcacaacacattcttttgtttcttttaataaatttgtagtctttgtatttattattatgtatttaatttgacatgtctctcccaattgtttgattccaggcattcaaagcactgctgacatcagcaacgtcacacgagcaacttacagcgcttggagaattattatatcaggtatttgaaaattgtttaaaatttttgtggttgcctatatgtttacaaacaatagtaatagcagacatttaagatgtaagatcatagcacaattgaaatattgcctcataagaaacaatttggggtggaatctcttttttcatttattttaaactgtgaatgaatcggttaatcatatcttcacttttacttggtagaactatttctcttttccctttcttgttactgctggttcgatccagatgcaatcatttgataaatggtgacggacttgtccatccaagtagcaactattgtttacaattacctaacaaatatgaacttacctcatagatttagttgtgacttatctgagttaaactgtttataagtggaaatctggtttgaaagacagtacttggatttaattgattatgtaacatgagatgttgatagaaaatcaaggaccaaaagtgcagaaccagttcgtatacaagaagaaacctgcatttaattttcctagctgaacttaaataaaaacatcttgcaggtaactacattataacatttcttgaccattttggtttgatttttttttttt

SEQ ID NO: 294622 - DNA, 3057 bp, Cannabis indica
gtcaggaacaacgaatctctttatctccaactcaaaaactatagatttcgttattacatagaagttcccacaaagcaaattgatcggacaacttatacaatactttttattctcaatatagatgcacactcgatgataaaattttgctaattattaatgctgcatttagttggaggtaatgaaatggaatagaatgggaaggaaacaattcccattcctattcctacattttcattcctcccaactaaacacctccttagttgaaaatccaatagaatcagccaaaaggaaccccaaagaggtacaattattttctttcttcatttagtactcaaaaacctcaacctaccagcaaacgagttctacataaacaccaaagtacacaaatttccttacaaaaaaaataaaaaaaatacaaacttcacctcaggagaagagttctcaaaagtgacattttcagcaataaagtcctcgccttcaacaataatgctgccacacccaaaagtcccagtaccaatcacacgagaaccctaccaagaaaaaaagattaaatcccacccaagaagaacccatgtgagtaagagccaaagatcagatttttttttttcttcttacctggtggtgttcgattttggtggcggtgttattccaagtcagaacagtgtcctccgggcagagaccagcgatggtgatgaagttcttggtcttgggtacgtacacaggctgtcgataaatccccggtgaaagacgaatcagagttcgacgagtgttcgaaagaggaacagagtcaattgcctcctgaactgtacggaagtcaccggaaccgtcttgtgagactctgaagataacaggggttgtcgccattattgaaatgggagttgggtcttcgttttctcgatctggaaatgcaatgggtgatgatcagattcgatgaggggaaaggaaacgcagagttaaaggccgaaaagtagtagaaacgagaatgagagaatctaagtatgtaaatccaaaagtggaatcttgttaattgtgttgggctgtcttaaagatttacgcggtacgagggagataatgtttgggtgcttgcatgtcttttttaacatgttctgttttttctgtactttttctttccattttctttttctgattcgtctgtcattctttttagggtatcccttaaagagagggtggtggtgattggtttaatgtcataaaatggcaatagtaatataataatttaataaatgagaataaatatgaatttgattacatgtttagttgttgttgcattgaacattataataaaaaattaagtgtttagtttggtgtatagttctaaaccttaactatttcgcactaactatttgcgtttggtgtcaaattgaataatttatatttttctaatttggtcacggttttagaatttggttaaaactaaatcaatttacataattcttttatatatacttaacatgcatttttttttcatacaaaattaatattcaaaaacaattttaggaaaaatattggtattgattttatattattttgacaatattttttcattgatatttatgtattataaactcattaaaagtaaataaatttacaaaaaaattagaacaattgtcaaatacaaatacaaactatagttttgaaccaaatcaatttgttattaaatggttgtgtttgatcatttatttggtatggtttagttctaaattaaaaaattaaaaattcagaccaaatcaatcgataaataaccctagcagaatgtaaacgaatgagtgtgcgagtatggttggacaataattttagtgacatgctctttctcgacaaattgtagtgcattttttagattcgactagtagcattttttgatttggacattatttgaaggtttataaatgaagagaggagaatacaggatatcctcatgtcgtactgtctcctttatcaggtagatactattttcatgtagtattttgctcaatcttgcttgtttggtaagattttctttttaatgctgttaaagttgtatttatttttgtttgactggtttgttccgcttcttttttgtccattttgttataatattagaaatttatcatccttgttctttgtgacgttagctttacgacatttttggtaagtctacccaatagtgtttctcttagttgtgtgcacctttttgtaatcaacataggttgttgttgtttagtcatcttataaattttatgcaattttacactatatttggtaggagaaaaaggtgaaaagatagagatgagagctcggaaaatcaaagaagattacaagtccttttatttagcaggagaaattaaaagagaaaaaaaaaagtgagagaacaaatttactcaaaccttcaatttagaattcatcaattaatagaaggattagtcttcctcttcaattattgtaaattataaaaataccttaaaatatattattaaaaataaaatagtaattatatatacttcccgcactcatccttcctaacaaacatagattattactcttctttccctccattatattctccctcattcccaaacatagtcttactttctccaatcttcataagcttgtttcctttacaccttccattaatattcttcatattctctttgaaaaaatagcatatatctaggtccttgatgcatatttattttaatacaaattgaaaatttttattaatttgttaaatcagctaacaaacataactcaattaaaaaaaaaacattacatctattgaaaactccatagtaaaaagaacataacactaacaaaactatgactatgagcaacatattagtagaccctttaataaaacaaaaacatattatttgagtaaataataaagtcaccataaaagaacaatgataagtttccaataaccactaaatgataagtttaggttaccaaaaaattcagacccggatataaaagggtgtaaattaaatgggaaatttgattttctatacttagaaaatcaaatttttttttccctaaaccaaaaatttaaaacctaaaaaa

SEQ ID NO: 294623 - DNA, 2395 bp, Cannabis indica
ggttgtggggtttagtgaaaccaaaacgaaagtattaggagttttgacgccatttacccataaaaaatatacatacataaataacaatcaaacaataaattttgtgaattattaggatattacacttagtttcatgtgttagttacaatacagttaagccatataaggctctcggttagttaggatgttcatagactaagctaagttaattattcctctaactcagctcatataacatctatatattgctctacctgtaattccaaaaacacagaataataataacacaagcttcaaagcttttttctcgcactctgtttctctcatatatagctacatacatacaagcaaatatgaacaaaatacgacccatgcgaaatgtttgcggtcataattcggagggaaaataaaataaaaaaatatattctctttctatattacatatgttagtatgttacctaaaatcagtaacaggggagagtaaaataggggacaacttgttaaaacaattaatttgagaaggtaaattgttaataattatgaggaaaattttacaaagcaacttattaaatgccatgtaccaatattttctatttatttgggtattcaaaataatttttaattaaaaattttctcgtggtcatatatattatattatttaagatattctgtaaaattttgaaaaattttaaaaaattaaatacgccaaaaattgagtttaaacattgtgttgcactcataactattttattttatacgcgtgtgaattagactatttgaacactactttctatattgtgaattattcaaaattaatttctcaaaattttataaaaaattttaaataactataacttacacgaatatgtaaaaaaataatttaaaataattttttggatgtcaaaacagataaaaagtgcatcaatatatactttttacaaagtacattgtaaaaataccctaactattatatatatattatttaacttttacttttacatattaatttaaataacaattttttgggagggttgttagtggcaaaattgacactaaagttgttgctagggaagcaatcactacaataattagacattttcagtttgttcgttttgttattttttttttttttttataattacagcacatattgaaagttttaacttttttacttttatactgtgaggtagaaatttttttaaaaaaatattgtgtaagttttatactgtgtactgtgttaaattttcactgttgttctacagttgtagttgttgcactgttattttaagttgttctgttttgttttataaaaatacagtatttttgaaaaaaaaaaaaaaaaactcgtgtggcagtatttttgtaaaaattatactaaattttagcatttttgtaagtttctgtttttttttttaatgacatttctagtttgtaaagaactaatttgtcatgacaaatatttgaaattgagagatacatctaactctaattttgagactgtaaaagaatatagaagataatattttaaatatttcaaggcgaattatgtaatccctcagctgattacgagggattacaaacttcaacatattctcaatcgttgcatttaaggagagttcctatttttggtatccaatggttgtcatctctcaatgcagaatgtaagggtacattaaaaataatactgataactggctcattattttattgcgtccttctctattttatttttctaggtaaattaatttcttttttcttttattctgtctacttggtaaagttccctttcttgaagatatttagagaatattttggcaacaatggtctgtgtctggtggattgcaggtagtggaaatgagatttgcttgcttgtagagaaatcggtgtagagttgatctagattgatgaatagtttcatccaatcagtgattgtttattgaaattagtattatagggtgctaattttgtacgtgtgactacatttgactgtaatttattttggttgttttaacttaaatcaaaccccaatttttattgagatttccatatgttccaactcaaaaccctccaacaggggtttcatatcttgcaagaagctccaagatgcgaacaaagccacactatataatgtcatggcaagaaagctcagatgcctatggatttgaagtcaatcacactgactcagtggaggatccattcatttggatttccacttcacaaggggttgaagctcttgcctggttaaagatacgtgttctattatggtaggaatgatatatcaatcatttatctttgtggttcagtttgctctaccacaaattggtattatatttttttttttttttaaattatgtttattatcaacaaaaaattacacaagtttaggcaagtccgc

SEQ ID NO: 294624 - DNA, 3418 bp, Cannabis indica
aggggtattatggggaaaaatcagatagagtcatatatgggcacttttaataggtatagatttagagaaataattttaaagatttttaaggatagtttttcgaattttccttataaaataagacatataaaaagatataaatagtaatacttgttctatttttatttttatttttttttgaaagaaaaatacttgttctatttgattttagttatgtagtgaaaaattggtagataagtttacaatgttctagagtgatgtatggtcggtggtgtagcgtgggatccaccacagacgataattccgacaaagatatgacacgtggcggaaggatcacggctcccaaacgaatattgttgttatcgaggaaagtaccgttactactacaacaataacagtagtcaagtcacgacgattagctattagggcccatcaacgaccttagtgggcttttctttattcaagtgggcccccaaaaacttctcattctccattcatcactagacagagattccttgcttacctatttttggcacgtgcgaataaccatggaagatcacacgagacacgagaaagaaaaagagacacgtcatcagcattgtggtgagatacagaagaagaagttttttttttggtaacagatttgggatttgtcgtgtggtgacaaaaatccaaatagataataaatgatggtattttgtttttattttatttatattaaataaatgagattcagttaggaattgctacacaacacaacaccccaagttatgttagtttattatgagattgtttttttgggtaaggtaacgtaaatgattaattgtttaggttgaaaatcaaaacgtgattttcacatacatatacatgagatcctaacaaacaatgtatatgacgtgtgtcaatatatggtcacttgcaagtggccaaaaattctaagtcctcttattttttaacaattgtaagcatagtggtttcacataaatatataggggggcaacacttttattataataacataagggattagtattttaaaaaattataatttatttttttttatataataatacatgaaatgtctatgattacaccataaattagtcatgtaaactaatagtttgaatttctctaagcgctaaaaatagagactttcctatcgataaagacaaaagtgatccctagagtagaatattttccataattttatagaaattgtttttggtccggctgctgttgtaggaataatgtttattttccacccattaaataaattaaaatctatatttttttcgataaagatataggttctagttttagtagtttgttgattttttaaaaattgtaaatcatttatatttcatagtataaaaaaaaaaattaaaataatccattttttttttttgcgtaaattaaccattgtattaatccgtacattatatatacaccatacttatgtagtgttatatatgtttatgtgatccctagtaaaattaattttttgaggtaaaggtcaattgaactaaaagttcatcatgatttaagttaataccccaaaaaataatattgctttaggcttttctaaaatattacagagtctcttctgaaaaaaaaaaaatcttaaaaagtcattaaattctagtagtctcaaactcaagtttcattaaaattccaaaaccaaaaattataatattgctgcaaaatttacattattttaggacttattttataattatacactttaagaggtttttcaaataaatatgacttaatattttatttttgactaaatgactaataattttagtgtaataattataaaaatataagagatattgtataatcacttaattaattaataccaaatttggtatatacttcattttaaatttttgttgcaacttttactttttaatttaattttaagtggaatagttaattaaattaagtatttttgttgctaaattttttaattaataattgtaacaaaagttaataaaatggtattataatgtagtatgcttaattaaaagtgaggtatttaattaaagaaaattaagtatttatgtttccattactttctttatcaaacaaaataaggacatgtgatctatattgtaattagttgactttagaatgttgtttatacttagaagattttagaatttcttctttattaagcaataaaccttgttttagtagcaatgctaaatgacacacatagtacttagcacttttatgaagtataatattattattggtacaatttaatagcggtcaaacttattttaaattaataaaaattataaagagcaaccaaccaattataaaacgttatgtcatataagtgctatgcaccttagtgccccataaaccatagcaatgtcctaattgatttggttaagtgatgagcggatcagatgccacttattcgttaaaaaatagtgtttcatattttgttaaattaatttaattctgataagtcaatcaatttaatttatattaaatatgttaactatttttattgaatcagttagacaccatatgatagagaatcttaattccacttattcatgttgtgaataattatcacaattcaaacaactaataaattaatatatatttatctataaatattaattatgaaactccataccaaacatgtatgtcttttccatgcataattatcatataattcaatttgattgttcagtaaaatatatattattaggtcaatatcttctgatcttatgaattcatactttgtcgttgaaaagaaataattattacaaaataaccaatttgaaattgtatatcaatatatcatccatgcaaaaacacaatattttcccataaaaattcttgggtgaaagacttgatgacttttttataccaaattaagttaatgtgaaatataatatagaattaagaagaaaaagaaaaagtgcatgattgggattttataattaatggaatactagctagggtttcatatgatcatacctaataaatataaatatataatagacaataaatatgaattgggtccccatggcctccttagtggctatctagttgttatgatttcttattatttgatctaatatttataataatatgaacaatatatatatgatcaaataatattgttgctccatgtgaaagctttgaagttacttagaaaatgctattcttcggagaccaagttttagtctctattattagtcacatatatagttgtggcccatattatatatgtatatggtttgtctattcacataaatttaatagtgccaattcaatatattattgtactatgcatataattaatatacattattatattatataaaaaacgtcatagagagggttttggatggagactataacatatggataacgttggtctttgtgatct

SEQ ID NO: 294625 - DNA, 5706 bp, Cannabis indica
ttaagggggctcgagttgcagatgcacgctgctggcgaacattcttgtgaatgatagagcgtgccttggaggcagcctcggatattacacgcatttttctgaacctttgctctgcgctgtgtttcatgatcttccttctcgctactaaaagcttttcgtaaagatcccgtgagagcctattgttacaacaataactcaacatgagaaatttaagctttaaccaatgtgattcgtcatatcatttcaaggatttgtcggttgaattattttctttcgtaatttttataagaattcagaaaggaaaagagcattcttacatcagatgatgctgtgtttcatctaaaagctcttgatattcttgctttaacttttccatatcgagtataatctgcattacgaaatataaccttagagactaaattagctctcatcaaagaatcgaaagattcttctcaaaagcttcatcctatagaactataagttgtgtgatacctcatcaatctctgcactcgcggcaccatacagttcacgggccttttctactacaatacttgatagtcctaacctttcggctatattgattgcatttgaacgccctacaagataaaaattcggtttctaagatgtcattgtaagtgctgagatcactgtaattttagaacaaattacatagcttcgagtaagaacctggtactccccaaagaatcttgtaagttggcttaaggttcacttcatcaaactccatacatgcgttttcaaaggcatcattactgtacaacaaaaatctcaaaagggtgaaacgactgaaaccaaatgtgacattataatcgcaaacatttcatcttttgacttggcaacctgtatttcaaggttttaagttccccgtgatgagtcgtagctatagttaacagaacaccggtttcagcaaaagattctagcagtgacattcctaaagctgctccttctaggggatttgttccagcaccaacctaacacatatacaagattacatggtatgcaatgatatcggtacattcccatttggacataggactatgtttctcgtgttcgtgattgaaatggtttagatttaagcatacctcatctaatagcactaatgaatgactagtagcctgtgattgaatctcctgtaagatgttaacatggaaagtattcatcaggaaagaaacacagtacaattctggaagaaaaattagctttgactcgggtagtgtgagaggaattaagatgtgtcttacacttatttgtttcaaatggcctgagaaggtggataatgattgagtcaaggactgttcgtcaccaatgtcagcaaaaacagaatcgaaccaagggattcgtacagattcagaagataaaacatgaagtcctgcaaagtttagcaaattatcagtggttttctagatgtctagataccaaatccatgtttgattaaaatcagtaattccaacgagaaccgttgtacagaaaggaaatgtaagaacctgattttgccatcagaacagccaatccaattgtctttaagcaaatagttttacccccagtattaggaccagttataaccaaaactcgagttttctgtgctataaaaaaatcgactggaactggccgagcttgctcaagtgcagcaatcttccttacaacaaaaaacggaacattcatcacgcataataaaaaatggagtgattgtattgttttctcctctcgttgcactattatcttccggtttgagaagagaatattcactgctgatgaccctaaatgaatttcttttcgcatgcttaagaggctaaaaactaactcatgacatagagcaagcgatttaggaatgaaacaaagtaaaagtagattctattttttattatcatacctcagaagctttcttggactctctcctcgccttccttagattttgcttgtgtttatggagtagtaatggatggtaagctttcggcatatacaagatccagtccctcttataggtcgataaattgtttgaatctttgctttctgaaccaccatctcttggtggagacagatcggggcatgaaccaccatatgacataccataggttgcccgagcattgacctaaagcacagcattagcatatcacaacacttgcttgctgagctaggctaaaatttctttgtcgtcctcatttcgacaagacaagttttgaagagtgtctcttttaacaatgacagaaagaaactaaaagaataagcgagggtagagcagggatcgtcacctaccacatctagtttaatgatgctattcaagagcaactcgatatcatctagatcgttttgcatctgataccgaagcaataaaacaaaaacttataagtgaaaggattctaagcacaggcaaaaatgaaagtgtaagttaggctgcaagtgacctttgttgcgagcattgaaagtgcatctgcctcggcttttgccactgacgccctcgcttgttgcaactcatcatttaaagacacagcagggagtggctctacaatacttccaacgcctgaattactataacaatatattaactctcaggacaaaaatattgaagaactgagctcctaacaaatgaagaaatcttagaacaaaagtagttgttgaaacttgaaagtgagaaagcaaattttacagacctcgtcaacaatagacccttgaaacttgtcatacggtcagagcttgattttatgcaccaccttccttcaatgttacacacttcctgaaaaaataacggttaagcgtgttgggttggggaaatgatcttgaaggtgccaagtgaaaggtatctgacttaggtttcttaccattaaagacgaatcattcctttcatttctgattaggctgtccactaactgatatacctgaatacagattaagtgagcgagatgagccaagttttccaaattgagaagttaaactggcaagcaaactataagcatgtaaatgtttaaaaactaaaaaatatgaaattgaatgaatagctattacccttctttctagtgtccgaacttgatctcgtgatcgctttaggttggggctctgaatataggaggaaaaccgaacattaaaagaatagaccaaatgggaaaaacatttgaacaatcaatcaagacaatgacttggttgtagcagcggaaaataatgtcaaacatagcgaattgtattacacttgaaaaaggcagtcagtaacaaaccgcagagtctttcacagagccatcttcatctataatttgctgtatcaacttaactaatgaccgatttatgacaaattccattatctgcacacatttaagttaagaaaaaataaggcgttggaaactttgaatcatatggtgctcagctaaaatctaaagagtctatggatatggtagtaatactcactacttctgtcaaaggcatgaaacgcctataccaatctgcatcttccttcagagctagtttcaagttatgttgtagagcatcggcatattgtaagagagagacgacagccattgcttcattgccttccactagtgagctccttcgagcacgttggatagcagattgaaccttcacatacaaaacttataacacttagaagaagctaatccatttacgaaatagaaggggaaaacattttagttattaattaactctgttctacgattattttcaagactgcagcttggtggctttagctacattcagattcagttataggtttctcttgtatttgttcagcttcaatgaatagccttaggtatgatcaccctaaggtgtgagaacgcttgctaattgtacaagtgtgtggaaactagaaagagctttacaaaatcagtattttggtgcgcatagcttaagtgttcttttaatacttgagtgttattcgagagggtgtaagtattcatccggttctatagtggatttcattaaggccattgctgccttaccttggatgtaggatcaatcacattgattgaatccaaaccaagtaacttggtgcttttaatgagaacctcaaaggtcgggtgtgaaacttaggaagccaaaaggtaatctagaataattaatcttttaacaccctggtagcaccaagacattgaaggcatacccctcatccttcagtaactaactttagaattatgacaaagaaaatcaatacaagcattgtagcaaaatcaatttttccaatcgaaaggatggatggctgctttttaaattcaccatttgaatcaaaatttgcttggggctctaaagacacgcaacaagatgatttatgcgcagcttgcccagaaccccctgcctggtccagttggttaattttgattgtctgcggctcaactctcgagagtcgagactaagatctcttacaatggcagagagtaaaagccctccatgatgcatagaatagactaaattcctgcataccccactaaccccttactcaccatactaatcctcgggcctaacattctgttttctcatactggatttactagtactgcttgttgttttgtctcagccatttctcttggtatgctttgtttgtcatttgtgtgttttgtaggtataaactctcaacattttccttatgtgaggttacttttatttctgacattatttcaatacgaaactatttttaatacacaacaaaattcacagttaaatatttgtacctacaaagctcgactatgtccacaaaatccaacactacatatgagtacaaacttgcctaaaggtctcaaattaagatcaagagtgaagaaatgcctaagcttaacttggttgaattttagcaaatgattagaattacatattaaaacgaatcatattctttcccatacaaaattcttgtgtttccattcttgtttcaacttaattctttatactatatctaaatgacccactagagttttagtaaccaaaaccatgaatttcccaccaaaccaataaaacacatcaaaaatcaaaatgggttttgaaaaaaactaaccagaagaacatcaacgccggtgaaatccaaagaacaaccaccatgcttaagcatttcaacggctgcatttgtttcatccaaaagcctcaaactttcatggtaattttgattcaaagaccaaagctttgccttggtggcttcacgacccaaggaagtacgagcaaaagaggcaacacaatcgcaaagcttgtcccattccaaaactctgagactatcatagtaaaccccagaattgttttcttcttgggtaagaacagattggtttgtggatgaagataaggagtgagtgagttgtaaagcttcgtgctttaatcttactccaattgttacagggttaggaattgtgggagcaaaggatatggatatggatatggagataggatgggcaaatggggctgaagagagcatttcttcttcttctccttctactctatcatttcccaatgattaaacttggccaatgagaaaaacccagcaagaaatgaaaggtgtggagagttgttttgagtaagcaaaatggattatgaaggccaatgagtgagtggcataggactataggagtggtttgtttgtgcaattggctctcatattattttatacacatatttaatctaaatatatattatgttatagtgtaattaagggtaaatacaattttggaccctctgttttacaaaagttatcaattggaccctgtgttttgt

SEQ ID NO: 294626 - DNA, 3787 bp, Cannabis indica
atgttgttaaattattgaagcttacgtgtttgttaatctactttcttcttaaacaaaaaccactagaacttatataaaactaatatttacgtggctcgccacgtaactctgatctagtatatatataaatataaatatagataaatagaatagatggtattagtatttgaaaatttctatataatttattatctttagttatcaagttataataaagttactatgattacattataactagtgaagtaatgaaattgaggaaaagattattgattttagcatactatgaaacttgacccaaacaatcggtttcaataccatattatgccactgtctacaatctcaaaaagcagcaggaatcccaccctttctgggatcactcactgccacaagctttccaagatcttgagctatgagctggcagatagtcccaccaccaaggccttgtaagacatgacccttcttcttaagggcttctcttatatttgcaggaacttcaaagtggtctccaatcacagttgtccaattctcatagctaacaacattgggtatcagctgctcaaacataaataatcgtatttcatcaatgcatggtaatggggttgaaagtccaatggattagtatacataacaactaatcaatacaagttttaatgaaaacctgatgatagatccttggagccatgacagaggacagagggttcattctcttgacaaaatgattcaaaagaacctcaccaactgctgcaaatataaaggctccaccactggcacctaatgctgctttaagtttattatcctgttgtcaaaacaaataaaaagtgtataatcttgctttgtgtgtttgatcacaactctctcaagtgtgctgattttgaaaggtgcaatttcttgatcatttctttagttaatgttttgtaattctgtttcaattcattcttgatcattgcctttatttggtttctactactacatttcttgtttgtttatgattcttgataagtgttaagtcaccacatatttttctttcatgtaaaattttctcaatgaactactaaataaccaaaagctattcatcattctgctaactaataatgaagcattcttaatgggatctgtcccaaatttttagagacatacctttacaattatagtaggtgacatggatgacaagggtctttttcctggcctgataaaattagccggagcgggtggtcggacacctttagtgacatttgttgggatggagaaatcatccatttcattgtttaagattattcctgtacttggtgatagtatttttgagccaaaatatgcattcactgtggtagtcattgagattgcatttctttgataatcaatgatagatagatgactggtaccatgatcatggatctgattccacctgttggacaacaaaacattcccaatccaatgaaaaagtaaccttacaaatcccaactaaagcttacaattcagcataagattagcaaatgaaaccaacttacttgccaccataatggttaggattaaaagttctgttgtcatttatgtctttccttagttttgcagcaaacttaggagaaagcatatcagatataacactagacacattaacaaagtctggatcacccatgttcattctcacagcaaatgtatgttttagagcttcaatttctctatggaccccaagagagccagagattccagaaggaaatccatattgggaaagaatgttcagcatctgttaagggcaaagacactgttgtaatttattacaagaaaaatttctatctgtaaacaagagaaaattaaatgaaatgaaacaataacataacataacataacataaacagagaagagagagaagatctttactagtatcattggaggacccccagaaggaggaggcatggcaagtaatttggtccccataacatcaacagaaattggccttttcaccttaacttgataactttgcaagtctttcattttcactatccctccagccttttgaatatctctaactagatttaatcctattgatccattataaaaggcctctatgccaaaatctgcaatctttcttagtgtttgagctagtttcttattacggcaaatatcacctgccttcaagagattaccatttgatgtaaaaacactctgaagtcctttatcttcaaagatatctgattttgatgcaatcaactgcatttcaagatacaatgacaccttgaatcccaatcgagcaaggcgctcagctggccttacgagcctcgcccatggaagcttcccatattgtttccacgccttataaagccctgcaagctctcctggaactgctatggagagaccacctttagctttaagagtttcattgccagcatacatgtcctgtcaaaaacaaaggtcttcattatgattatcaacttacaatcctaacgatctattaattgtacaaaagagagaaattgaaggagtgacctcagaagcaagcatgggagcagtttctctcatatcatacacttgtgcctttccagtggctagccttaaattcatgaaagctcctccaccaatgccacttgaagccggactcaccacccccaaacacagagcagcagccaccgcagcatccacaacatggcctccctcgcgtagaacttgagttccaattcgggaacatcggccatgatcagtggcaacagctccatgatgtgcaacaattacctctcgtctgtgtttgtgtttggtcgaactattatcaatactcgttgcattaaggctcgtactacttagaagaagaataagtatgagtgggagcaaaagttgtagtgtaaaagtatgccaatgagatgtatgagctgcatttgaagatgataataaacaacatgttaactcaagaagaaggagaacaaacaaaccatcaagcaaagaagaaaaaacttatagataacttacacactaccatcattaagctctagaagagaattcttatgaagaaaaagaaaaattgattataactataaaatgagcaaagggaagttttaaaattatggttagaagaaatatgtggatatgagttgattttatgaattgttgaagactcaaagctaaaaggaaaagaagttttattttaaaaaaaacttgcatatggaagaatgatgatttgacaaattaagaatacttgtagagttttaatcacatagctactaaagaacactaaatgtcatgtgttttatggtgtactaaattatataaaaacttattgtcccatacatggatggatcacatacattatagatgcttattaaatatttgattttgattaattaatatgttatgttaaaaaagtcaaaaaccattagcacttttgaaccattaaagtattgctttcttgattagaaaaggaaataaagtttaagctctctattatttttctgaaagtaaaggaatcataaagaaattagcaaccgtgggcgaatgattagtgtatgttattgtcgatattaatatacaccactctttctttctttctttctttccttttcactcttatcctttcctaaataaatttctcataatttttcaaaattaattataggttgttgtcaacattttggtcttttatgatacacattttttccattctgatatagatatacatatcaataggattatacatgcaccttccctaaataatttctcataaattttcaaactttcttttaacactatacatctgtaagttgaattttggtgagaaaataaaaatgtaagaaaaatataa

SEQ ID NO: 294627 - DNA, 6555 bp, Cannabis indica
actggtgtttcgcgcaataggctgaaggacatcctaagccaaatctggaagcctaaactcaaggggttatggaagttcaagaccctcaagaaaggcctctgggggatattctttgatttagaggaggattgtgttgaaatacttgacagtcgaccttggttaatcaatggtaagctcttgattatcaaagagtggccgaaggacggagattggtataatgctaatatgagtacgactgtcttctgggtccaagccataggtcttcccaccccttatctgaacttggctaatgttcggactattggtgccaaagctgggacgttcaaaggcagtgatacaatcgatcaaaagctggttataaggagaggttttctcaagtttcaggtggagattgatgtgtataaccagctttcttatggtttctacttggacatcatgagaggaagaaaggaatggattcagtttaaatactacaaacttccccgtttctgttataactgtgggagaatcggccatgaagcaaagagttgtgctagagatacagtctacgttttccctcctgaaggcaaagctgttagagcatttggaccctggatcaaagtagaatcggcggtcattagttgtttcaatacgattaatcaactaaatgttcttaggaatgcttcaggccccctgaataatggccacttgaagtcgacggagtgggggaagcaggataagggaaaagggaagattccaatcccgtcccagtcgacacatcagcgagaggaatcacagctccggcgtagcaaaccgatgaggaaagtggtcaggatccaggaagacaactcaggtgccaattctagaaagaatttgaaagtagtcaatcagacctcaaaaccaggggataatagagatgctccatcagaaaatttgattttgaaatctgcaactccaaaatgggataggcgtgcacgttccatatccccaaatttctggagaagacctattcagggtatcaatttgaagttgatagatgaagaaataataaagaaatactcttcaaggccccttcctaatgagagggacagaaatgtcattaccactatcatgtctaataatgggccaacctacaaacaaatgattgaaggcccacatgagaaagtttgtaaatcaagacaacctcattgtcatcctgaagttactcacttcccttggcccgattatgcagaggagattggtcttgcagaggaattgataggcccaattcaagtggataagtttgagcccagcccaaccctttttcatgatcctcttgatgttactaatgaagtgcacccttgcccccagccacgaaaaaggaaggcaagtttgactttaattccttattttccaaagaattccattctctctaaggaattttctcaagaactaccaaagatggatcccttctctcctaatccatcaacttctactttcaaaatgggtaaaggagaggcttcatcttcctctacgaaaaaggataaaaggaggaggaaatctaccaaccaaaatggcagcagacgacagacaagggctttgacaggggtgaattcgcagggtactatcagaaatttggaaggtgagatgaatcttgtggatgttagagtagaaactgtggaaaattttccaatgggcgaggaggcggcccttatcaagcccccctcgtcccaatgaaaattatatcttggaactgccgtggtctctcgagggactcggcagtccaagtcttaagggcttgggttcgaaaatacaaccccgattgtattttcttgatggaaacgaagttgggtagggaaaggatggtgaaaatagctaattcactgggttttattcgtgtggaaagtatcccagcaattaatcttgctggggctttttgtttgatgtggaagtgggatgttcgtttaaatgttgttaatgtctttaatggtatgtttgaagctttagtttgggatgaccaggagagtaaatggtggaatcttttttctgtttatggtccaccttatgaacatgaaagagggagtttttggaataagttgaattccttggtggacaattgtgtggaaccttgggttgtcattggggatttaaactgtattgctaatggagaggaaaagcagggagggcgccgagttactcaaggtgatcttagatggctaaatgattttttggataactcaggaggtgtggacttgcgatgtacgggttgtaaatttacatggcacaacaagagattcaatgggggcctaattcgtgaaagattggatagagcaattgcagccactgattgggttaatagttatcctaatgcaggggttcttaactttcctatttcggtttcggaccatgctcccatcttattggactcttcaatgttcagatccaaaggctttattcccttcagattctatgaggcgtggtcaaagattgattcgtgtaaggaaacaattgaggatgcctggtgctcagtgggttcagattcaactaaaaacctcttacagaatcttgacaacactagaagaagccttcaatcctggaagaagaagcatttcaatgatcttgaatctattattacatctctggaaaaacggctacaatggattcaatgtcaatcctcttctgttgatttgtgtatggaggaaagagagattcaacttagactagaggaagcttggaagaaaaaagaggaggtttggagacaaaaatcaagagaggtttggttaaagcttggagacaggaactcgaagtttttccatgctgcggccactattagaagaagaagaaattagatttgggcgattcaggacaatcagggggaactttgggatcaaaaaaggaaggtaaatgagattgcaaacacttatttcatgaatttattctcatctactggtggtattttttttgacaatttggagggattagttgagaatggagttactagagagagtaatgatatgctagttgacattccctctattgaagagattaaacaagttgtttttagtctccatccgttgaaagctccaggtccggatggtttctcggggtgcttttataggaggtattgggatattgttggtccaaatttagtcgagatggttaaggatttctttgagaagggtacaatggatcctagatttaatcacaccttcctctgcttgattccgaagattgacaaactggtgaagatggagcagttccgtcctattagtctctgtaatttccactataaggtaattgcaaagatattggctaatcggctccgccccttgatggatgagttggtgtctcctcttcaatcggcctttattccggaccgatggatagcggagtcatcaattctaactcaagaattggttcactgtatcaagaagaagcgtggaagaggaggtcttatggccatcaagttggatatgcataaagcatatgataaaatggaatgggggttcattgatgaagtccttaagcaaaatggttttgatatgagatttcggaagttgatcatggagtgtataaccagtgtttcttattcggtactcttgaatggtagtccgttaaaaaagttttattctcaatggggtcttcgtcagggcgatccattatctccctttattttccttttgtgccaagaggtgctgtctaaactcatcattcgggaacaacaagctgggagaattcatggtattaaaatttctcaagaggctcctacaatctctcatttgatgttcgctgacgatacgattctattcacccgtgcgaatgtggaggaagcgaagactatcattcggtgtctctcaaaatatgaagcttggtcaggtcagtcttgtagtaaagccaaatcgagtgttcttttttctaagaatatgctccctgagaaaatgaaagaaacgttagatgctcttgaaatttccaagctcaagggtgatgagaaacacttgggaaatccttttgttttcaaaagaaggaagaaggaagattatcagcaactaaagtcaaatatgaagaaaagattagaaggttggaggatgaaaattttgtcttatgcagggagattggtgttgattaaatctgtggcggcttctatgccaatttacaatatgtctaccaccaagattcccatttctgtttgtagggacttagatgcccttgttagaagattttggtggattggtaactcggagaagtctcagtttttggctttgaaatcatgggatgcgatttgtcagcctaagagctctgggggtttaggcttgaggcgtttcgaagacatgaacaaagcgttacttgctaaataggcttgggccttggggcagaaggaaaaaaagccttgggttcaatgccttttaagtaagtattgtcaccttcaaaacttttggacagtgccttcaaaaagctcggattcgctcttgtggaagaatttattggaggttcgaagcgttatccttcctagttcgatggccattgcagctagtggacattccattgatttgtggactcaaccttggattccttggatgagttatatggagttcactctcttgatgaatggtttaaatagaagacacattacagcaagaactattgcagatatttccattgatggtgtttgtcatagggaaatagttcttcaaatttttggtgatgatttaggggggcgaatcctggacattcctaggatttctactaatcattcgggtcagattgtttggagggatactcagaatggaaggttttcagtcaagtgcgcctattttgcaaaccagaagtacagatttaaaccagtgagagacttatggaagatgatttggaaaccaggaatacatccgagagttgctattttcatgtggcaagtgcttaacggagcaatccccacaagagataagttggggttcattcttgataaggagtgtctcttctgtggtgatgaaatggagagctgtattcacttatttagagattgtaatgtgatcaaaaatctctggataattggagagtatccaatctattgcactaatgttcctggtgagacaatgcaggagtatgtggagaatttagtatccatctttcccactcctgaccgaagctctgtcatcaactacatgggctatctttttagtgcagtttgggctgaaaggaacaagttgttatacaaaggaagttcagtattcctccctttgctcctccaacaggttgctgctcaatggaaggacttctgtatttcggcctctgctgcagatcctcctggttcgactgtccttaatccttgtcggagagtcagcaacgcctcgattgtcttgatgactgatgcctcttggaaggaaggagcagctggtcttgctgcggtggtaattaatggtgatacgggtagatgggctatgagatcagaattcaccactgcctactctaccctggaggcggaaactaaagcagttttttgggctcttcaatgggcgtcttctgaagggtggcaggagattcatgtgttatcggattctttggtggttacacaggctctctaaatcaagggagatgcattccggattggcgttttttgaatttgtctctatctattttagacttaattaaaggctttgtttcgtgtagtttattttatgttaatcgtagtgaattatcttttgtcgatggtttggcgaaaaatgctagaatttctagtgtgaatgcctctgtagtccaaggggagggaattccccctgtggttcccatctttcgttcttcttaatgaactaattgttcttccaaaaaaaaaaaagactgcaaaacaggagagcttctcttttgccacatctccgaacataatacgatcgtttcattagtaatttaaatattgtctgaaagtatactccataatagtaagaaaacaatgtttagtagtattaattgattcatctgaccttaaaaacagatgtgtagaccaagacaaagagaatattcacatgcaaactcttgagatttggattaaattacaacacaaaatttaaattggtaaattaaaagcccacactatttatcttctacatcgtatataatatataatgtaaatataaaaccttacatatcatgagactctgagagtataattctaatataattataattttaatttaaccacaatacatttaattttataatacttatcatctttttaaaaataggtaatgaagcagtgggttcttttagaaatatcttaaacacagtcagtgtaatgaggaaggtgttgtaacttattttaccaaaatcttaatttattaacaagtatgtttgattatatacactgttggtgttttaaccactttgaagagccaactgaattaattgcttttttgacagcttaacctatggttaatgacttgtccaactgtcataactatataaatacctcctctccccaactcgatcgatacagcaagagaacaacagcctgcactagtctaagttagtagtgtccaagattaagagagagattctgtagtgaggagagacaccagaaatagagggaaatcaccatgatcattgctg

SEQ ID NO: 294628 - DNA, 5865 bp, Cannabis indica
agggcgtagcgatcgtggttgaggggagaaacagagaagagggaaatggacataatcatatattcttatatttaatatatcatttatcttataattgtagtttatatattcttctaatatattatccattaactacttgtttttaggacataaatcccaacatctctgtcatggatgacagtaaccacaggacagaaattggtcttgaacctcccagtcaatgaaggcttggttaactctgttctgagctcgatcttcatcagtcagattttcagctggtggtgattctttgatgaacttcaagagtcgattccctttagtgacagcaagaacttactgcttccacaataggaagttatgatcattaagacgaatagagatattgtgattgaagtagactagttctcgatgaagttgagctctggtctgagtagcttaagtgccattgaaggttgaattattgttggagtttccaacagtgccaacagtagccatgttagcattgagtggaggaaagtgctccgaaattataaagtgcggaggaaaatgctttgataccatgttaaagttacgagccattgacaaagagcaatacaataaacaaacgaagaaagaaatagaaaggaacaaagtaaaagagatggagaagaaagaataatctcattaaatcaaactgaatacacagtatatatacaactcgagctgaataacaattaacaaaaaatagctcatgggctagaccaatagctgtcacaacaaaattgataattaactaactaactaactaatacttctccttaatgttgtaatgacctagtttccttgttagataattttaatagtttactctccaatttttctcgatgcgttcttatttcatatatctcatgaattagttgtgcatgtgctagggtgtgaatagtaaaatagtttggtcaatatttttctaccatttaatgtattcaactctaactattctcaatgatattgttcaatgttaaaaaaaaagttgataaatagtttaatataaagtgatttatttgaaaagagaattgttaaaaagtattattggtggataacactttttttttggtgtaatactgttattagtgtaattaagacgaatttcatataacttcaagaaaataatttttttttaaagaacatcactaaccaatcgtactacgctacctataaaaagtgaacgagcaatgctcatttaaaaaagaaataacagtgaagagaaagagatactcaacctttccttaaacaaagtgtagttaggagttagttgtacaaataaagtagagagacttctctaaccataacccctgcccctgcgatagggtttatctctttattccacatttccatgagcttcttccgccattgaaatgggcggcgccaccaacagattcttcgctctcctatcttcatccaccaccaccaccacctctaccgccgcagctcccctccctatcctcttccaccgttactcttctcttctcatccgcctccatcgtcgtccaaaactctctctcctcttacactcctctactcgcacccacttcctcactctctctcattcctccgctcccaaaacttctcgcctttttcattcccacgtcactgcttcctcatcccttcacgataatttccccgactcctccatcgctggggccagcatctcctggcctgagtggtccagcctcgtcaacgcgctatcctccgccggttacttcaaccggagtcagggtttctccgccggtgaggatgagcttcttaaagtcgaagagttatctgaagagttcactcgcgcggcgagggcttgcttagagttcgcgcgggaacgacctaaactcataaggttttgatttcattccgaatggatttttaggttgaattcgtttggggcagcttttcatgatttgggtttgtgctttttctttgggtgcagattgctgccgaggagagatgtggaggtggtgattggaaatgggacaccatttcttttcaaagatgctgataattctgtgcaaaagcttaagtctttcgcatctaatggtgaatccaaatccaatgtgagtgccatgatagtcatagttgatagataagacttaatttctttgtggcttggaatggagttatcgtttttcctttctggatttatactttaatttgaaaactttgtttttcaatgagattataaatagaaaggaaaaaatgatcaaatttgatcgcagagaacaacagaacaaataaaacaaacaacaaattagtacaacgataagccattctgagtacaaaagactttcctacattctattaacgaattgttttagtcgcataatgacagcatcattcactataatctacattagcttaacacatgatatagcttagcttgtatgtcctttacaccaagagataatagatatttcgacctacatacattacttgctgtcatctctctgtgcctttgaacatcttaccacataaaagttctttacaaattctatattgggcagtgatgtttcttgaagttatgcatctaagaaagaataatgtatccttgttgatcaaatttataatgtggaaattcccatgtgatttatttatcgaaaataacatgtatccttgggatgaaacagagctgtagacttgtccttgtaatttagaatgtgtggcagaatgttttgtagtcattttgttcttttcatttgacttagtgttcgactagttgctgataactgcattatcccagtggatagtgtttatttagaaaaagaaagttgattaatttgactttgaaacttttaaggctactatacatacgatcataatgtgtagtgtttccttagataggaactgtaagtcaagtgtacagaactttacatgtataaagtccaaccacaattctttttctttattttgttaaaaccaggtactggatatggataaagtgagcacagttgatttgatgaaattcatattaagttatgctagcaactttgtgtcttcttcggaaagtaataatttctacaatagagagctagttgaaccatctatccggaatttgttgagagaattgacgaagctatgtactactattcccgattcaacttcttttggctcagtgcaaagtcagtttgctggtaataatggacaatcacggaggccgtttgggcaaaatattgaaatgaaaagaggtgactggatttgttcaaggtagtccttctcctttctatcttgcatattagatcttttagccaaaagaatccttaattagctcatctgttcacttatcatcttacagatttttaaaattttgtatattttcaatgaaatgctgagcaggtgtagtttcatgaactttgctaaaaacataaaatgtcttgaatgcgaggaggcaagaccaaagagacaactaactggcggggagtgggagtgtcctcagtgagtactgcctcataattcttttctctgtttgataatagatccaattgcttgaaaataatgataataatcattaaagtgctttctcattttcagatgtgacttcttcaattatgggagtaacttggtatgcttgaggtgtgactgcaagcgtcctggaggggtctcagttggtccaaccaataccagaccacctgtggcatatgaaagtgcaaacaattcaaataaggctgagattgatagtaggcttgctgccaatgaagagaaggcacaacggtggtttagtaagatttctcagctggacagtacttctgacatgagtagtgccatagcagatgatgattttcctgaaataatgccattgaggaaaggagttaacagatttgttgtgagcacaaggaagacaccactagagaggaggctggccaactctcgataccaaaccaacttgggtaataatggcaccactgaaggtaaaaactgttctcttgtatttttatcttctttacattttttttaaaaaagaatctgaagataaaaaacaaaaatcaattgagtgcaaattaataatgagcgtaactgttgtacaaacttctgttccaggtggacagccgcaagggagaaattccggttatgttccatttgtgccattaccagcagatatgtttgtgaagaaaccagagaatacacaaccagaggatttgggtaagatagccactggacataatgaatctgctgcatcgaatacaattgagttgtcagataatgttagtgggagttacgagtctactaaatttaaatcagaagatagtagccagaaccaggctgaaactaaagagaacaaagaagctgaaaaatctgacagatggtataagaagattgctgagttgcataatgtcacagatctggctagtgaaatttcagatgaagatttccctgaaattatgccaatgcggaaaggagagaatcgatttgttgtaagcaagaaaaaagatcgttcattgacctctccagcctacaaaagacaaatggccatggatcaagctagcaatgctaaatttgtaccctttgttcccttcccacctgattactttgcgaaaaagggcaaaccccaggcagatggcactgacttatctgataaggatgctgagccaaaaactccagattctagaatggcagaacaggtaccagaaaagttggctaataatgctaaatcaggggaacacagtaaggaccattttcagcaagcagaaaatcatgttggcatgccaagctggaaatcagaggcttcccgagttaacataagtgagaataacactggtgctacgtatgggacaccctccaatgcaaacttttcccagagttctgctaagacgtacaacagtagcaacaacaacttgagcagggaaaatgttagaaaggaaacttcaaatcagctatcgaatataaccggaagttcaccccaagccaacaaccagaataatggagatggttggacaggaaaaagtttggaggggtctgcggtgaaggaaccagatcctttagacatgtcagaggaagccaaggctgagaggtggttccggagagttgcacatatcaaggacatctcagaactgagtcagattcccgatgaagatttcccgtcaataatgccaatgcgtaaaggggttaacaggttcgttgtgagcaagagaaaaacaccactggagaggaggttgacatctcctcagtacagaagaaatcttcccattgtgagttctgatccagttaagaaggaaactgacaatagctaaattatgagaagaacaaaaaaaaaaggttgaatgaaaatagaaattgtttgaatttaaaatatgatgtttctcaatttaattagtcataattgattatgaaaggaagaagaataattcatcttcatacaatacaaatcgttgtaatgtgtatacagaattttgacattggagctaagtgaattaaagattatttgcatgggtatcctgatttttctgccaattggcaaaatgatttatttactattttttttttcttttctcaattgagttctttaatttatttagttagtaattaattgtaaattataattttgttctttttttttgtatggaagggttatacatgttaatggggtttataccatttgtatgggaagtaatgacatgtgcacgcaaatttaatatacacttatatgccaaattactttggaaaatttgaaaaaaaatatgcataaaataccttaaaattttttctctaatctaattcattttaaaatttaaaaaatatgaccactttacaataaactcaaaaatattcctctcatttttaaatctcaactctctcccttcctctatctctctcggttgttctctcaacatttaactatcaccaact

SEQ ID NO: 294629 - DNA, 5063 bp, Cannabis indica
gagagagagagagagaagggaaaatggtattggggaatggtggtgagaatggaaatgggaatggtgagtctgtttcagaattccaattgggtaaaaaaaacagatacaaaagaatggaatctgatcccttagaggaagaagaagaagaagaagaactacaacgtcatcataccaagaaatttgtggttgcttgtgccatttttgcttctctcaattctgttctccttggatatggtaattgggttgatcttaaatttaatattatgttaatgggttttattattttattatactttttcaattgaagtattaaaaaacctttttttggcttgatctgttaatgggtttattttattatttccattgaagcattaaaaaacctttctttatgtatttggcagtcaaaattgataatgctacattttgacatagatcttcaaattatgtagaaaaaagcaaaattgagagttttttttgttgtttatgttttcatgtttatcagatgtgggtgttatgagtggtgcaattatatttatacaagaagatcttaagatatcagaagtacaagtagaggtgttagttgggattttgagcataatttccctattgggtagtttagcaggtgggaaaacatctgatgcaattggtagaaaatggacaattggattagctgccattgttttccaatctggtgctggaataatggctctttcaccttcattcgcggttttaatggtagggcgtttattagccgggattgggataggttttggtgtcatgattgctcctgtttacattgctgagattgcaccagcagttgctagaggctcactcacttcattccccgaaatctttgtgaatttcggtatacttttaggttatgtatcgaattatgctttttcgggtcttccagctcatataaattggaggattatgcttggtgtagggattcttccttcaattttcattggttttgctctgtttgttatccctgaatctccaaggtggttagtggtacagaataggatcgatgaagcaagattggtgttgtgtaaaaccaatggaagtgatattgaagttgaagagagattgaaagagattcaattagctgctgggagtgtcaatgctgagaagtatgaggtgaaatctgtgtggaaagagattttgaaaccgtctccctcggttagaagaatgcttataaccggctgtggaatccaatgctttcaacaaatcacgggcattgatgcaacggtttattatagcccgacgattttcaaagaggctgggattaaaggcaacactcaacttttggctgcaactgttgctgttggtttcactaagactttgttcattttagtagctatcattcttattgacaaattagggcgaaaaccgttgctttacataagcacgatcggtatgactacttgtttgttttgtctaagccttactttagctttctttggaaatggtaaattaggcatcatattggcaattcttgctgtttgtgggaatgtagcatttttctcagtaggaattggtccaatttgttgggttgtttcgtccgagattttccctttaaggcttcgagcgcaggcatcagcgctaggagcagtcggtagtagggttagtagtggtgtgatcgccatgtcattcttatcggtctcacgagcaatcacggttgcaggaactttctttgttttctttgtgatttcagctatttcggttgcttttgtttataattgtatccccgaaacgaaagggaagtctttggaagaaatcgaaatgttgtttcaagacgaaacagaacgagttgaagtggaaatggaagacgctgcacgcctagtacaaaatgaaccgaaatgaagaagagaaaactagttcaagcaagcaaaaggagagttatgggcaattatacttattttttagtcttagaaaaatcaaaatataccatatttcatgtctttacaagaaaatcacttaaaaaaaatgagctacaagagtagtaaaatatacttgatttgtatggagcttggtgtgcatattttgctcctcaatgattattattgttatttttttttcaaatgggatttcttctgattattcagttcagatttcattaaacacaataaatttttattatatgcatgtataaaaacacaagatggaacatattatgtctctactttctctactcatgctataacaattacatttacattttatttttctttatatattttaccaagaaaaacatgcccataagcataaaaagagtaaaagacatcactaatgatccaatgtggagctttattcatggaactgagttgcaatgtttcgttgcatcgggattggacaggagacgtagggtttcgttgaagtttcttgacattgttaggcggcaagagtcctagaaaatgttgctcgagtcttagatgattgtagctcaaaagttcttcgagtactcgataagtatgtagatggcaaaccactctcattttggcttgcaataatcaacgtaagataaagggcgagaatcctaaaaaatgatgtcgaagtcttgaaaggtttatcgagtacaaatatgtaaatggatgatataaatttgtttgaatgttgaattttggctaaaaaaatttgttgggacattaaaacaatgtctttttttataattgactttgttaatatcaaacattattccatttccatgtcaatcttaatgtcctaagaaaagtcctaaaatgacttttgtggctaatgttaaaagtctttctacctaagttgaacttcttttgggggacaaatgataacaataagaaatatttaaattttttcaatttcgatccacatttagataataaattttatttttatatttcatcttttcaactttaaatttattttttgttttttttttatttgcgtgtatatcttttttttcatcaattttgtgtagattctcatttaaaaaaaaaaacgttactaagaaataatcaaacttgtgcctcattatataacctaagcacatgtttagcaaaaaaaatcatgaagtaacaaaattaaggagaagaaaaattaaaatagttaaaaaacagtaatagacttttaaaacttccaattaatactaatttaaccataagaataactaacttatgtacatatattttcaaaaaaaaaaaaaaaaaaaaaaaaaaaacaatatgtacattttttgttctattagaagtatcgttatactttaacaatgcactataatctacaaccttttaaataaaaaatatcaatgaaaatttaacataatttgtaaaacttaagtgacaaaatcaatatttttttactaaattttgaaatgtatcaaattatgccctcgaatttttcaagtcgttaaaaattctccttgaactattattagacttaatgatttttgtctaattccattcaagttcactaatgcatcgattttttatatactaattagtctcattaaaagtacgaatcgtgtctcttaaactttaatatgtattgattcttaaagtttcattcacgttaaattagacataattggtgtctagcactctccttagtgttatatcgtcattagtataattaagtatcagggctcatataactatgtgtcgctccaaatttttcataatatatgtggcagctgttgtatgcgggagctggcaggtatatacgcgtcacccggagacgagttgaaggacttgacaaaacatctttgagaaagtataagtacgatttgacgggttagctcccggaagagactaagtcagtctttcttcatctccgagagtccaaacacggataggcttctccagtccagtaagactggagttcaatagtcactccgtatttaatgtaaatgggaaaaacgtatgggaatacctataagaagacgggtcaaacgtcataaatctgactgcaaacaattacacgataatcaagggagctagtgatggctccattatgaagaatcacattaattaagaagggatgaaggctaatctcacataaaacctaagcagcctactatgtaggttgtggatgccctattttgtaccttttgggaatttgtgcgtgtccatagtagcacttaaagacaagttactcatttttttctggaaggaaagatcgctataaatactccttacaaaataactgaggcgatcggaaaaaaacgcagtaaacattctttgtaagaaatactttcattgataatagagactcgtggactatgacttattaatgtctgaaccacgtaaaaattacctgcataattatccctaagctctcattatcacgttaaatatatagttaccgaaaatctcaatcaacattatacataattagtgtctaccataaacggtgttatatattttcgagtaattataactaaataaataatatgtactttatctaaacactaatatatttttttcacaattttgacatcgtgactgtttggaagcccgagatacacgcctggctcgttaccttgagggcaaaccatgttgttacattttatactttttgatgttttaattttttttagtatacctctttttaattataataaaatttacataatttcaaatgtattcttaaataaaaattctaccctaattaaaaaaaaaaaaaaactacctcctataacctaaagctctcataaaatgccttatataagcttatttttaagtaaacccaaaaacttacttaacgccgccatgtccctcacttccgctccggcgcgtgtaactctactcgccgccctctccgccaccacattctacttcctctacaaatctctccgctccgatcactcccataccctagaactccatcttcatcttctccaactcgcaaatccaacaagatcatcttcatttcccaaacaggcacctccaaaaccctagctcatcgtctactccgtctcctcgcctcaacagcttcgatttcgacctcgtcgacgccaacgactaacgagcggaacgagctttgtaacgaactactggtactgatcatcgcgttcacttacgggtacg

SEQ ID NO: 294630 - DNA, 4331 bp, Cannabis indica
tttttttttctcatttttaagataggtactcaatctcaatgtaagctattgaaaaaaattgtagataatacttttaaataagaaataaaattattttcagaagaaaaaaaaaaacattatcttatcgaaaaaaacattgaattgatcactctcttctcttttagaaattgtgagtgtcagtgtctggtcgctgcaaataatggagtcaaccaccgcttctctaaacgccggcgacttaaaagtcaccgccatagccgctggtgaagcccacactcttgctctcaccggtaaccataccttctcattcctatatatatcttaagtttttatttttatacttatatggtgatgtttaagaaaacccatatgacccattactcaaagattgatcctttagctcaaattatgaagtaaaagctcatttgagctgacccaaataaaggttgaattgaacccagttcaatattttgttccttttcactgtttttagaggaatttagacaatactaaaaattgtgagtattcaaaagttatttgaatatcgagtactcacttagaacagtactaatatagtaataatatgtgcaattatgtacataagatacagaaattataatggttcgttaagagctcggtctgcttagtccactttgaaatgagtactcttgttctgtggtcataatgagaccgttataaccataattggcgctaacttcaatgacacttgaatatgtttgactgttatctcagttaattggtgtgtgttcgcactggttttaataaacattgcaaggtcccttttttgatactgccagttctctttacgaagtctttcttgtggggtaggggagatttatcccactaacatcaccaaaaaaatggtgttttatttaaggttttatgagtgttgattacaggaaatggaggagtacattcatggggaagagggatgtttggtagacttggaagaggttcagagacagatgagatttctcctgctgaggttagatttgagtatccacaacaacaacaacaacaagactcagatgaaaagagtatcaagattgtggctattgctgctggtgcttatcacagtcttgctcttgcaggtttgattttttattctcttcaattaaactcaagtactttactgttatcatctttgttgttgaaaatttgagttttgggagagtaaagatattgttaatgttattgttggattcagacaattttgattaattgtgcctaagtttaacaaatatgctctatttagtaatgacttgaaagaacaagtttataaaatttattgaaattcgcttttgccatttgatcttttttagtccaaaacacacgtgttaggcaaggattgtcttgaatatatgcgtgttcacctactctattagtatcagttttttgggaagatccacaaaaataaatccgtgcgaaatagactgaaagcggtatcatactaatgtgggagctaaggtgagcttgcagcccaacaagatggaagaatggggtccaatagaaagcatatttctcaagtttagagcatattgttaagcttatttaatggagtggctcttgtgttgtgtgtgatgtttttgctataattcaaatgttttgaacttttgtttgtgataatgatgttaaggtttatggggttatggattttgtttataacaaaaaagagatagaatgtttggtagattgtttaaacttgtcagttagactaagtacatgttgaaaattgatgcataaatggtttaatgaacaaaaacaaggttcaatagatggattagagtagaccagatttaaattagtagatgcaacttatgtgcagtcttgtaatttttaagacaatgtccacatgatcttgccgttttcggaattgaataactaaccaagaacaaacaccatgaaagattctttcttttttctaaactaaattgtacatgttgtaacttgatcatcgatatattcgtgtctaagctatacacgatttgatcatatgcattgattattttctgattgttttatgatctgttcttgattctaatggcagatgatggatcaatttggtcatggggctacaatctctgtatccttaaatagtacattgccggtctatttttgtattcgatatcttgtctggcttgtttagttatatctttcatccttgactgttaaacggatggccaacttggttctgatggagataaccccgctgttccctgcttagtgaagcagtttctcaagtcagaaacaacgactactaattcgtcactaaaggtttttgacaaaataaaccgaaaaactaatgaaaaccttatctgcaattcttgttttaacagtttgttttaatctcagatttgttctatcaaagctggaggaatgacatctttagcgattgataatataggcggtctttggatatggggaaactatccacagcaaagcaccgaagggggtttgtctttcgtgagcactttcactccaagtcctgtaaaggatttacttggctatacagttatgaaggtagcatgtggaaccgagcatattgtggcgctagttagtaccgagaaaattctatgttactcttggggtggaaacaaacacgggcaattaggcctcggggacacacagagcaggcattgccccgaaattgttgaaacgtttaaccaggattcgccttgggaaatttatgaggtggcatgtgggtcattgcacacagctttgcttgctcggaagaaggcaccaccaccaagtgacacacatgaaagtacatgttggacgtttgggctcggtgaaaatggtcagctcgggcatggaaccacaaaaaatgccatgtctcctcaacaagtgaatggcttacctgattctgtgtctctaatctctgttgattgtggtttgttccatacgagtgttctttcatcttcgggagaagcatggtcgtggggaatggaaaggggtcttggcctatgccccggtgcaagagtaagtgcggtttcaggtgacgctgtttcgcctttactgatttcatgtagcgaacaaaatgctaaatttgacaagccagttcaagttgcttgtggagcagctcacactgttctcgtcgccaaagatggatacgaaatgtggtcttgggggagaggaaggagtggggttctcgggaatggaaaagcagacgattgtctcacaccaacgcgagtgttgtggcctgaagtaaccgaggatgacaagcaagtggaaacaaaaaccgatgataatgaagaaaccaaaaccgaagaaaaagattccaaacaagatgaaaacttggagaagatgaaggttctcgagtcgagactttcaacaatggaacagtatgctagcatacttcatggctcaattttcgggaaaccctttgaagagaaagatatcccaatgtcattgcagaactcggggactttcgacgttgcaaaggaatgggagacgatgttagagtcagcagaccgaggtaggcttgttagattagagatgttttatcgaaacatgctttcgggggttaaagataagctgatgaagaaaaggatccaagaagttatgaaggaatgtctcaatcctttttcatccaagtgaaacaaatagatgttagaaagagtttgcattgtgttgtgttccaaactaaaaagtgttttggggggttttgggtgattttattatgaataaaagtggattcttagtaaggtaatttgaatagcaatttgtaataataataatgttatatttagtaatacttttgtttttggcttctaaagaacacacttaaaacttaccttaaaattaaaaccatacaaattaagtttgctaatgtgagactatatagataagatgaatgaaaactatgtttatagtgcaaagaaacattgtaaaatatatgattaaaatactaaaatgaaaattgtacattaccttaaaaacggctattctagtatactcttatctatttcaatagttaagttagtttattaactttttttttttaatatgttgtactaatttatatcacgttctttaaaatcacttaaaaaatattaaaattgataggaataaattaaaataaagaaaatataatactttgtttaatttaagcaattgataaaagaattatttacgacataaatacttaaatttaatttactgtagataaatacttaaatttaatttttgacagtaataatgtttaagttatatttttagaacattcgtagctacttaattatcaagtcaatgaccatgtggtaatccttaaattttaattttttatttaaaaattaatttaaacataccaataa

SEQ ID NO: 294631 - DNA, 1480 bp, Cannabis indica
aaaacaaaaaaaaaaaactactcattgcctatataaacaattagtctataataactcggtaccatatttagtagctccaagaatttagattttagagtattttatgaagcaagatttcattagtgtgtgtttgtaacttagttatgtaatttctctcaagataaccagccttgggagctgctctagccgcagagtagacaagtgacacaaaatcatctcgatcgaaccacgtaatgtcctcttgcaacatttttttcatgctttatgttttgttatcttagttacaatttcatgattttgattctaatcttaaatttgttgtccttgttgttttctgtttgtgttgtgtgtgagacagtgttacaacacttctacaccatccttttatctcttggcgcgagcttcaccaccatgacatcccattgccttgctatggctcgagttcgacaatgtttcttatttttggagagagaataattctattgattaacaaacaaaatctggtggaactttacttagatcaaaaacttttgatctttagttaagacaccaagaattcaatctaaaacttcattaactttcgaaaggttagtctctccaattacaaccattcgagagagttgttctctcctagttgagtcaaactcatctattttcaagatcatcaccatcctatatatagggttcaggcaagtacaaaaaaacaaacctgtccctttattaaaataaccacactaaaggtttgttaagtacaacgtgttgtattgtattatattaatattatttaatacaatattatgtttggtattaatttgtatcattgggttgtgtaaaattataatatctttacaataaactcgatcccaaccctgaccctggcttggactcgagtctgcaccccattcctggagagtgttttgtaaaaatagactttataaaaaaaattattagcaaaataactttataataggctaattagtaatttttccccttaaattttgacatgtaccaaatcgtgccctctgaacttttttggccgttaaaaattcccctcgaactattgaaattgttaaatttaaggacttctgtctaatttcattcaattttactatttcagtgattgtttatgtactatttggtagatatcaaagtctggggagcatgatttagtacataaacaatcactaaaattataaaattgaatgaaattagactaagtctttaaagacggccaaaaaaaattcagaagcacgatttaatatatgtcaaagtgtggaggaaaaattactaattagccttaaaaaataattttaaaaaataatctagcaattattatattaaattttggcataagattaaaaaaaaaaaaaaaaagaaagaatacaaagaaagtgtaagagagagagagagagaatgtactgaagaaggctatgtggagtgaggagtatcagcagcgagaagatcgacgagtcgagtctga

SEQ ID NO: 294632 - DNA, 1102 bp, Cannabis indica
gtgcattatatattataaccacaattcattaatttgctctctttcttttacttttttggtttgttctacacttctaacttgtattaattattgtatacacacattatatatataagtttttatgatcgacgagtacagtttctctcgatatatacagttaagtgtctttatttgaagtaattaattagtatttatgaaaagggtttgtacgtacgtatacgtatagttgcaccaatatcatatatttatatgctatatatataaatatatatatatatgtatgtatatatgttatagtaattgttttgcttatttgtttgttgaagctattcggatcaatctggagcaagagaccagaaaccgccggaaattgcagaggctgataatcatcaccccagtccaaagcctataattatataatgtgagtttttatacttataatataattatctatatttattctctctctctctctctccctttactaaatgtttgtgcggatcaaaacatacatatgagtgtattttcttttaaataatatctctgatgagtgaattcaatattggacttttggaatacttttttcacaaaatgatttgcaatggttagtttgttctgctctgttaatttgcaatcttttatatattggagtactgatattacgagtacgaccatcacaccttcaatataatgcgtgaattattacttgtacatataaatatatatatatatatatatatatatatattataacattaggtgttgggtacaagttcatgcatgattatcatttgtaatatactaatatgaaatcgtaattcatgatgaaacgattgacaaatggatgatcatgtcgatgaccatcttcactacaagaaaaccaacttttgccggcgcatttttgcgccggcaaaagtacactaactgcgccggcaaagctttgccggcgcagttgtgcgccggcaaagcttatctgggaagcttggtcggtaaaagactttttaccggcgcgtagagtaaatgcgccggtaaaacttccttttaccggcgagaaattacgccggtaaaaaataagcgccggtgttaaaaaatgcccttatcc

SEQ ID NO: 294633 - DNA, 5647 bp, Cannabis indica
aaatttgtatattgcagagaacaaacttgtcgggatgttcacgccacagcggaaagcagcggagacagcactgcctctcgggccaaggctcagtgctgataagggcaaagcagtggcgtttctagatggtccaccaccaccattgggttcattgagtgagacccgggttaatatgatgttggagtcagacatggggaatttggatgattggagaaggtttaaggaagtgggtttgttggacgaggcagttatggtgaggaaagaccacgaagcacttgctgagaaagtcaccaagcttgaatcccaggttagagaaaagttgcttgaatggcattttcttgttcttttgaattttgctattgttgtatccaatttggaggaggaaaagagttgatactactggagtgagcttgctcattgtttgttactgtgagaaaattaatattcatttttatgcacgggtggtaaaatatgtgtatttatttatttatttgggtttaatattcgttggactttctgggtaagctttaggtgtgctacgctggaacttgggtcgattagaacagaactagctagaccaatttaggcgagataaggataaaggtaaaatatatgcagatatatgatcctaggagttatatttgtaattgattagtatacagatacagcatcttgatattatgatagatgaggttttgaacgttacagggaagtggatttacatttttcttttaacagtttcttttcgattcctttttgctaactatctgtttatttcatgtagcaacctttcgctgaaagagtaaactttatatttgtacaactttcttttgcaataactaatgaagtatttgttgggcagctctttgattatcagtataacatggggctcctcctgattgagaaggaggactgggcttcaaagtttgaagaactaaggcaagatttagcagaaacgcatgagatgctgaagcgtgaacaatcagctcatttaatagcattatctgaagctgagaagcgagaagaaaatgtgaggaaagcactgagtgctgagaaacagtgtgtttttgaggtatatgctgtttcttaatgtattttccttctacttaaattcatccatatacttcttggtaccatactctacattatttttgtgttcaagggataagtggtgaacgagtttctccctttcatgagattgcagagtgtcatcttccatgcaatagaatcatatctacatgaggcatgtggtagttaatttaagtccctgcctgtatatatttgcttctataacattcttatcccagctactgagtagttgatcagattaatttaggattacgtgttattctgaatgtcctaagtagcttttgttaggtatgtaaatttatttattagcacccaaatcatagtctttatttataccggtcttcctcactgcagcttgaaaaggctttgtacgaaatgcatgatgagcaggctgaaatcaagcttacatctgcttcgaagttggcagaagcagatgcattggcaaatggaatggaagagaagtctttggagatagagaagaagttgcaagctgcagatgctaggcttgctgaggtaaacaggaagagtacagagttgaaggtaaggttagaagaggtggaggctcgggaaagtgtgcttcacaaggagcagcagactttaagtgcagagtatgttactatgttctagcttcaccagttttagtatcgactataatcgcatttctgacattttttggaacttggggatatcttaataacttttttttgttcttcaaattgctcttaggcgggaaacacacaaggcaacttttagtaaacatcaggatgatttgcaagagtgggagaggagattacaagaaagggaagagaggctctgcaaagatcggaggatcctcaaggagagagaggaaaaggcaaatgaaaatgagagaatacataaacggatggagattgaacttgaagaattagaaaagaaaattgagtcgtgtaacttggatataatacagaaagaagaagatataacgaaacggctagctgacttgtcatctaaaggaaagtgggggtgttattttttttgtttttaggctatgattggggtttgttaaattaaataaattttaaagtttatgcataaatattctgcgtcatttcattgcaggaagctgattctttgagaaacgttttagagatgaaaagcaaagaattgcatcaactagaagaaaagctaagtttacgagaaaaagtgagtgcatacttttacatgtctgttttgaaaaatgacattgacatccctgcctttgggttttaatgaaacaaattattgatttctttatatttggggtggataacagattgaggtacaacaattacttgatgaacacaaagctattcttgatgtgaaaatgaaggagcttgacgtggaaatagaagatagacgaaagtctcttgacagagagctattttccaaggcagatgcattaggaatgaaggaagctgaaataaaccacagggaagaaaagctagaaaagagagagcatgcatttcaggagaagtctggcaggcttaaggagaaaaacaaggaatcagaagagaaattgaaatctataaaggagagggaaaagataatgaaagctgaggagaaaaagctggagatggagaagcagcaaatgcttgcagataaagagagtgtacagagtctcttagccgaagttgataagataaaggctgaaaatatccagcttgagctgcaaatttgtaaagagagggagaacctgatagtaactgacgaagagaggtcgcaacatgtccatttgcagttagaattgaaacaagaaattgaaaattatagacttcagaatgagttgcttttaaaggaagctaatgatctaaaacaagagaaggagaatttcgagaaagaatgggaagatttggatgagaaaagatctaaaattagcaaagagctcagggaactacatgaggagaaggaaaatctgacaaaattgcgacacctggaggaggagagattgaatgaagagaaacgcgcaattcaggaatttaaacagcgggagatggaaaaccttaaactggaaaacgatcgggttgcagcaaaaatgacggctgagcaattagcaatatctgagaaagctcaatttgagcagagacaaatggctcaagattttgagttgcagagaaggaatcttgagactgacttgcgaaaggagcaggaagaaatggagaagctcattcatgaaagggagagagcatttagggatgaaacagaaagagagcttaacaacattaagaaactgaaagaagttgctcagaaagaaatggaagaagtaaggttggaaagacagagaaccaaaaagcaaagagaggagctagtgttgaacaaggagcaattgaaagtgaaccaacttgaaatacaaaatgatatagatcagcttggtattcttagcaataagatcaagtatcagcgagaagagctgatcaaagacaggaatcagtttctctcttttgttgacaagctcaagaattgcaaagatggtggagatataggaagggaattttcactttctgatttccatgtacctgaagtgaatcatggggacgctgttcctcttccaaactttgatgatgaacttgtggagaagtcatcagatggtttagatttagatttgggatcttctatgtcaggggcaagcatgtcttggcttaaaaaatgcacatcaaagatttttaaggtttcaccaagtaaaaaatccgaaaatgttgttgctccagtatctgtggaattaccaccaaccacccaagaagtaaatgagcctaaagttctcgacaatgatggaggaagagggccgggtattcctgaagataggcagccttacccttctaaaatttctaattttgctgttaatactcaaaaggttcaatttggcaatgtcatagagattgatgatggatatgctccagatcatagccaattggacagtaaggtggatgaagttccagaagattctttgcaatcagaagtgaagagtggtcttcaaaaatctggtaggagacgcaaatctgcattgcgtagaacacgatcagtgaaggcagttgttgaagaagcaaaggcttttcttggtgagtctctagatgaacctggatcaaatgtagtaatgcagcctagtgattcttacaatacaaatgaagaaagtcgtggtgattcgggtcatgctatgaaaggatatagttaccctactaggaagcgtctgcgtgatcagacatctaatatttcagaaagtgaacaagatgcgggtgatagtgaagcatgttccggtagtgtaagtactactggtcgtcggggcaggaagaagcagcaatctgttgcttctggtttagagactcctggaaatcgatacaatttcagacggcgcaagaagtaagttatggttatagtttcagtttaagcatgcctggaagatacataattgtacatgattattcttatcttcactctttctgtaccaacatgaaaacattttcactttgctagttttaaaatttcatctgaatgttgatcagtgtggactcaaccaatgttgacccgaaaaagacagaagagaaagaagctgtaggcagtggtatggtagatgtagcagcgaatccagaagttgtctccatatcgtcggacgtagccacgaagagcacccaaaccaaacaagttgtgcaggtgatcacaacgaaaactgtggaatttgctgaagagaaagttgttcgggtaacaatctttcgatttttgggttttgctgtttgctttgatggtttgtagataattttgaccatgtcatttcgttttaacctcttttattgactgatgatgcagtttaaaactacagcagatgctgatatagatgctgagcaagcaagattgggtgaaagtacagagattggcaatgaagtaaatgaaactttaaaacacggcggtgaagatgagagcaatgatgattacgatgaagacgaggaggagctgcatcctggtgaagtttcaatggggaaaaagttatggagtttcttcacaacatgacagctcaaacattctgtttttttttactgtatcaccacacatctaaatctacaaaccttaattttgacaggaagacttcatctttggccgtcagctatagttatttctcaacaccctttatttttctcctgtaattttacgacactattatccattaaggaggatttgggttgtgttattctagtattagatagttgatagtcattgtactcccttggtaataataaactatgatccttcccattgtatttcatcgtttttgttagtcaggaatatctccattatcgaagtttttgtaatagcaaactgtaatttactttttcccacatttattcatttagagaacaaatagtttgttatttttttttggtaaataccattttgcaccttgttttgcaaaagttgctaattggattctctgttttgttaaatgacaaaatggattttgtattttctaaaatggtaaaaatatgatactgagtttagtttttgataatttttttttctttaatataaccaacttgaagacaattcttatgacgaa

SEQ ID NO: 294634 - DNA, 2839 bp, Cannabis indica
acctataaatataggatctcagttctccagctactcactcatttatatacaaacaactaattccatttaaagagagtagagagaacttgaaaatacgattacccaatccaaaagtacaataaaaaatgaagctcaaagatcaatacgtgaaggtattacaatctctttcgtaatttgcatataatatattcaatatatttatattattttgcttttcatataggattatatatacttgtattattttcatataatattatctaggctaattagtaatttttctccccgaactttgacatgtaccaaatcatgttccctgagctgttaagagggcatgatttagtacatatcaaagtttaaggggcataatttagtagatatcaaagtctagggagcataatttagtacataaacaatcactgaaacagtaaaattgaatgaaattagacaaaagtctttaaatttaacaatctaaatagttcgagggaatttttaacgactaaaaaaattcaagagacactatttagtacatatcaaaattctggggaaaaaattactaattagcatattatctgacatacaaatcgtcaacaacaaacactgttgttacttatactcctactataacatatgtatatctgttgcagtctaaatatattgtatttataggatggaaaacagaataagcatggcctatgtacgaaaagtattattggctgggtatgtttatataccatatcaatgtatgacataatacaatatatctgtagtgtcagcatgcagtagaagagtatagtaaggttttcctggaccattcattccattccacacaacacaaaaacaacactcctacttcttttctccctgctctgtgtaactctgttcactctgcgcccattttcatgaatacatatatttatatcagaacacgtatcacaccaaaccttttttttttaccctcctcctgttttactttctctgacctcggtaaacgtttttttcactttcccttcccttattccgtacatgtcactccctataaaaacacaacagagtgaaaagttatagtagtagtgagaaactttattactgcagtcaaactctaacttttggtcctctccaacaaaaaaaaaacaaacaatccgtaatgacaatatcccatttgctattcaatacactactaatactattttctgtcttcatatttatccagtaaaacaaataaattattaaatatagataaaagagctcaaacttattattacttccgttcattatgcttctatcagtttaagagagtgtactgtacaagaaaataaacaaagcgatcagtggggagtgtacggtgtcggttcaaccaactagctctcgagacacaaattttgccgtcgattaatttgttcagcttgatggacggcggagattcgatagtcagctcagcttccaagtccgaaacatgcaagagccacaaggaagcagagaggagacgcaggcagcgaattaatgcccatctctctactctccgctctctccttcctaacattaccaaggtgttgttttcttttttagagtataccataattttcttattttttagcggaaaatgagggccattttcggtatttacagacggacaaagcttctttgctagcggaggtggtgcatcgggtaaaggagctgcgtgaaaaggttgctgaggtggtgcgtaaggatggagaaatttggtgcggtggcactggtggctcggaacctgactcgtggccgtttccgaccgagtcggacgaggcgagtttgagctactgtgagggaggagatacaaagctggttaaggcgaccgtgtgctgcgaggacagaccgggtctgacccgagacatgggtcgggctatccggtctgtgcgggcgatgccggttcgggccgagatgatgacggttggggggcggagtaagaacgtggttgtgatgcaatgtggcggtggggaagaagatcttagggccttgagaagggctttgaaagctgttgtggagaatcgggttccgggttctggacaggaccaatccggttctgggaataagcgggctcggctctatggttcggttaacgaaggcgattatgaacttttattaactgaaaattatgtgtaatatattttgttaaaaaacaaattatataatctttctcgttcttaggaaagtccaaaaatcacttactgataaaatatatatttatataaagtatacaactcaaggaacgattggtaatgttttcagaaaaaaaaaaaaagaaaaaaaggaacgattggtaatttggtatgcgtgagactctgcctgaaaatgagctgaattgtgttgaatttgctcgattggtgaaatgggtgacttgggggtggagcttctctgaatcgttatgtgtgatttcaaccttaatatcagtgtaatgccgtacaaattatgcactccctttttttctttcttaattaataagcttttggtgaattgactgtttaagtatgtacgtttagtttgactacaatattatcgggtttattgggttcatgaattatttaagctataatgaacatgaagcttctttgtttttttcttaaatgaaagttgcaacttcattaacttaaattagggctgttcatccgatccaataatcacttttttggtcaaacaacattcaatccgcactaagtgcggatttcattttttggatccaatccaatccgcacaatagctcaaatctaatccaatccaatccgcaaaagtgcggattggatcggttactttggattggttactttttaatattaaattatttaatatttatgaaaaaata

SEQ ID NO: 294635 - DNA, 1965 bp, Cannabis indica
gcaataagggtttttatacgattttttgttgcaatttaagttgcagcgccagttacaataggggtttctatgtagaattctgtaaaaatacaaaaaaaaaaaaaaaactgttttgaagtgtaaaaatgaaaaagcccctgattattattattattatacgatggtacgtgcatatgcacgtatcgattactagtatatgtatatatatttacacatattaaattattataaaataatatagaataatataaagtagattaaaaaaaaacagaaaaaggaaaagaagaagatgaagagataagagaaagtgaatgagaatttctcagttctttatttcaatgaagtgaatctctatttatataaaaacatgactaaaagaatgagaaactaaatcaatgtaataaaggaaaatacaactaagtattaatggtgataattaatttagtgatttggacattcataaataatatttcataacactccccattagatgtccataaaaattgtctcataattaaaaactttattgaaaaactcgatcaaaagaaaaagagtgcagtatgaataactccccctcatttaaggcattcgtggagatcttctaatcaactaatttcaatcttgtatgtcgtcttctcaaagaattacagattagtgttctcaattcttggtatgagaaacctcttggtatcattatacttgtgacttgataatctgtgtataagcacttatctataaattttttattatagtgtagtaccaacaataaaggtttcatgatttcgttatagaacagagtagtagttttagatagaagcaatcaaatgttatataaattatatatttagtttctcattaaatatgaaaagcttagtagtttttgaaacttttttatgtgtaaatcaaattctaggagttgtcatcatattgctttattcttttttagtgtagagagcttgaacttgatatctcctttctttaatgatcaaacttgaaacaatcgaaggaagcataggtattttcttttcaaaagtttatttcttaagaaatgatcgactgaatttcacagtataagttttgtcttagtagcttcgagttacattgactgaatctgacagtcgaagtttttgatcgaaggttttctataagcaatgactgagtttgtttttgaattatgatgaccgaagctttgagtaacttcaatggtgagttatatcggcaccttcgattaacatttttaaacaaccttaataatggaggttggaacaatgcaaattattgatctgtgattgaaggttttcggtaagtaacggtagagtttgttttgacttttgaggatcgaagctttgtgtagctttaatggtgattttttttagtcggctccgatcgtcatttttggtagatcttcaaaagcagaggttctagaggttcgaataatcaaaggtttcttttgtattttttttttttttttttttgttttgaaagggttatatatggttcgacagtagtgtgatgcgcaccattttgaggagaaagtggttgcttgaaatttgtaagaccttatatttttcggttcggtaagaatatttttagtaaatttcgataagaatatacatatataagtatatttgttttatatgatatctataatattaattaggtatataattaaaaaattccctcgaattactattgcaaaaatagaaatttgagttaaagagtattttgttactctatatttataattggaccactttgtttttttagaaaatttagaaagtattatttttgttaaaatttttctattttttacgtttaactgatatacaaataactaaaaatcaagaacaacacaataacaagagtaaaacataagaaaaaacataaaaatataaaagtttatattttctggaaataaaatttcaaaaatcgtaaaaatatttaaaatttcgtaaaactatattt

SEQ ID NO: 294636 - DNA, 7955 bp, Cannabis indica
ctacaatactattgtgtaggtgctatttttccaaggctcatagattaagcttttctgtttagatatttagccattgagccacaaaatgttccatcataagcactagtttgattttgttaagtatagtcagtatgtttaattgtatctccatgcatatgttgctcatttcctgcattttaaaagttaaaatgtcctagaatagctttcaactgctctagaagaatttactggtatggaaggagattgatagaatttactgtctatgtttacatttaggattgtcaaaagtgtgatattcatatcttaatactttactgtctatggcagcggattactataccagaaattttggaagatgaatggtttaagaaggattacaagcctcctgtgtttgatgagaaagaagatacaaacttagatgacgtagaagctgtgtttaaggattcagaagtacgtttcaaagatggttgtttattttttttttattttttaaggaaaaaaaaacaaatttcctgtgatataacatggctgatcatataacaggagcaccatgtgatggaaaagagggaagaacaaccagcagctatgaacgcgtttgatctaatttcaatgtctaaaggactaaatcttggcaacttgtttgatgttgaacaggtttggacattagacacttttctatatggctatggtttggtcagtttgagaccctttttttcttgtgcaataagtcttagacttaataaccttgtgaaataacacccttgataggtattctgctttgaatttagattttacttcttcttttaaggaatttggcacttggtaaaaagaaaggtttcaattttggtcatattttctcactattatcaactattcttacatcgagttctcctattcttgtcatattgttttcagggctttaagaaagagacaagattcacatcccgatgccctgccaatgaaatcattcataaaattgaagaagccgcaaagcctcttgggttcgatgtacacaagaaaaactacaagttgagactcgaaaatatgacagccggaagaaagggaaatcttaatgttgccacagaggtaaaaccattgtgttttatcattccatgacagatagaatcaacttctggttatacatttttgacatttttgtatactcatcatcagatattccaagttgcgccgtcacttcacatggtccaagttcgaaaagcgaaaggagacaccttggaatttcataaggtacccttttcctcgccggtgttggtttctgttgtgattgtgaaagtaataacatatataatctaaccaattaattccaaatcatatttgtggtatatgcagttctataaaaacctctctacttgcttggaggatattgtttggaaaactgaggaagacatgcaatcaaccaagtaataaattgtgtccatccagaagagtgatgaccaatagttttttttttttttggtgtatttggaatcaagctacatgaacagctgtttctcttctcccattgttctatatgttcattctttccttatctttttttctgtttttttttccttctatctttttctctttcttgtcatattgatggacagacagagatggctttcatcaaatgttttcccatgttattatagttggaaaacatggatatcattcataccccataccaagtggaattgtttgcgttcatcttcattcatccttaaatttattagtcatgttctagtcaaaaaaaaaaaaacacacttaatagtcacgacgtgagagatttacaattctatagagattcttccctctatatcaatttctaaaataccttttgatgatatgcctactcaaattatatactaaaatagtacatatagtgatgtgtgtgaaaaactgatttacagaagaactataaacaagtgaataatgtattgagtctcagttggaagtttggagctcttggtgactttgtgctggtaattgggtgatttggtctcgagttctcgtttgaatcctcttatctagtcgagttttaaaatagggaatctaagggattttgatgaccttacttgatttagagtggaggtaacgggatgttttgtgtctagaacggatcgtatcatccaaagttttgtgggaactttcgctaaggacatgctagtttgaaaggctttgaaggatagcatgttttctttgccatcgtatcatccagacatctctgcgaactttctctaagaatgacttgttagtttggaaggctttgaatgatagcttgttttcttctcttaatcaggataggtttgaggcttctaacccattctttaagaatctttggaaaactcatctccatgagaggcttacattgtttgtttggaagctttataacgatgttctcataatgggttcccacttgcaaaccacttttggaagtttcccgagccattgtgtcatttgtaatgaaggggtggtgacaccattgtgcatctgttcagtcgatgtgttgttaaacaattgtggtttgcgagctaatggtaaatcaggctagaagagtttggttttaattggggtgctgacattgctaagtagttgcttgatcctcatttctttagcatgttttggacctttagcttaggaaggagtttattatttatgggttgttttggttcacaaggtgtagggttttcataacgagtgctaccataatgagattatactcccatttagggttatgaaaagaaagttgaggttgtcttttttgaacattgggagctggttatgtcagagtctcaattcagggtgtttaaagacttttcgcctccttcggtggagcattctatccttaaaggaaggccttgggtgtatgtaaatgctgcatttaaagtttggaatggtctctgttggtgtggttgttcgatttgagaggagtgatgttcaagccttatttgtagagagattgacgactaggaatgccttagaggggagaaattttgttatagttactggagctaaggtgattcatgagttgaatttgtttaatgttattttgattttgaattttcttactatggtgtgggcatgttgcaacaggaaattgttttagttgtaaggttatttggtttactatagagataaatatagttgctcatactttggttaagtaccaggcaatctctaactttatttttttaagcttccatgaaatgattaatgtgatcaccgctggttattcaacgaaaaaaacaaatgaaataaaataatatttcaatttaagtcataatgagatattttttcaagaaaaccttaaatttagaccatgcaaatagtgtaaatttgtactaaatttaacttaacaaatattaatgttatatttgtccaaatttattattgagctcccataaattatgtattagactaaaaaatcagtaaaagttttaaatttgcattgaaagtatataaatttattatcaaatatataaataaaatgttaagagttatcaattacattaagtcgtaagagtaaataaaaaaatatatattatggtgtaaatttggcttatgttatgttttgtgtcaaattttacttacattttacattactattgaatttataaaaggctaattaaaatttttgctccctaaactttaacatgtactaaatcatgtctcttgaatttttttgaccattaaaattctccttaaactattgacattgttagatttaaagacttttgtctaattttaatcaattttattatattagtgattatttatgtactaaaacatgctccctagactttgatatctaccaaatcatgtccctcgaacttttatatgtattaaattttgcatcttgaactttcattcatgttagatttttttttacgaaaaattaaacaaaagtctttaaatccaacaatctcaatagttcaggaacattttaaacgactttaaaagttcagagagcatgatttgatacatgtcaaagttcggggagtaaaattcctgattatcctttataaaataagactaaaaaatataaatattactattatacactaattgtaacgctttgtaaataattagtaatattttataatattcttgtacttaattctactgataataatacaataaatttagtgtgccttttagcatttctaaaacaaaaatgcacattgcatagatgcaccgccaaaaaaaacaaagattttagtaatttataagaaaaaactcaatttagggcataagtttgagcgttttcagttttttaaaatccaactctacaattcaaaatctctctctctccccattttcctcttccctcttcagtatcggtctaccacttccaattcaccattgcagtccacacctccatagtccctcagctatctcggtgaatatcttctctctctcgctctcctttttggggctaaattccatttcattttatagctgtattttgatattgtgtgatagtgttatagttgatgtgtttagtgttcgataaaatgactgtgtgaagaatttgttatattaagggcaactaacgaagcaaattttttctcaactttttgtgcaagttatagctctgaattttgaaacgacaaacaccactgaagaagaagagcacagagcgatatagagagcccaagcaaaaaccctctgtttgaactccaaacctacctctctcaaaatgagtaccatgaagttttgccgtgaatggtcagtcgactacttcttctccttcttctttacctgtcactatatacataaatattggattttgtttttgctaattgaaggttgtaatttcgcagtaacaacatcctatacccaaaggaagacagggatgagaagatcctcctctatgcatgccgcaactgtgatcaccaggtcttcctctctctctctctctgcacaggaccattctgtggtttggttttatctgcaagacattcttaaacttaaacctattatcaaatttttgtttcattattcttttgaaattggtggggtttttactgggtttttatttgatctgtcagaatttttattttcttgacttattactacatattcctcaaattattttgtaaacccaaaatggtggaaaataagccttaggctttaaccgagcgactagttcgttttggaaaatggaggtgaaccatcctgaaagcctctagagattgaaaagtagctttcttgctacacatgagtatgaactctttgttcagttttttatttctttttaaagtttatattggtaaattttaatttgctgttaaatgaccaatgagaatatgaaaatatgaacaaagtcagcttcttccttttttgtttgaaagcatgaacaaagtaaggtttagttctgttatgttatggtaatatttctgaacataggtggtgtttgatttggtgtaatggaatggtaatagtaatgacattggtaatgtaatggaataagaatggtaataggaattgtggaatgaacattgtaatcagaattattgtgtttggattggtatgagaatgtaatggaataaaatgtgtatggaccaaaataaccgtattgttttcattttattattataaaatattcaaaagaaaaggtaatatagaacattgactttttttactatatttttattaaaatcttattttacttttgtaatggagtgtaattgtaatgaagattacattggttttggcatgtaatcatcgttacaatactcaatgaaaccttaattgtaatggattacaaaagttaaaattgaaaaacaaacgatgtaatggacctattcattaccattacaattattattacagtgaaccaaacatcacaaactggcaagcctttgaaggtgatattggttgtactcaaatgtattttttttctctttccattttggtgatcttttactgattcaaatggtgtcttcttctatactctttacccctctgttttcagttagttattagtctcttattgaacttcaggaagttgctgataacaactgtgtctatagaaatgagatacatcactctgttggagaacgcactcaggtattgcaagatgtggctgcagatcccactcttcctcggacaaaagctgttcgttgtgctcaatgcaaccatggagaagctgtctttttccaggtcaaattcctagcctttcatttatcatcaacttattttatagttgctctttataattgtgagtttctgttaagggaaaagagtaagtcagctcagaactaagatatcctgacaaagaattataaatctttactcttgttgtgggtaacattaaattagtcagaaaaacacaatccatttcgtgttgatgtcttgttgatagttttattctgttgaactgccctaacaaaagcaacaaatgtattttttcaattgaaaatcgttggtataagcattttaccattagctttaaccggaaatcaagagatgtcgagatgatagattctgcattgtccaccttgtgatatcatgctccggcaatcacaagaccactaccgaaagttcactaacgtttcccctctaagcggatagggtgaatgatatacttatattagtgtttctaggctctctaatgttgtgatttttatcaaaaaaagaaaaaggctgtctaatgttgtgggggtgtttttgctatttatgttttcaggctactgctagaggtgaggaaggaatgactttgttctttgtttgctgcaaccccaactgtggtcataggtggagggattgattttcatatgcaaaatggcaaaacggattttatgttgtcttgatatagttaacatatgcttctttctttctttttcctcaaactgaggatgtggtctgttgaggaatttgttagtgcctttgtcaaacacagaatccttaacattcaactgatggtttctaactgaacggaactttaaatttgacgtgataatggagcaaatttcaggccttaaaatcagagtactgcttatttgctaagggccaacacacgagtattattggtgcaatttaacatcaaatcttttatgttttaatttaataattaatattgaaaaccactatgccaaagaacaacttatctgtcctgagtacactacttggaatagaaagtgaagatttgttgtttaatttgtttgtagtgttgtatatcaatcaatatataaaattataattatggctgaaaacaaggttggctatttattgtgatgcaattgcaaatactgtataatgtttttttttgtcaagcaaatataatgtatattgtgtttggcacactttgcaaatgtgtactatattttagtaattgaatcaccataatatttagctataacatcattataccttttatagtaattgtaattttatattttcaataaaatattgaaagagtattaattaaatattaaattttacaattgtgcattagaaaatactaaaaataaaaataaatttttggcagatggtcttactaacacatcaagggctcgtttggtacattgtattagatagaggcgaagagaaagggggacatgtggggtcatttgcccccctcaatttttttatttatataaattttgtatttaattttttaggtattttatatttaatcccataaaaataatttttttcatttttgtccatacatatttttatatttatccctataaaatttatatttttcacttttattctcacatatatttatttttattctcatagaatttacattttctttaataaaaattatattttttattaatgtttcaaaaaaaaaaaaaatttaacccccactaaaacgttgggctggctccgccactggtattaggtcgatgtaacagctgaaaaataggatatgaataacaatagcaaaatggtccttaaaaaaagttcttttccttaaaaggaaaatgagaagacagtaa

SEQ ID NO: 294637 - DNA, 3211 bp, Cannabis indica
aaagtaagatttttgttgtggtatgttatccctgtaattaattaatttttcagttaatatatgcaacaatgcataatctgataattaggttttgtcatacattcacaaatatttcgatcatagctaactatttgtttctatcaaattcttcttataacgaagaaccgttagtccatgtgcatagctgtattaataattaattaattaagtcaaatcaagcataataaacatagatatcttgatcactattattagtccatggcagctggtctaacttaataaacttaattatcaatagtgatctcttggagttcaaggaaaacatataatattctataatatatataaaaatatatcattatatagaacttggataccacgccttagatgtgttatacactacattaaacaatgaaaaccaagaagaaagctgcccctcctaacaaaaataatcacaatatcgaaaactgtagatcatcatggccaaatctcccgcaacgtctcatcaaacacttagagaaacattcatctctaatgccaacaatcaactttgggagcctaacaaagtcatggagatctcacacaaacaagcgacactgctgcaacgtcattaatcataagcatcatcgactaacacaatcttataattggctaagcgaatccgatgatcacaagtactacaatcgaaaccaagtcaaaaagcctcaactgtgccagatatcgtttccttttgaccacgtgaacaccaattggtattttaggaagagagagctgaaaccaattccttggctaaacttttggggttgttgttatggtcatttggtggtgcaacgagtggatatgatgtctcaaataactattttcgatcccattgaccaacaatgtggttatggttggagtgttgagaatttaggggacaataatattcccatcaaaggtgtggcattatggtcttcacctaattcttgttataattctaagaaaagttgtgtcatgatggtggtgactgggatttcctctccagctttcatgttttattggctgagaggaaaacccgattcccatgattggatcaaacaagattgtccgcttgttgatccacatgaagaatactttcaaagcaaaaaaagtgatcgtaatcaaccattcatgcggtttacaaatgcgattggagtcaatggaaagttctatgctttaagctcacaaggaacgcttgtggtgatcgagcatgtggttgacatctttgaaatcaccggtgttgggaaagcgagagccattccttctgtactttgtaagggttttagggagtgcttgatagaatgtgatggtgaaattctgcttgtgtttcttgtatttggggaacaagatggagttgtggatggtgttgaggtttataagctttgtttggatgatttatctttgatcaaaatgaagagtttgggtgagaagacattgtttgtgggcagtgattgttgtgttttagttgatgctgataaggttggttgtaggggcaattgtgtgtatttcagagagcaaagagagggtgacatggatggttggttagaatatgacatgaaagtgggtgaaatttcttcagtgtggagtcatagtaccaccaaatgtgtagagtgggatgaacctattgcagaagatgatgatccagatcttaaaagaaatagagaaataataggctacccacataagtacaaatatttatggtaaagatattgtatgtgcttaactaataagaaatgttgttgatgttacttacttgtttttcaaaatatgacgtatgtacttttcagtgtgttaaaattcaattagacatcaactcaaaataaacttaaaaataacaaaacagcaaccccaatttaattatatgcaaacaactacacttataagcaaaaataaatcaagaagttaataaacattaaaaaaaaaataccaaaatatttctacaaactgtatttttggtgtcaattttaaactgacagttatacttatagtgtaagttcatagagctaacacccttatcgagacaaaaagtgagtttttggtgtcgttttacaactgacacttaaagtgtacatgtgtgttttttacttttactgtcagtctagaacccacaccaataggttgaatgtcctcattagtatcagtttaaaactaacaccaagaaaggtatttttgggttatgtttttcttttggcatttataaccaacacttaaaggttttttaggggttttaagtgttggttttaaaatgagccacctctcctcgaagtcctgtagaagcgagaattctcatggagacttctcaaatgggccatggagatcttaatcaattcaatattcagtatcaaccgagaatatctatcaaggacaagccctagccgatttttttatggaatgcaccgggattagtgacaatctggaagagtcaggtccatgactggtgatctgaaaagtctactttgacaaagcctcaaataaaaagggtgtcagagccaaaataatactaatttccccttaagggcacctctagttcaaattcatcgcctccaacaacgaagtagaggatgaaacaatgatcaccaacttacatctaactaaggaagttggagccgaaaacattaaggtttatagcaactctcaattagttgtgaaccaaacatcatgggagtatcaaactaaaggagaaaagatgactgcctatgtctccaagggtcgagaactactttagaattttagaagatataccattcgggaggtcccccaagaccaaaacacctttacatatatgctagcaaggcttgcgaatgattcgacaatagaggaacacaaagtgttcgaggcacttcaaaaggcttctcaattcgtgcctcaagaagatttgttggtagaggtggctccaacatacccaggctgatttgtcaagtgtgtcacaaacttggccacacaactgcagtgtgttgttacaagttcgacaagggatttttcacccttaaagctggtgaaacttgagccttcttaacagaactagatgactcagatgatcctcaagcctattccacatcaatactgcctgactatgctattgatcaagaatggtatgctgacacaggagctaccaatcacatatccccttggaaacaatgagcgcaactatagaaacaacacgaaaataacaaaaaaaattacataaaagtaa

SEQ ID NO: 294638 - DNA, 4233 bp, Cannabis indica
atataccaccagaaaaattcttttgttctttgtttattccttttctctttttaatggaaaatatttcagaatttcatataattagagtaattctgaccaaccataatacagtcaacaaaaatagaaaacactaaagtaaagattacctccaggtagaaacgcccatctggaagtggttcacacctgtatgtattaaaagatgagtgagaaaataaaagcaaaaattaaagatctgatcatatatattgaaatattaatgagtaaaaaactgaaacgctaggcaagctgattggagagagaacaaatgaaagacctactccgttatctcaacttcacaagcaaaatcagctaaggaatttgttgaaggatcaacaataacctacagaatttacacagagacattacacattttttataattttgatatacttcaaagaggaaaacttaaaagagaaaaaaaaggagtactaaagcaccattcccatacgacgactcccttccattatccttctcacctgtgtttcaagtgaaactttatataaataacatacactctagcaaatgataaattaaaatatatagaattgccttatattaaatacccatccatcatcttccccttatcataataaggtttaggttacaaatttactaaaagaattatttgaaacatagaaaccgtgtataattcagaaagacatccacaataatatgataaacttgaaaatgtatacaaaatctcaaacttatatgcaagtacaaagttcaatgatcatgtaaatttctaaataaggaacttctggaaacaattaattattggtaaacattttcaatactgtattgtagtggtgatatataaaatccatgtgcattaatgaaacctcaaaccgactcaccattagtctatatcgaggttcaaatatatgcagcggaaatttctgacatggaatgacaacatccatgacaaaaagaggcagcaaatcaacaccaaagtttgtcatactttcatgatctgactttcttgcagcatattcctcagggaaactcttttgtataatactgttaagtgtaacactgagcaaaacaaaaaacgatgtcataaagcagtgctctggcaaaaaatctatgaaaactagaactccatcaggaaataaacagcaaagaagcttcataataaattagactcagaccctaccaaaatgatctaacaaagattgacaaaattcaacttttacaatttatttgagagattatgtaaatgactagcattgaccagagaataataaaagcgacatcaaggaaataaagatgattgaaaagttagtaaattttttgatacgtctattaaagcctatgatcttgcagagttcgaatgaattaattaagcaatgttggtctatctactaatcaaatgattattagccaacaacgttgttatatgcctaaatgatctcactcatggaagggaacccctacatgtcttgtcccacaccaagcacatggttgtaacaaaaggataggtaggaggaagcttcactgatgcttgaaaggtaaaaccaaaacaagtgatctcgattaatttatcaacagcaagaaacttacctgatagaacaagttcttggactaatgaaaagaactttccggcacaatggacatttattacctagtatttgcaacaaggattaaatataagtaaatataaattgaacatatcttccaaaaataagatcaaccgcacaataattgaacaaagtattttttaaaataagatcaattatgcactaaaagtactcactacgatccattgaccgaaacaaacatgaccgacaaaaagaatgcccgcaaggagttgtgataggttcataaaataacttcaggcataatgagcaattaaattcatcactgagttctggtccttcatggtatctactacccatcaaactgtctttgtatacttaccccaaatcctgtagaaaactctgaagagaaatgctacataaccaaagaaaaacatcaagtattacaaaatggtacattttataggagtaggaattagcaggctacagtacatatatattagtatgtaatcagctgagttactatgattacaggtattacctagaaggatccatgtgaagaccagaaagaagaacacctcgggccacctcgtatctctccaactgcaagatgaaatgacagtcaaattgacaatccaaatcaacaactacaggtgagggaagcaatgatgtttgtaagcacaccagtcacaccccttcttcagaacactacgctgaagaattaaaatatcgaagtgcctcatatggcataaaatatggcatcctaagcttcctatttttaacagtgagttaatctacttattgttaactagatatgccatctcttactaaatactaattagttatttcgtagctattttggtagcttgacactcaagtatttacaaagagttgttaggcattttggtaaacataacttctgcttgtattattctcttttgtgatgaatttttttgattcagtattaagccactgatgctagcttagagtgaggggagaaaaggatgagagggaggtatcaagttcgaagctaaaataaatattcaccataaaataaatattcaccagtgcacgtgataagacacgttcagcctagagtaccagtagaattcggttagaaaaacccctcccctatgaactgtaaggaaatggtgacaaattcttaccaaaatgagagcactggcctttaacaagtatggcttaacagcattacttcgtaggttgatcagcttctctgcatcctttaaggcaagctgaaataatcggaaaataattgttttaacactgtaggcaagagaaacttttgattaactaggatccagatctacttacttcagcatgcgttgtaggatccagcccattcaatggactatcttcagaggttgatggaggtctttctatcaaatatttactatacctgcttcagagaagagaccattagtggaaaggaaaccattctaaaatatgattggaaagcaagtaataaataattgtggcactagtaaaggagatgagccaatcaatgactaacatttaacctgatataagcagtagaacggttgctaagaataataggatcacttggtttgatgctattagcttttatgtaacaatgaattgcctgaagaagaaatatgtttgatgagcacaaaatgttcaaaaaatgataaattctacataaaattcaaaatgaaagcagccacatatttatgaggaaaaactattgcaagcatatcaaactagttggataagacacaaggatcttcaaatagatactcgtactaatatcaatactcaaattaactatacatttgccaagaaaaacaagaaaatggctaaggttatacatctattcacttacatggaggccatgttctaaagtatgtgcaaccacatttgaattcacttattgttgtaaccttaaaaactaaaccagcttcttttaaaacatgaaataattgtacaatgagagccgacagtagtagggtagttatctatttagctcagtattttccatcacgaccttaaatcctctacgtatgtttcacagcttcataaggattatgtcaaaaagacaagaccatatttttaaaacatgtagctgctcctccagtagtctcccataattgcaaaacataaaacattactggggtatgtcaaattaaataataaatttatatataaaaatttagaactcagcttctagggaactaaaatatcacaagtatattgaaaacataagaaaataaataagaatgttgctacctcctcataacgcctctctctaaatgcttgatttcctctctgcatgaggtgaaaaacatgagtaaatgtgtctaagggcaatgcttcctctccttcatttgcctacacacattatgaatttgtaatcagtgtcgttttgattcacaatcataaattaagatagtctaatttcaattaccttagctttattaacacataaaatgtcaatttttaaccctttttttactgaaactaggattcccgccaaaccaaaaactatagcaattgctaagtaggtaccaggatcatatcaaacctcaggccttgaaccacgcctgacaatttcagccacccctcttgggtttacttttttttttttcttaaacaggtaaatttatattatataatgaaa

SEQ ID NO: 294639 - DNA, 6735 bp, Cannabis indica
ccaagaatatggagagcacaaacattgataacattttagtcaactatgaaggagaacccgttctggtgcctggcttgactcagacacccccagagccaactgaagaagtaagccaagatgaggttgagaataccctttccgtcgataaacctgttgaagcaacattcgaagctaaagatcataatttgccagaggtaactgcttgattgatgggtgtgaagcacttttcctttcatattcttcttcaactaggttttcttagcttgaaataatactccattatgctaccagaagatgcaacttatctaagtctgagttttggttctgctactgtccatttattttttgttctagtaatctatttcataaagagtaatttacttaattgatgtttttagtaaaatagatcttttgtaatgaaaattcattacttgttaaattggttttctgctttttcattttcaccagtttcaacagaagtgtacaaccaaaatgccaatatggatatccttgtatgaaaatgaaagtacaattcttgtatactgttacattgttttttggttgaatgtaagacacaagcattaagcaattaaaatgagatattgaatcatgtttttgcatttgcacatgaaactagaatgaatgcaaattccacatatggtaccatagcctatttttattgcaagtttcaaagcatttcccattcctagagcattcgttttctttatcatatgattacgaatgatgtgatttcttgagcagtaagagaacttttattttccatcactattccattttatgcaacatattattctacagtatcagaataccttgtgatctttgttgttagttttgatattgatatcctatttctttctcttgtgacattgatacaaaactaatagactcagttggacaaggaggaagaactaaacaaacacaattacccttttgaaactggaacaccatcatcgaagatgactgatgaagaagaggaagtgaagacgcttgaaaatcagctgcgacaaaagcctgtgatcactgaattggaagaagaatatgactctgatgtagaagacttgaatgtcctgaacaacgatcttcaatggggtcgtaaaactctggaaaagtttctgacgaatttcgggttgttctagcacctgttgttattgtttgactaggcctgtggagtgtaatatacttgattctcaatatggtttttttattatgtacatattacgtagctaatattgttgaaatcactctgcatattctatgagtgtgcttaatagaatagctagctaagtatcaaatgtataattcttttacgaagttgagactgatatggtgaattttcgttagtaaaagtgttactttgtgatttgcagcaatacccttttcataataatggatgagatttttggtaacaatgaaaatgtgaatgctttctattcacttcaagttgaaaaaaaggtattgaaacattttaaaatttttgaatggtttctaacttttgaaactgagaagcttatagagaagagttccaagccatgtgaaagcattgaatattaatatgatcataaacacgaggctttcacaagggagtaacttataattagttaatgatttttcagatgcgatattatttaaactctattgacacttaatcacataaattgattttttagtagtaaaatttctccccactaaaaatttgtcatgttacacttatgtataccgtattatgttcgccgtagtacttaacagagttttttgaacgaaagggatactaacagaagtgagatttggaggttttactactaaaaaatcaatctatgtgattaagtgtcactaattatagagtttaaataattttgtcgccactattcttatattaaatcatgtaggattcgatacttaattgtttcaataacaatatgccaccactaacttttaacattaatattttagttataaaacagatctgagaaataatgtaaacaattcccaaggaccactagattgatgtcaataataatagtaatcaaatagccgcacagcgtacggcgacgaaggttacaccattttttgatactttctatgatgatgatgatgatgttattattaatgaatgaattagattcttggataaatctacacacataccaagttatatctgcaactacaaggcactagattcggtctttcttaaacatcaaaggagaaggttataataataataataataataataataataataataataataataataataataatttgtacttgaattttttcgagaaccgtaagcaataatacaaaataagcgatgtcgaataatgcataacaatttaaaaaacaataatacaatattgcatggcatcacaaatagaaaaacgacacaattgtagaaatacgacagttacaaataaaaacacggtaagcactttggatatttttactagaagtaaaatatatagggtggattttgtaaaacttttctttctaaatttttaaaacctttaaattacaatttttatgtttgataattgtttttgaaaaattaaaatatgtttgataactattttgtaattttaaaaataataaagaatgtggttggtaacttttatttttgttttttgttattttatgtaaggagatagaatataaggtgaggtgagtgaaaatgaagttgaatattgatgagagaatacaaaatagattacaattaaaaacgtttaaaaagaaaaaagaaaattgtttaaggaaaattgaaaagtagtttattcttggtttcaaaattttggttcttattttgaaaaaataaaaaatgaaaacagaattaccaaacatttttaaaaaacaaaaatatttaaataaatgttataaaacgcatccataattacaaagacaatatctctagaaataataaatagactttttcaaaatacctgatatactcattttttggactattaatgaacgagttaaattgtatgccacatgacataaatgatctgcctataaataacaattttggcaaatactgtgggataggtcgaatggactcaggatttaacctgttaagtgatctcatctaattggatcacaaaatttatgaagagaggtattttagcattatcaggatgttatttcgataaaacatttaacatctcataatataaaaatcttgtagtggctcgtaatacaaagatcttaaatcactttataatacacagcagtgatgcataatctcgtattacacaacagtgatgattcatctcataatacacaataatggtgaatcacctcatattacacaatagtgatgaataacctcgcaataaacagcagttattaatcacctcataataacatagcagtgatgcatcaccttgtattacacaacaataataaattaccttgtaatacacaacagtgatgaatccaatcataatactcagtcagtgataaatcatcttgtaatgcacaactgtgatgaatcacctcgtaatacatgctcaataatgtatctcctcataatatacattcatcaatgcatcacctcatattacacacacaacaatgcacctcatattacaaattacttatgaattaagtattgtaatactttgagtccaccatatttatatgtgtaaataaatatgacactcagagtatatgtattacaaattatttattaaaaagtttaaagtaatacttagctcaatatgcttataaattcaaacaagcatattagtcaacttgtgataattaactaaacaagcagacaacactgcttcaaaggtcaaataatacagttagcatattaaaattgttatgtatcaacgaacaacttgtactatctcgaaaggctggagagataatagatagtaataacttctcaattctgatcgtaaatcaaaaaaagaatataatttttgattcatttactaataaaaagatctcttctttaagttggagacatgccataggcatattttattttggtcatacatcatgcttagtctctcttcgtcacagcaaccaaagattttttaatcacttgcgagcatataagtcatacaaaaaataatgatgaatgaataattgataagaacagcttaaaaaatatgatgttttgtttgtttattcatgtactcattcaagagaatcaaactcgtcacttattcatgaaaagtaaatgaaaatagattaagacattccaagttgttcaaagatgcgtatattcatttagaaaatgagtagaccaagattttcaacatgaattactaatttggtatatgaaaacatcaaggcccatgcatctagtcgtagtacatactcccataaatctagtcaaagtacatactttcatggttatagtacatactctcatgcatctggtcatggtacatactcccatgcatctgatcgtattacatacctacatacttttggtcatagtacatactctcatacttctaattgtagtacatactcacatgtatctggtcgtagtacatatttcccatgctttaaccatagttcatactctcatgcttctggtcgtagtacatattcctcatgcatctagttgtagtacatactcctatgcttctgatcatagtacatattctcatgtttttagtcgtagtacatattcatgtctctgcttaaaatacatactcctaatatatcagattgtagtacctactccaccatacatcaatcatgagaaacacaaacgagatgctcgtaatacacatgacgtagtacaagtaacacccaactcgtatgttacaaaataagctacctaaagtggtgtcaaaaagaatggaaaggcaatgtataataagtcatctttgtgtaaatcacgaaaaactgacttaggggacaattattatagccattttttggactactaaagtacaagccaaattgtgggccacatgacataaatgatcatccatgtataaataacgattctaacaaatacagtgtgggataggtcgaataaactcaagactcaatttgtgaagcgtcctcgtctaaataagaatcacaagatttatgaagaaagttatttcactattgttgagatgttatttcaataaaaatatcttgtaatacaaagatcttgtagcggcttgtaatacaaatatcttgaatcacctcgtaatacacaacagtgattaatcaccttataataacacagcagtgaaccatcacctcgtattacacagcagtgatgaatcatctcgtaatacacatcaatgataaatttccttgtaatactctgtcagtgataaattatctcataatacacaacagtgataaatcacctcgtaatacatgctcagcaatgtatctccttgtaatacacagttagcaatgcaacacctcgtatcacacacaacaatacatctactaaaatataacatggtctgaccaagtcaaagataactcattgtattttaaatataaacagttatttatacttatctaaatgttcagttatatgtgaaatgtgggaattaaacacccataaattgtaattttctactaaaataagattgagtaaccaccatcttattcctataaataagggtacacttaaagggattgggggaaaaaatttaattcacagagactatgccgaattgtaaacacaacccaaactcagaaatgatattgactcgtgaagtatgtagatttaactacaaaatcacgtaaaaatattgggggttcatttattattttcgtctcttcttttcttgactttattctctaattaattatcttctaagattaagttgacgaaaaatcacgccaacggcttggtactttcattgagagattcaaaaggaagagattaagattcatcaccttcacaatcccaaccatgaaattggttaaaattgagattacagtataaccctcttctattaatcatcgtcaaaataagcaagaagtaattttaaaatcttgcctacttcacataacatcataaatatatatgtgaagtatatatacctttggccaccaaaaagaaaaaggtatatataaaatacatatatatatgtactagagaaatactgaatggtgtcaatattttggtcatcctaatggcataaacaataagaagtgactttggtgttcacttattggttgttcaagtggttatcaaaggaatatatatgtatatatatttatatacatatgtcatagagccaaagtgggacaaatgatggaatgagaaactcttgttcactcatatctccaaaatgttaatatatcacacaagcatgagttgttcaaacaacttttcaaaaagttctcttcaccaaatttataggagacctaaccaaaatatataattttatatattgacatgctaattatgtccatatagcctttgagtaccaagtagaagaggccaataaaacttggaagatatgcaaaatatggtcatttttacactctaacaaaaagtgaagtagtggccaaataattatgctcagagataaatcaactagtagataaatcttcttatagataagtatgctcgtaagatgactgtgctcagagatgaatctactcgtagataactgtacttatagataaatctgctcgtagataagtctacccatagataactctgtgttaggttttatgccctaaataaaattctatttcaatgtcatctattttattcaacatcaataa

SEQ ID NO: 294640 - DNA, 5824 bp, Cannabis indica
acaagagaaatacagcataaaattcaaactctccccccaaaccaaaacctaacattgtctccattgttactactaagaacaagagaacattaaattagagaataaaacacatggatttaccaactatagacgtgaatatacaatgaagggaaagacttatgaagatgtactaaaatattaaatcattttaaacataaaaagataatattaaatgatttaacccatcaaaataaacgcatcttacaaagaacgaaaaccaaattagaagaaaatagacaacgcccaagttttctctaatttcaatttcatatataatcgatcgaatatcagaattatgcgaatttctaaatacaaaataaaacacaaaaagaagagaatctttcaatcgtttttctccaaataacaattttatatcgttcatttttcatataatggtttaggaaacttagtctagtcattgaaatacaaatacccagaaggagaaatctcctaaaattccttcattgccaatgaaacttgaaacatcaaatggaaattctacataactcattcaaatatgtagatataatacatatataatcagcgtatgaccgaaaataccttgagctcgaaaactttaacgatcggttggagaaatttctatccaaattgggaaactatatatacatatgagtgtgaaagaaaggttgccaaagaaaagaaaaaaaaaagaccacgtggcataaactagaaataaaattatctgaataaagagaggaatttaatttgattatcagataatcataacataattaaattttatatttatatttaacgagtgcagaaatgattaactcaaaaaaaagtgcacacgtaatatttgttaaaagtattaattattattattatgttagtgtaaagaaaataaatggaaattgtaagggaagagtgaaacttggcggcctaaattggggtagaagaagcgtgtggatgtcatggcatattatatgtttggctattaggctttcacaattttgactctttcttcctataaaattgggtggtttttgcctactcttgcagctcaagtaactctaacccaaattctttttcttattttatattaggaatttttgtcatctaaattttgacatgtactaaattaaattctctgaatttttctcaccgttaaaaatttctaccgaactactgagattatcgaatttaaagactttgtctaattttcttcatttttactaatttagtgattgtttacatattaaattatgctcctcaaactttaatatctatcaaatcatgtcctctgaactttcattcatgttggactttcttacaatctcaatagttcaaaagaaatttttaacgatcagttcaagaaacatgatttattacatataatttgaggggacaaaaatactaattaacctttgtattattcacttttccataattttatttttgtaacacactaacaattaataggcctctttatctatacatgatttgattctctaatagtgataagataaacatcatctgtttaatataattaaataaaccaatataattaagagttacacgtggttagtagtagttgttacacaataaatgtattcaataagcatattttattccaaaggaaaacaaaataatcaattctaataaataatcctaacatgaagaagagaagaggaaagtaacccataaattgtaactttaaaaataaagcattactattagatacagcctaatactatcatgaaatatatagtaatattcaacaataattattaaattaaataatgtaaaattcaatatttaattctattaatagctctataatactttagtttattttaacatggaagttatcaataatatccacaaatatatatccatactttagtgcttgtcttgtctttatacaatcaaagatctataaataaacgttgtccacacaaattatccttcacttaccttagatagatctaatatgggatatttatttttaaaaaaatatataaatatattcttatctcaacttcttcaaacaaactcaatcattcatgagagtgacaattttgcagtgcttgtgccataaataagccatccaatagagactccacgtggcaaggaaaaactctaccaagctgtcaatttttgaaatggaacttgtcaattatgtagtttgtatcaaaagcctttgtggatataagttagtttaaattcttaaaaaaatagttgccaacaagttttaagtttacaataggtctttagtaataagataaatacaaccatagtgtgactaaatctattaaaaaacttgggtgtgtgtattttttttaatagaatgaaacttttataaaggccaaaatactaatcaaaagtctaaagatttacacaaagttcggcaatccgagccacaaaactcctgcctcatcaagcaataacgccaatttaacaagattatgatcaatataattcgcgaaacgattacaaaacataaacttaataacaaaaatatgagaagaaaatgcatagatatcctgaagcattaagccaagttcagcgtaaaaaagtttttttttacaaagttagagagccacacgttgataattagtttcaactttcacttcattgtatccaagtgttgaatagagacgaagaccatggagaatagccaaagcctttaccacaggaggagaaagagagccatcagcaggagaggtcgtagaagccaaacaaagaccacggtgatcatggatcaccgccccaaatcacgtcctcctatcttccacacaaaagtttgtgtcagtattaagctttacacgtcccgtcagaggtgacaaccaaggtgaagccaccgtaggacctccagaccgatgacaatgagaaggaggtttcgagaccacaatgttagctgtctggaagttttgagtaaaggcaacagaccaccccaacaccccttcaatatctaaaagttttttattgtggacccaatagtttcgacagaatcagatacaccatatgagaacaagaagttgttccatttcatctttcaccaaaatcacctcatgtgctttaaggaaagcatacaagctagccattggcaaagaggaaggagggaaactctaccaattttgtaatagaattcaagctagagcacccccaaagagcatggaaggaagtctcaatttcagtgccacacacaggacaaagaggagtcgtaggaaccttagggaggagaagattatggttagtagggaaccaatccaaacaagctttctaaataaaataccttaatcttaggcagaatggtaaggttccataaaaattccaccacaaagttggaccttcgagaagaatcacattggtccctacccaataatctgatagcattctagtaactactctttatagtaaagtcaccaaaagaataatagtgttatatcaagtggtcctgctgcttagaggatcggagaatagccaaaatctaactagcttcatcactagagaacaaaatatcaatgagaccacaattctagttctcattatcctgtaaaatatcactcaccatagaaacatgcggatgaccatgaaaggagtaagataaagaggcgaattttttctgaatccacacctgggagcaaatattgacattattcccatcaccaataagttaacgcacctccatccacaaagagttctcgaccctacaaaataatagtccaaatatacgagccgttataaatttcctccccattcagaaagtcccctttaaaaaaatagagacctttcataactctggcatccaaagagtcaagaacagaatagaggcgccatgcttgttttgccaataaatttttattgaatataaatagatcacgaaattccataccaccattagacttgtgacaacacagcctctccttccccaccccacgagaagtgggcacaaagacaatataattcttcgatcaacttcactgtaagacaaaacagatacatagctgttatacccaaaatttggctatgtaccaaaagctaacacgtgtcctacagaaggaatatgaatcaactctatgcatataataatgacattatatcattaaatgtaattcaaataactcgtgtcaattaaatacaagtttgatagaaatgatcaaactcactgactacttagtcttatgtgagacatgaataaaaactattaaactagaattgacgagacatatgttcgccttggaataaacagagtagcaatatatatgatactgttatccagagatctcatgattcattaactctcctacaggagcagggtgaaaataaaacactcaactgcctcgcattattcacaatgtagtgatcatctcgcatcactaatacaaataaagggaaacaacaagatgaagtgcttctaacacttagtgttttttcctattaagatggataagaaggagaactcaagtttgacgagatacaaccatcccagttagtatagccgtctaaaggataaaacaagaggcagttgagtagttattagatattatccatgtttaaataaatgaaatgtggggaatgtccatatttcatcaataattgtaaatgaatcaatcccaataaaataatttccaacctatattcttataaatatgggcagaatccatagaaaatgggaaaaatagagagaaattctattattttcaaatattaagatttgtattctgttatccagaaaatatccctaacaagaaggactcgtagacattttaactacaaaaccacgtaaaatatctggtgttatttattattattaaattatgtagtatatttattgcaaaaaaggatattaatttggttaatgaaaatctacgttaacagtttggtactttcattgagagtcttggtaataaaaactcagaaaaatccctccttataaacacaaattcaaacccatattaaatggctgataacaatcaacacaacggtaatcatcttaaggaaacaacttatcgtcctaacaaggaacctatgggatctcaaagaaccaacacatataaaacaccacgttcagggagaaacgatggtaatttcaatgctgttgaggatcaaatcctaaaaatagtgagtgaggacgcctatgatcctaccagatacgtgccactggtagaattggaaaataggcaacttcgacaatgtctggctgaatcaaactgatgaaacgctgagttagagcgagaagcaacagcggccagggcatcacaaggaatagttcctcaaaaccagcctgatccaacagtgaggagaccacgaggaagacctcgggattcccccaaatacccaggaggagcaacctggggatacaagggatgtcccaatggataatcaatctaaccctaataatacaaggaatcaagagaatgagatgttccacaaacttcccatggattttcaaaccaagggaatgaacaaactgacatgccagaatcatctcgcatgaatgaagaggcaaagcagcctcgaccaaggaactagggattacctcgtgataatgagagaaccctggaaagtaacataggtccagtggtctccctccgagacatttgcaacagccatctcgcacggatagggaaacacatgcacactttcttgagcaggggatgtgtgtctactctccagccacacaagattttttctctttcctgcgattcaaattgcttagtttcatatacgatcaaaatcaatcaccaaagatccttcatcaagaaactgatttttttcaaaaaaaaaataaaataaatttcttcatcaagaaactgat

SEQ ID NO: 294641 - DNA, 939 bp, Cannabis indica
aaataaaaggtggttagataatttctctattgctgaagatgtttttgcaacagaggagttatttgttcacaccccggatattgtctatttgtttcacaatatacttaatggaaaaaagccattcaagtattttaaaatgtggacttcccttccgcgatactcagagattgtaaaaggggtctggaatcaaagaattactggttctaaaatgtatcaagtcattacaaagttgaagaaacttaaagtggctttcaaggaactaaataggtagcatttctcaaatattcaggaggctactgatatagcaagaaaggaactgttagatgtccagaagaagctgcaatcagagcctctaaatcatgaacttactgctaaagaagttgcagctcggatcaaatatgggcagcttttaaagggcctaaattctttttgtactagaaatccaagattagttggattaaagataaagatgaaaatatggctatttttcatgctagtatcaaagagaggaggaaattaaatagcgtattgtttattgaagatcagcaaggagtaagaactgataaactagggaaaatttctgaggctttcctttcattttaccaccatttactttgttctaaaatggaaaacaggaggaaggtcaatgcagggaatctgggacctcttgtttccaaggcagaagcagattttttaatgaaggagtattcaaaagatgaagtcaagaaagctatttttacaatcccaggaatcaaggctcaagaacttgatggctttaccaattgttttttccaagataacagggacttaattggggatgacataagttacgctatcctttttgtaacaccctaactagcataggcatgttaacgtaatttttaaacgtattgtacagctcgttgctaatcaacgaggtttatggaaatcgtgattaat

SEQ ID NO: 294642 - DNA, 4682 bp, Cannabis indica
aaaaaaaattaaaaaacttcttattaaatttagaaaaagtattagtcttcatatttttcaaattgtacatgtaaaattcatataactaaaaccttgctaaccttcttttcttgtgttttttaactccccaaagttccttgataaatgttagtttctcactcacaatagcagtttatagtacaatttatctcatattatttacatgacagtacttaaacaataaacagtaaaaaaaaaacatttatttacatggagctaaaaagtaaaattcgctctttataatagtagtacaatcaagtcacacaattgggttctgaaatctgacatataacattgttattaaaataaaaagacaaaatatcaataaagaaatatgagacaaataactgaatttaaatgccataaccccctacacactaactttatccccacaacccaacattttcctcataatttgatataaattaaatcaatcttaaaaaccattcttcacaaatgaatttaacccttttatttctctatctcttcctttccttctccgaacctcttccttttctcaactgctattttaactgccaatggcaataccattgccattcctgctgttctcactgttttctgtaactgtaacaacagactttatagaactcgtgtctaccctcggcggaccagaatgccgccttggcttcgcaggggagggtgggaaagccagccgtttctttgcggtctctgagaatcccttctctagttccccgtttttctcggccccaagtggactttgcagcctggacttggctcttgcagactcagtgggcaccatgtaactaggaagtgcaggagagctggcaaggctctcgtcatctcgtacagatgagccagcaatgctgtgccttcggaacctatctgactgcatgctgaccatacttctgttgtcatcatctggtaccctactcactcttgggctcgcagactttacttttttagatggcgtcgatgaaattggcctgttgggagttgaaggggattggaaaccagaattgctcggcttttgattggctgtaggggaggaaagcttttcggaattgagaaggtatctagcataagatttgttgatttcgccaccagaaatgctgcgactctttacagatgaagcatcattgtttgaatctttatccatagtgccgccgctgcgattttcccatggtctagcagccatccatcgttcaagccaactccaaccccacgatggatttcttggatccatgaacattggatttacagatttcgaattgttcttcaaggtttgctataataagagtgaattaagggttaaactcacaacttagttcatcttaaatacaaagaacaaaaaaagaaagttcaaaatattatcatgattaaaaattagcagttagttcattaaaagaataagcattaataagtcttttacgtataatcattataaatctaaaacataacaatccctactctcctgggttcctacatggcaagtcctaaatttttttattgtacggttaggctaggaacctagtttcaaaaaattagaaagattaataaggcacaagctcaataacgatggtattgttcaatcaactcatttcatataagtttactttcgtttttcactgctcatctatgataggatttgattatccaaaaggaaaggaatgaatacctgatgagagaatgcataagctaatgctctttctcttctcatagatgcttcatacttgccgagtaggttcgcttcaacttgctccttggactgtaagctatcatcccattcctccccaagctgtaacaactttacaagttaacaccagtatgatatgctataaaatattaacacattttgctaccattatgaagaaatttctaaaccaagacagttcctaatttcgtttgcttgagaaaaacaatgcacaatcaaggagcaacatgttagagaatgatttgagtaaaagaatcagacccgcaagttctcgagctcttttgcatgtttctgcaagagttgtctttggagagcctgattctcctccaacattctaatcctccttgatcgaatctgagactggactcgagccaaagtctgcatacaccgcagggtatttgtggcttgacgtttcacaacagaaccctccatcagcaatttcagcctgaccaaccctctcaaagcacgcaatgcccttcttgcctgaaaagtttacaatgcaaatttattacaacacatattatacaaaaacaatgattctatgacaagatacttggtggaaaatcggtaccaggtatcctcggaatgctgtttgaatcctaacagctgctgcttcttccccaaacttcccagcaaaccgagaaactctaggggccggaacaaccactggggctgtccgagtagcgatgaccacaggctcggccggtgcagctggggcaactgcaatgggggggctgtcatggttgttatgttcaatctctgcatcggctattttcacctcttcatgtggaggaagaggtggcaaagcagcagcagaagctgctgtgccagcatcagaatccaaatgtgttggcttcccaaaccatttctttttcgatttacttgatctctgaagaaacaataatgagaatttagtcactcacaaacttgcaaaagcagcacacatgtgaaatgaaataatggaaaaagaaaaaaggaaactgaaaattttcaaacctcggctgtcttctccttcgattcagggctgagagctttcttcacattagaaaaccaatttcctttccttcccatcttcttatcattcctttggttgacccctttatgcaacaaatcaaaatataaaatcaaccatctaaatagcatatgagcataatagtttaccctatgaatgagtaatcgaacaaaaggtagtacaccttatctggattcaaaatgcaagaggcaagggctaattttttttttctttgcgcaaagcaaccgtagccaaaaaaaaaaagcataaattaaatgtaaaatgaaaacattagggagtctgagtgaaaatttacaaacccaagaacaaaaaaagaaactgccaatcttgtgaatctacctttggataatccaccttaactgggctataatagttcaatttcccaactgcaagaggttttatttttaccactatagcataaatctcaccatctttctacattttctcagctaacaaacgcaaaaaactaacatttttattcaaattagagtccaaaaagcaattggagaaccttaaaaatcaaaacggtgcagcacccagattctaaaaatggctaatttaaaacaaaatcagaaaagtaaataaaacaaaaacaaaaacccagcagaggggtccaaagaaagtaagaaaggaagaaacttgcttacaaagaggtagatcttaaggaaccccttttgttcacttccacagatttggcccccctctctctctatcttcaaaacaaaacaaaagaagatattattgaagacttgagaagaaaaataaggaagtagtagtgaagactctctctttcttttctttctctaagccaaatgtaaagagtaaggaagaaaatgaaaatcagatctcagcagaaaaataaaggatttccattgatggaggaatatgaatatgaagaaggccagctggttttgttaaagtgtccccactccctttggtggggtccgtttcttcatttaattcccaacagtaactcttcctcttaatttggatcaaaagcccctcacacacatactataatactcccactctctctcccatcccatctcacttttcacttacagctaaaaagtggctaaagacacccgtcctctttttttctttgtcaactccatactcaaactagataactatatcactaattaattaactgtcttaattaattttccactatttaaactttcaagccttgtacaaaattattttaaaagaaagttaaatgtcccatttttcatttcattagtaacttgttagttttaagagttcctgataaggttagagtgatatctaaaactaacatgtgtttattggtacaattaatcctgcataataggtaaaagtcttcaaagttcattattctattctttgaaatatctttaaaattctattttgtttattttacttctaacttttatagtctatcatatatcaacttttttgttttcctttatattattttaatattatatttttaatatattttattcattttatgtaaataatttaaaaataatattaaaatttatttaactcaatgaataattatctctacatttaattaaacactatttattgagctaaaaaatatgtaaaatagctaagatttactacatttgttggaagctcaatttataatttttctatataatttaaagattgaaatattttagctcattatttattttgagtgctttaagggaaatttcttacaattttattcaataccccatttagtttttctttggattaaaatctcagcccatcccaaaagtcttagggcaactctatcttcttctcccgatacagagttgttgctccaaaattcgcccaaaatacgtggaccagtcgagaggggacacgtggatcagataacttggaaagatttgctaagtcttttttatgccaccaggaagcgct

SEQ ID NO: 294643 - DNA, 8122 bp, Cannabis indica
aaaaaaaaaaagaaaaaaaaaagggacggggaagaagttcaaatcaaacaaagcagcagctaaagaaagcctaaaaagtctccattacccgtaattaacacaaaatcgaaatttttttgcttcgaaattgttcaacgccttctcactcgaaaatggctcgcgatgatacacaactgagagcggcgaagcgttcgtaccagagcgccaagctggaagggaaccaccaggaggaggccaagtgggctaacgttgtcggccatatcttgaaggaccgaggagagtatgtggaggctctcaaatggtttcgtttcgattacgatatctctatcaagttcttgaatcagagacaatgcctcgctagttgccagtctctcggtgaggtccatcttcttctcaagcagttcaaagatgctcttttcttccaggtaactgggttttcttatttctaattcttcattttttttgatacaatctttatttagttgaagcaaatggatctttcctaaatagagccccaattgatgttgaaatatttttatgtgtagttttacacgacagtttgattttcgcaaaacattgctttttatatgaatatatggctccttgaatacacttacagatagatacttgcattgttatttattctgacagaaaaagcatttagagcttgccagggatgcgtacgacaatgttgagcagcaaagggccaacacccagttaggtcgtacctattatgagatgcttttgaattctaaagatgataatcaggtagtgctgagtgccaaaaagtattttaagtcagctatggaccttgcacaagttctgaaggagaacccaccttctaatacttgttctttcttgacggaatatattgatgcacataacaatatgggaatgcttgaaatggagcttgacaattttgaggaggctcaaaagatcctgagtgaaggattaaagatatgtgacgaagaagaagtgacagaacacgatgctgggcgtagccggctccatcataaccttgggtttgtttatatggagttaagggagtgggataaagcaaggtttcacattgaaaaggacattttgatttgtaacagtatcgagcattgtcagggagaggcaaaggggtacatcaatcttggtttattgcattacagaaatcagaagtatgatgaggcacttaggtgctacaaaagggcacgtgatcttgccaaaacaatggaagatgaggattccttagttaatgaaattgatcaaaatattaaatctgccaaagaagcttcaaaaatagagaaggaattgataaatgaagagcagaatcttaagaagcttattagagttttaaccactgcaagaggaacgcctcgagaaagaagttgcctactgaaacaagacacttctcttaattgtctaatcgataaagccagattaataacttcatggtcaaaggtacagtgtagacctagcagttttcgctgcatttttttttcctaatcactttattgttgttcacataaaacaattttcttacaataatgtcaaagattctcctggtctcctttttctgtcacacattgattcatgttctgagggtgggagtaatatgctcttaagatgtcttgctcaactatatactattccagaatgttctttgtatgtcatctaatgcttttgaatctctgtcctgttgacgaaatgggactgcgcatggttgtcaacatagaaaaatgtgattccacatttgatgtgtatattttcaccatattacagccattttaaccatgatgaagcatcatcagtagttgaccatgaagaccagactgtgttcaagtatttacttcgtgccttttttacgggctggtggtgaccaaagaagtcttagaactgagcagtcttattcatcattgtgtcaatagtcttaaatttttgtataacactatcaatattaaagtgtttattacactttataccacaatatatggaatagtactatcattatcaatttttgattataatttatattacgttgccattttatagaagtcattgaagcctgttatgcatttctagtgatttcttaactgtgttactggagggagaaaaagggctaatgctctgcaactaattggtctgaattattgtagtcattagagatgaatatgacctgcagataattcttgttgtgatagaatttgaagttgcttatttcttctgttgatattttattgtagcttcttaaatatggaaaacagaagaagaagatatccaaagaacttggtgacgaagaaaaattgagtgattcatttttgtttattggagaagcatacgagaacctcagaaaattcagcaaagctagtaaatggtacacaaagagtcgagaaacatacaagtcaattcgcaacctagaggtaagatgttgttcagttatgctctgatgtcaatagtattactgttatttcacaaggaataataggcgagtacatattttctaataataatattcgaattattcgtactacaatttaagtgtgagattcatagttcatttatttagttactttcatgaatttttactctggattataacatttcaggggcaggcaatggctttacttaatattggcaatgttttggatagtgctggtaatctgaaagaagcattgaaaacatacgaagaatgctataggtctggttcttctagtgggaatttcttatagttatgtttttgtttcttttgttgtcctttggagtttgaaggttacaaatgagaacactattaatcattaaatgccgtgcatattcaaattctaaatgcagactcttaatattgaaaagattctgatacatgttccaaatggtttagagtttaatattgtattgaattagtttatatatataatttattcgtggctgttacttgttgctggtttcattttacatgattgtggtttcattaattgttttatgaaaagaaaagagatatcctttttatattaatctacacatataattttgtgtcccaggatttcccatgaagctaaactatattctattcagcttaatgctctggagaatatgaattacatccacttgataaggtctaatgacatcaatgaggccaggtaaatgcggttcatgtaaccttctcactagtatcaactctagctttaatgttctatgaggaagttaaagtcaggatcttatgttgtaccgaaatattgttctctatttattaacatttcactggaaggggtgagttttgctatctccagaagcaaattaaggggcatttatttggcttttgcatagagaaatgccttgcatgagtcttttcactgattaacgaaactttcgccttacagtaaatatcagcttcaaattaaaaagttgaaggagtcggaagataaagagcttgaaaaacaagatatggtggagaattactgctcagaatctgacactgaatggagcgctcatatctcaagtgacagatcaaatgcatgtgactcacctgacaccttggctggcatagatgagatgagtgatgatgcacctttgatttcacttattcagtccacgaggaggtcgcccaaaatcaagccaacttatattggaaaacaaaaacaatcttcaaatttcaataaactttcaccaaaaggttccgctagatcaatcagtaatcaggagaccattggtcgtaaacgtgttcgtgtagtgctttctgatgacgaggatgaaacatttgttgaagtggagcattctaatggcaggactctgagttaccaagcagaggatgttgctacatctgatgaatgtaggttttagtcatagctgattcaagacttcaacaatcatttatttgaaacagaatactgaattttattctaattggttgcagttaaaaataaaagtgatgcagtcaatcctggttgtatgattcaggtaaaggagccactgcgctataattagaaagcactattgggttattgtaatgggtatatgaaagcctaatgctttgggttttgcagggtgtgtcaggagttgtttccaaacacacaaacaggtcctacactcctgttaacattgaagaaagctccagttcatacaaaaatacaggtccttttgtttccactcaacatgacgaaggtcatagatcttcaagtactaaagaacatgatgtgagtgattctcttgctccttgtgatgatatgttaatgcagtcctgaatatggctttaccatattgtgtagagagctcaagtttttgttgctttacttttgttatcgttttaagctgtactaatctatggttgcttgtactaatttcagcaatgcgttgcagtcaaggttgacacagagctgatacatgttgaagctgaaaaatttgtggctacagataaattgagtattgagtctttgaaggttgaattggcatgcttatactacttgcaacttccggttggaaagcaatcagaaggcaggttctggattttgaatttaacatgcttcttattgactgtaattgctcctaattcaatgataggtttgtttacaggaaaatagctaaacacagtaaggattaggaagaacacagaaaacttgcattgatgtcctatgaaacttgagagcttggtctgtcctaccccatacaaagctcaaattacaacctccctttctttctttcttagctcaacatgcaatattccagctatatccttccccaaccctcagagagagacaacccactcctatgctaataatttatgagaatattccctgagggatagccaatcacactaagatgatgtttccttcttatggttcctcctagcatactgttacgccccaagtaaattcacacacggcacataaatgattgtatttgatcgaccacctatctcccaagataaatagcttctaattgaaattcatacaatacatatccttttagtctcttttactataaatgtataaagttcataaactatttgaaagttttttacacttccccaaaaccacctgtggtcttttaatacaaaccatacctaacattcttgaaaatctttaacactttccgctacgcatcattgaattgtctgccattaaataataatccaaagggaaactgacattgttggaatgaaattgtttttaccacaactgaataattctcactgcacagaaacaggatggcaaaagcatattttttgatataattttattctcacctatggaacattatcgtcaaaatatgtttgccactagagaatttacttgatgactgagacgtagtaagttgccacttggactcatagaaggcttctcttatcaatgacgttgatgctgaaatattctgattctaatttttggaattgaaatgacttcagatcagttgctattccctgttgcaaagatataatgcttttcataagggcggtattgtttttctttggcctattaggccatatcaagtaatgtaggatttgctgattccgcacatagatttttgtcatgtttgtgcattgatactgtctatttatggaagtgtatctttaatattattctaatatctaaattttcttttgccaggtttgcttcccataattcaccatataagatggggcgatagagtgatagaatccttggaagcaattgaaactataaaggatcaaatgggaaaagtcttggttgaagctttcttagatggtagatatattgctttgagcacatttcttcacgttttattcttgtcattgttgtttcctatcgtgtgagtgtatcatgttggagaattagatctcgtggggacaatttttatttcctacatgcaagtttgatattttcctttcatctaaacgtgaccttctaatattttgtcactccaagtagttgttaagacctcaggcatttgtcagactatgccgtttcctgttttgttgtaacatcaatgcacttttatcagcttactaacatttcccagcaacaccattgagcaatttttcttttttacgagttaaatttataataatattacatgactgttgcaggatgggttcaaaagcgtttgataaaactctacatagatggctgcaaggaggtatcaggaacacccaatttgaagttgttgaagaaattatatgatttagaggtaatagttgaattacgtgctaggggaaattgtttgatgctctttcgatatcattacattatgtagtgctagggtgtctgttgtactctctttatgaaaccgtgttcctataagtaaaagcttttttaactaaaaaggtgaaacttatattttataatgtttctctttatttgtaagaatttgacacacttacttgatgcttaatggcaatgttgaaaacatgatggatttagaaaatgaatgtatttgttgggtatgacaggtttcagatgatgaaatttctgtatgtgactgtgaattgcaagacttatcagtaacccctttgctcaacgccttgcaaacccacagaacatttgcaatgttggacctctctcacaatgtattaggtatctacatctcattgatagcccctttttagttttgtggtttttacgaactctgaggatgacactagcattttcttcaacgctcttaaacgtgcccagtgtggcgctactcaactaagaaataagtagttatccatatgtgagtagtgttatccatttactcattgttccccaggaaatgtaactatggaaaaactgcaacaagtattcacatcctcaggccaaaagtatggtgggttgacattggatctccattgcaatcggtttggtccaactgctttgtttcaggtttgtaaccattttcagcttgttaaagtctttatgtatgattctctagaattacttatgctttttattcaacactagctacaattagtagactagtaggtttgaaattcattctaaattatcctttatggagccatagtaatgatatccccaggtcaaaatcaaatattggttccataaaattttaattttgaataaataggactttttctctatgactctcgtagtgttttgtccttttgaattattgttattttttttttttcgaaaaaaattctctccaaactatgaaaataagttacaaatatttccttttggttgcattttgcttgatactttttaaataaatttgcttacagtagcgttgtaagcacgccattagcatcacattagtgttacatcaacaaattatttttttaaaaaaaataaacagaatataaccaaatgggaacatttgcaacaatttttatagtttggagaaaaatatttttacaagaaatgtgtagagggtggaaactctacaaatgtcatagttgaggaaaaaaagcctagctattctaaattttaagtaagctattctccttctctcctctcccatcaagatttcaacagacctcaacgttcttttactaatccatttatatatataaatatagactagtggcaactccacgtgaaacactaacacatgtaaatatgtaatcaaactcatgctataattgagaatctcactattagttttgacaatttagtgaaattcatacattctacttataaatacaataaaacataattaatatctcatggtgatcattctttaaaaaataaaattatatttcacggtgatcattagtttctccaattaagttattataattgatgtttttgaaataaatcataatagtaggcgttatatatagctagtttctaaaataagttggtatactttgctgcctttattatactatatgaagagaaatgaaagaaaataaaactaaaattaaatagttgtgtttaattctatgcctttaaatgcactatgtttattaagacgattaaggtatttttttcactctgacaacaatttcagtcatctatgttttaccttctttgtctttcgtagtcatccaccacatgttcatctaccagtgccaccacaatcacacaccatcaataatttgtgtacaaatttcataactttgatcgtatcaatatatgattatatatatgtttctattaatctattttgtattattaagttcatatatatcttgctttcttaattgtaatatcgatactggttt

SEQ ID NO: 294644 - DNA, 2482 bp, Cannabis indica
cttgtcccctgtgtcagaccatggtagtgcgtacgctcaacctctgaacatgcctttttgtctgacaattgatctaggtgtcttcttttgaaagtgaaaccttttagcaacacgtgtcctataccaattgtggtcctccattgcccagcttcttctacgcacaagcaaaaaccttcttggggcccaacagtcagattattacatgtattttacgctaataatgggctttttccagaaaccctaggtgggtcatgggcatgtccatacaagcactttagcctataaatacctcttgatttccatacaagggaggataaaaaacaagatagttgaagctctgtaaaatttcctctaagctttcttcttcttcaagagacaccaagagagcagagttagagtttcttgtaaatactattgtaaaaacatcatacaagcctctgaaggccaataaactaacttgtggactaaggctcattaacgctttaactatataaaaaatccttatcttccttattactgcatttattatttctttagctcttattttattagttttttaaaatctcggtaaatattttactgaaattatggtggctacttgaaaaataattacaaaaaagactcctcaaggtggcctcaacgttgtcatggaagatgtaaaccctctatctctagagcatgcccaaccaaacaatgtgagagaaggggataaatcagaagctgacgaccgagagggtgacctaaagaagcatcctaaacatgttgaaaaagactaagatgctaaagaggaggaggaagatgatgatggagtgtacgtcaagagcaggtattataagaatggttattataatgagcagatggttattattatggccaggaccccaaagtgattcaagtgtccaaagagctgcaagagacccaagaaaagttagcccgtcaagagaagctttctcaaaagagggagagaatgatggcttgccttcaagacaaattcagagatctagaagaggattcagaagaagaaccctcagtggaacttgttgaaaaaacaacgctgaaacctcagctcctatgaaggataaagggaaggagaaggtaggtgaccctcaaaactcgacaattcatgtacctcctaagaaatgtgcaaatccagccaactgacttgtgcagtttcagaaggctaccaatgcctctaggcttggacgcccttctgctctaaaaggtcctattgtgcaaaactgattggtgtaaaagtacccaggctcaggggaaggaaaaactgccccaatgattctgttaaccaggatagtgggaccggaggacagtactctgagaacagctggtccattgtagaccttcgaaagtgtctcgacgtcaagtatgaaaaatctaagggagagaaagtaaggccacgtgggaatgatctcaagaaccatctaaacgacaaactcgcgtatgtgacctcccgaagagtgacatgaagagactaaagattagattgccgctctgacaaaacttgtctgtaagcaaagtgggaccctcatagattcagaagatgaggacccagagttgtgtgttaggattatcacggaagccccactcctagagaacttcaagatgccccatattgagttgtacgatggacgtatatacccaaggaccacctggctaaatatattagatgatgcaagtggccagagtaagtgatgatgccaaatgcttatgcttttccctaacacttaccaagtcagatgaagattagtagaagagattggctcccaagtcaatctataattagaaagggttacaatcagccttatagaagcatttcatagctgtctaagattatgatatggatgtagggtctatcaccaatgttaaataataggcaggagacaacctaaagaagtttattcagggaatgatggaggtagcgccaagacaaaggtgagcgacggcatgaaactcgtagccctacaatatggactcacggttggatccctgatatggggaaagatgtaaaggaagagggcagagaccttgttcaagtttatgtcaagggaacaaggcttcatcaatttggaagatgcttactgttgcccctgattttgtccaatatacgtggaccaaccagacagggacacgtggaccaaaagatcttaacatttgaattatttgctaagtctttatgaaggaagacagtatctgggacttgcttcacggagaaggcacccggagccccctatgctcccggaggcctaaataaacatcaaagcatctccgcgaggtgtcaggcttcccctgagcagtcatctcgcatttaatgccgcatgggaggaacatgttgggactgctacacgcaataaagtcttacggcacaaccccaatctgcacctacgaagtaatgatcatttaagtctattgacagctacactgcgaagacgtcacgtcacgtcaaaagacaataaggacattccacata

SEQ ID NO: 294645 - DNA, 3386 bp, Cannabis indica
taattttttcaaacaaaaaatttgtaatctttaaaaataaaatacattcaaaatcttaaaaagaccaaaatcttaaatgaaactagcaatacgtggctcggcaagtacatttacctagtagatatacatatgttaattgtttgttattattttgatttggtgcagctgagtttttctggcatagcttttcctgccctactcactgcatatgctgggcaagccgcatatctccgcaagttccctcatgaggtggaggatacattttacaagtctatcccaggtcatgatcatcaccttttgactattttttttttaatcagtattattatttgataactacatttttttgactaagttaatttatatatgacaacaatatttttgtctttattagtatgaacatctttgttttcggtatattataatctaaattttattatatgctatgtatattataattatagtgcaagtaaaagtattattcataaatgaatggtattattgaaaaataattgaatttgatatacctaattttgttatttaattaaaaaatatcactcatgcttatacattaaattgtgttattatatagcggggttgttccattagttataagagagataaagaaaattaaattagagttagatatttttggtatagtgtaaaaaaaaattaattaattaactaaattaatcaaagttcttttattattagtgatcattgattaaaatttgatagtttaatattttttaaaattaatatttatagctatatctttttgtaagtaaccaaatgaataattagtgaaaagtgttctatatatatgtataaaatagatgaatgtacatcaaaaagagaaatgaccctatcaattggtacaaaagtagtccttttatagaattttacaagtacaggccatttagcaaaaagaaattgtaagaccaaactgcaaaataaactctaaaaggacctctttcttaaaatttattcacattaggtatcttatacttttaaaatgtaaacacacagacacacacatatatatatatatatagtaagcaaccaatatatttaatatgttaaaggcaatcttgcaggccctctatactggcctgtgttcgttgtggcagtagctgcttcgatcatagctagccaggctatgataactggagcattctctatcatctcccagtctctaagtctagggtgttttcccagagtcaaagtggtgcatacctcttctaagtacgagggtcaggtctacataccggaaattaactacttgctcatgattgcttgtgtcatagtcactgctgccttgaagaccacagaaaatattggccacgcatatggtaaaaaagacttgaacttgaatatgtatctatatggtatgatcaactcaatcatggtatttattcttatacatactacataatcatatattgcaggtatcgcagtggttactgtaatggtgttgactacttgttttgtaactctgataatgctagtcatatggaagacaagcatatggctaatcgctctcttcttcgtggtgtttggtttcatagagattatgtatatgtcatctgttttttacaaattcacccaaggtggttacattcccctggttttttctttgttcctaactgtagtcatggctatttggcactatgtccacaagcaaagatacattttcgagctcaagaacaaggtttctactgactacctaaaagaattggctgccaaccccaacataagccgtgtcccaggaatgggacttctatactctgaacttgtacagggcattcctccaatctttactcacttcattaataacattccctccattcactctgttctggtctttgtctccatcaagaatattcccatcagcaaagttatacctgaagagaggtttctctttcggcaagtagagccaagagagtatcgcatgttccgttgtgttgttagatatggctacaatgacatcattggagaacctaaggagtttgagctccaattggtggaaaatctcaaggagttcatccggcaacaaaatttccccattgaagctaccactgatgatgttgatactacaacaactgttatgcctgatacatctagtactgctatagcgagcaacaagaaaacaaaaagagcatctacatcaacaattcacattgaggaaggattgggagcaacgccatcaattgatcgagtttcattggcttccaccacaccatcatttaataacaagtcctcaaactcttcaagtcgaatagtgtctgcacccctacggggagctgaggaggagatgcagtttgtgcaacaagcaatggataaaggagtagtttatctcttgggagaggcagaagtggtggctgctcacagatcctcatttctaaagaaaatggtagtcaactatggctatagtttcttgagaaaaaactttaggcaaggagagaaagtcatgtcaatcccttctacaaggcttctcagggttggaatgacatatgagatatgatcccactacaattatatggtaactgtgtttggtgtgtggatgaataagactaaagactctgagtgattaattgatttcagacatataacttatacttgcgcttgctaattaattaaagacattctacttgagctttgttatttaaagtgaattaatgaaacagatatttcttcccccttcccttactgtgtcaagttttggcttttcatgttaaacattattatataaaaaataaaacatatacagtagatttgccaagcgaaataataaagacaaattaagtgtatatgtgaacgacgaaagagatcgcaatacctccagccattgatctttgagcttcaattctagtgtagtttcaaattgggtaatcgagcttccaagcgtctctactctttttaaatagaatttactattagtacaaaatgagtgaggaacttggggactaagaccctatatttataggtgatgaaatactccataagtatctgtgccatattaattatcagaatattttgacaattgatttgagaaatgaatgattcattagattgacaactgaccatatatagaataatcatccttatcacatattgatttgtgatcaaatactgagataatacaaaatttaaatgattttttttactatattaaaaatatctaatattatcctacttgaccagcattttagatttaccactttaaacacaatcgtctcattatatataaacatacgaatcatagcgacatgtcctcattataagtcgagtattatcttccatgtattacgatatatttattatataacaatgtactttatgtggcaatgtacttaagtgaataaaccctaacccttatgtttatt

SEQ ID NO: 294646 - DNA, 2269 bp, Cannabis indica
tccacccacccctcctcctgtcactctccttctactctctccgagctcggtataaatacatttatttatatacttttttattttattattgtataaaattaatttattttaaagttagttgttgttgtaacaaaattaattagttgttttattttaatttaggtaaataaaactgatgcaggaaaaaaatgagggaaattacagatttttctgccattaatggttttaaaccgttaggaaacccatattagtgacggttttgaaccgtcgcttattctgcccattttacgacggtcgtataggcgacagttatagaaaccgacgagaatactttaaacgactgtttataaacttcgggaaaacccatttttgtagtagtgtttcagttctcatggttatgttcattttggtcatgaacatctgcctggtttagcaagaggttttagagaattgagcccccacaattctccttcaaagcggtcccacttctctctcacataggtgatctcttaattaattagtaatcctattttacttcgctcggacttctgatacataagagtcttaaaagcttaatgcttaacctttttccaccacgagaatcactatttataattagaatgggtatggatgatcccccacagtaatcacacaaggtctttataattaggttgtcccattgaacctagatcttgggatctccagtcatcttgcttgaattttccatcatatcggccttaattctttttggacttaagtctcattcttcaaacatcttttcaacttgatctctgtttaacagtttggttagcggatctgtaatggtatctttttacttcatgcatagtcaattaagataactccagttgagatcaattgtctaacagtcttgtgtcgtcacgtatatgtcctgacttactgttatgtaataaattttgtgctttgccaattgtagcttaattttctcaatatatacatatttcatgcacatgtttaagccaatctagaatctcctttagggatctacgtaaccactctctcttcactacatctatctagagcaacaaactcaaattttattgtagatctagtgattacagtttcgagaggatttccataaaacagtcgtaccacctaaagtgaacacgtatccactagtagcttttgagtcttggatgtcagatatccaacttactgtatctctctagaacaaatagagatcgagtgtagtgtaacccatagtctgcggtaatccaaaacttagtaacatatcaagactgatattttaataggactctctctattgcttgaaccacaataaggtaatcagtctccacctgtacatgtacgatgttcagtactgttatcttttaacccagctcaacgcttccttcaagttaaatataaaagaaactatcatattttgaagatatatcttaaataaatttttgaagatatatgtatgttggatcgataaaaataatttgagggtataaaaataattttactataataaaagcatgaaaattgataaagttatatggaaggaaaatagaaacacgctgtttcagttataaagaagagaaaagcagaagttagagtagaagctaaattcagaacaacttggagaatgaaactcgataagcaaagcagaagagaaagcgcacgagaaaataagagaacaaagcgatatggaccaatctgagaaacgaatgaagattgtgcgacaatcccttcctttaaatagaagacttcgacattcaaacaaaacacagatttggccacactagtccagtcaaaactctgtcgaattgcatctccaatagctcacttcactcgaatttgagttcatcggccgaagagaacaccgatttaggaaaaattgtgtaataattcgaaatgcaattacaaatttgttatttagctaattttcaatatatcatattaccaattataataaaataatgaattaactaaatttaagttgcgcaatatttacaagctagcattatttatttatttatttattttttgaagcatacaaacctgcatattgtgtatatatattatgaatttatagtttttcaaatggtatatataatattataccgaaatatttagttattttttaaccttaatatatacattagtttttttatttgggattgtatattatgaataagaatgagaaaaaaaagagtttttcgccattttataataacaataagggtaaatagtggtataagtacccaaagttttgagtttataa

SEQ ID NO: 294647 - DNA, 5246 bp, Cannabis indica
aaaatataattgcaatttatgtagttaggtgtaaatttcctaattaaaaaccaccttgatataaataattgttatgattgttgaaggtgaataaaagtccttaactatttatataaatcatgattgttagtactattatttcttcgttgttttatgttaatatttaattttcatgtttgaaaacaagatttttcaatgattattaataattcatgaataatatattaaatgatactttttgtaaattcaatctgtatttgtcattatactgtagtaattggtaaatttaataagaaaataattattaaatttgttgtgacatacgacatacaccacgagaaacatctttagccagtggccacatttttcttttacaaattcaaatcacatcaaaaattgaatccttttgatgttttttctagtctcaaaatcaaacaatacaatcaattagtcaatgacagtttacgtaataatatcaaattttacgcccttgacgcaaccgtatatttccaatgtcagttaagggtttcttggatggcccctgatggtcattcttctcagaaggctgctgctcaaggagtgcattctgaagtagcattgtgccatgggaagcaatctctggtcctgatgagtcatcattcaactgaagtggcaattttactctattagagcacttcgaagctatgcagccacatgatgccccacagctcccaccattgctccgacatacacatttggatgttttgcacaaagatttcttgctacacgagcagcatgtgctcgattcattcttgtaccttgcagctacacttggtatagaatgttcggattctgataaactggtgccctcctctgtggacagattacttgcaacgactgtagaggaatggcttgacacaccctaatcatatgaatcattgaagaaaaagtgaatatactttaaatactactattccccactccatgtttggaaagagtcttaaaaatacactaacctgtgccttgttgacttgttctagttcttccttttgcaatcttaattctctaaacaaaccactaatgctaactacttcttccttcaactcatttatgtcaaaacccttctccaaggaaagagtttctctctcctctagttggtacctttagacagcaggcaaaaggttcaactgaaaaggctgaatgccaaaatatagtaccaaggaaaaggactccaaaatgttgcaggaagcacagataagctcaccttaaattctcttgcctcagttcctcagcttcttcctttagcttatcactctcctcatccattctaataagaacaacaagaaaaatggattactgatttgatgtatgtggcagataaacacgttccatttgacgttactaagagagagtagaaacaaacagtcaaaaaaacttacacttccatttgacgttcatattcagcacacaaagcatgcagtgtcgttagttcagagtcatgccccaagctctgaaatgatattatgttttattaataaagttcttagacaggagaaagagtgaattggactgatatcttgagagaaatgtatttcaaaattgtacatcaatatcatttatatgttgccaaataaataaataacgtacactagtagaggaccacgtgtacttggcaagagaaatatttgtcatacaatatgaactcaaacgagacatcttaacataaagagctctactgaatattgtacgagcctgaatcattactaaattagtaaatgtgactaatgcccaaaacgtttccagtttgatttaatacctgaattcctgcattagtctcatttctggtacctacatcagatttagcgaagggagaatgtcaaacaactgttgatatgcctattctgattcacacgtgtgcatgcatgtattaacaagaggaatttaagcaatatgcttcttaccagcttttctgcctctgcgtgacaaagtttgtcgagattcaagcagctcttttagccgtttggtagccatggaagcttctatagtcttacgttgcacaacctatcatacaagatcaaatatgagaggaaatgtcgtccagagaatacatggtgccaaaaaaaccaaactattactaggttcgttagagtacaagtaccatctttaatctccggttagcatctaaaagcttattcatctgaaactgattccttgtatactctctcctgagctgataatgcaaggaaagaaaattccaaaaatttaaatgcctttccaaaataacaatttaagatataatagaaaaattacttctagaaatactacaaatagaggaaaagcacagcgagtcactaatgcaaatatcaaaatgttaaaagacgatacccaaaaaaaaacaatggccattatctagcaatacctgaagaatttctttttcatgtgaggtcttgtttaaccttaactgcagagactctaccttcagcttacattgcagttgaacctagatagtcataaaaataaagaaattgctgatcgtgactaaaacacaataattcaacatgagaatgtatcactgaactaagtttcaccttttgagccttcaaattctgaatctcaaattgcgacctttttgttgcttcatcgccctttggtctttggactgagaattgagacttaatttctagcttgttctttaaatccgcaacctacacaaaccttttatagtcataaatcaaacagttttattccccaaaccaataacaccaagtataactaaatcaaacctgatcttgaagggtggtcaacttttcaagataatcctctttgaccttcatagcactatcagtagaaatggaaggtacatttgcaagcttgtacttaagctcttcaatctccttctgttaaataaacccaaatccaaaagttgcaaaaaatttacaacaattagaaacagttctaagatgtgatgtcctttctgaacatgtcaaaccaagaactaattaacattaaggcttgaaaaaaaaaatccaaaattttcaattgaaatataccgcattgctctttgaatcgaaacaaatatttttaacgccaatacaacattaacccaaacttaaaaaaatctgaaaattaggtttgccaattcttctcttttttttttattctctttttgcaataactttcaagaatacagggaatgaaatcacatctaatcgagggaaaaaaaaaatagaaataaataaaaattatactaaaattaggtttaccaaacctagtgaaaagaaaacatcacttcgtccttgttcctttttacttgaacattttctaaccaaccaaacacacttccaaaagaaattgaaaagaaaaaaaaaacctgaaaggaattgttctgttgttcgagctcacgaactctggtctgacaatcttggtgattatcaagggcagtggcgggttgcttagagccgcaacgtttgatcttcttcatcatcttcggaggatgttgagggaacacggtaacttagggtgggggattggcgtttgagatcggatctgaaaggacaacaacaccggtttttcgcagagatggggtccgggggactatggctgcagctataatattgtttctttcttttatggtgttggtctcataagtggagggaaccctcttttgttcaattttgccacgtcggatcaagtgaacgtttaaatttgaattttgttccaactccaacttttttttttttttgtcttttccttttgaaatgaaactacattaatgcccctcgtttttatcaaatttacactaaaattaattgaaaactttgatgctatatgcttatgaatatgccaatacttaccacaaaaattgttgtgaaacaacaattctccatcaagaacaaagagatagctctctttggttagtaagtccttgataaaatttatgatatcttagattaaatgatgactactttctaatggatgcttttgtgtaacaaacttcctgacagtcatgggttcaagatgttggactacctattacaaaggtcttctcagattttgtgttactagttttaacattggagtcgtcctctgaatatcagaatgagttggggttatcttttctactataaaagtcttgttgtcttgctttccaggagtgttttccatgttagtcgcaacgataatgttgtggcacatggattggctaggtgtgcccttaagatcaacagtgaggtctcgtggatggaagatgcttcttcacgattccaatgaaggcttgtctttctaaccttcaggagtttaatttgagcataaaaggaatcggacaataaggttatgctctcaacagtaggacctttacagataaattattattatctcgtcctattagattcttttacagttttattatttaattgttttaatacttatatactttttctcttgcagttttgctagcgggacaaaaactctacttgaggattcttttctgatattaaagttttattgtctagcttttcaagggcgtctctttcttatgtaagttgcaatgtttaatgttgcgacccatggattagtttagcttgcccttaggatagacaataagcttttttagatgaaagaatctcttcactttaccttttggtatttctcttctctaacgtataatggttacccttaaaaaaaaaacactaacaaaataacaaaaaaatcaatgaggcaatgacgggagaattaatacttgaaatatataaagaaaaataacacctaaattgagtagattgatctatgaaacaatgagtttcatgatcaatactattggagcaaagtgaaagctttattgatgaactttgataaccaatgtagagagaattcaagaactcgagctccctagactaacctaactagtttacaaatcaatctcacatgagcgaagctatttcaagaatggacgattcctttaacatccctccaaggatccttaatatgtttcttgctcaaattctctctttctcaattctctctgttacaaatgagtgaaagtcttaacttgaaaaatataaagtgtttggctatttataagaggattgataggacaaagagtaactaacatagttagttagttagtttggttgctgatgtggcaaagttcgtgtccaataagccttaattataacaatttccaccttaactaaggcactataatgagtgcatatcagctccaaatatgactcataggttgtgactcaattttctgttgggttttatgc

SEQ ID NO: 294648 - DNA, 4211 bp, Cannabis indica
taccaattaccacttcagtcaaacaagtttattgcttaaaaaaattaagagtcttatacatacataaacatattaataaatttttacaaataaattccaatccatttaacaatagcaattacaccctcaaaacctaaagcattgaatctcatcatcacaaattaatatacattactatccatatatgtatcacactctaacatatagcactaataacaataacttactatataagaatcccaaaaaacaaaaacaaaaaatagatgaggaagaaatgtaagagagccaaattataaagtacatatatttattttgaatggcaactacatttaatattgagccatataccaaaaatgaatacaccaaattatattattttactcataatcaatgaggtgggggtgggagtaagtagtacccatcctctcaaatcctcaaaaaatacaaacctatatgagttattataacacacttcttttcttattgaataataatacataactaatctgaattaattaagtctttaatccaaggaaatagggtgcaccagtgtttcctaaccacatatttccttgaagaaattggccaacagtgaattgcatagcttcattcctatcagtaatgaccttgtaacccttccatttaaccctttggttagttgcagcaccaggtcctctatttgcatactcagcatagtaaagtgtgtcaagagcaaaattaccattccattcaagccatccagctggttgaatcaaatcctcaattgttgattccataatcacagtcctagaatactctttccatggtcttcctaagtatgtgggaacagttaatctttcggcgtggagtttctgttcagggacaattctacagttctggattactatgccggttgtttcgtacttgtcaactctgccttgagcagtcactgcattcctctggtttggtccgggctttctgacaatgatcaacgagttttggatgacggctgcagcgtctccaaagatgaaatcgactgttcctgatatgacacagttgtgatagaattgacgatgtgtttgaacatataatgtgtcttggtaaccatccattctacaattgtaaaatgcagacatgtctgattgaactcgaagtgccactgcttggtgtccttctggtcctgctgtgttttgaaatcccattgatttcgccacaaatccacttccaatagcagctgacatgagcaaagataacactttatataagcaaagataacactttataacaaaacaaaatggggaagaaaaacttacaaaatgtagctgttctaaaggttgaaacgccttcatggaagttcttcttcctgtgatgattgtctttcgaggtccatctccatacataaacacattcttttgatcttttgtaacaataagatactcattgtaaatcccagctttaacatagataatgtaacgaccttgatggttttttggatatgaagcaagagcttctccaatagttttaaagtctccacttccatcttgggccacaactttatttggtgttaagttttggttttcattgttagtacctaatagttttctatctgaaccagacaaccaagatggataatcaaatgcctccttaagtcttctagaacctgtgttaatgctaaatcctttgttaatggtgaattctttgcttccatcaccattaacttctttgctaaagctaaattctttgtttataccaccatctactcctccactaatagtaaaactagctttcttaccaccactgacactgccatctccgccaccatgaccacctttgctaatggtaatagtagctttcttaccaccactgacactgccatctccaccaccattaccacctccgttaatagtaatactagctttcttaccaccactgacactgccatctccgccaccgccaccaccacctccgccacttttttcaaagctttgactccaactatactcactgctacttttgctaccgccgctgcctccacctcctccagcaccactgccgctaccaccaccactaccctgaccactggttgaaatacttccactactttcaacactactagtaacattactgctactgcttccttcaccacttccattacctttaccgctgccgctgccgctgccactaccactgccaccaccgctaccactgcttacatcaccacttgtatcgatgctaacactaccaccaccagaaccactgccacttccacttccacttccacttccactgccactaccagaaccactgccacttccacttccttcacttgtgctgttaccagaaccactgccacttccttcaccggtaccgccaccaaaaccgctaccactaccacttccaccaccagcaccaacactagtattaatactgccacttccttcactagtgaaacctccagaaccactgccacttcctttaccagaaccactgccacttccttcacccgtaccgccaccaaaaccgctaccactaccacttccaccaccttctccattaccacttccaccaccagcaccagcactagtatcaacactgccacctccaacactactagtatcagcattgccacctgtccctgcaccaccaccaccaacaccaacactagaacctatccctacatcagaatatgtgcctgcaccaccaccaccaccaccaccaccacctgcccctgcaccaccagcaccagcacctgtccctgcaccgccaccagcaccagcacctgtccctgcaccaccaccagcaccagcacctgtgcctgcaccgccaccagcaccagcagcaccagcacctgtccctgcaccgccaccagcacctgtccctgcaccgccaccgccaccagctccagcacccattcctgcactccaagtaccagtagcaccatagccaccaaaatcccatccatatgtaccttgtgcaaaaccagttaactgcacgagaattaccactcgtgccaaacttaaaattaattttgaagccactaaagattgtggacatggtggagacaatcgccaaagcatttcttgctagctggttcgcagcagagacgaccattttgacatcatctctgttttaagttgagaactcaaatatgccatcaagggcatgtactgctgatacgatacagcagcactcaaccaattcaagagttcaccttgtttgttataaaacgcactcaagtcagttcctcccatagtcgaaaagctagtctgaagttcatcaaccgcgaacccaagcaattcctgacaatcttccatatacattttcttggagccagaggaactcccggctatactagccgatacattgacaatggcgctcacttgagagatggtggattgtattgcagcttggaaatagtcaatggggttagcattggccttgttgcccatagacgcaatgcttttgatgcatgcatctctgtattcgcatgtcccacaaaatatattcgcagcatgagatatgcccgcgaatgttgttgccgcatgatgagctgcacccggaaatgagggtatcttagcatgaaaaccggcattagtattcatatgtcctccaaagcctactcctagacctccaaatggaagatgaccattgcttatttgtaagcttgaagcaattacaacattaatgatcactaatctcaccgtgaatgtattcacggagactagtccttctcctatctttgccttcccactcataagtatctaagtttttatcaattgtatataatgaattagcactgaatagaagtatagaggaatgtaagatatatatatataggtgaaagtaagaatgactaattatagagtgactacaaattatgtggtgtagcaattaaagctaccaaatattatgaatctatttccatttgccgctagcttaaggtggttaacctcatttctctccctatttcttgcatttctttagagacttttattaatactaactaaataaataaataaaaacctcatgtaattatagcaagttaaaaaattgtgaatattaatttggacatttagtgatttaaaatcttgaatttcaagcatgcctttatgtctttcttttgttttttttttttaagagcaaaattcggagggaagaaaatagagtaacaagagcatttttttttctaatttttatggctttagagagcgtttggtaacacttttattttt

SEQ ID NO: 294649 - DNA, 3726 bp, Cannabis indica
gacattatttatttacttatctatctttataaagggaaactatactaaagtgtaatgtgaaagaatatcaggttttatccctaccactatggaccatttgtttcagacttcaagggtttatctcaggtcaaagcaaagtttgtaaaaggctctccctttaaaccttttgatcaactattgagtgtccttcccccaaggaggtaacatataacattgccttcatttgtttatgtgatgtgaaagtgcatttttagaacatggttttcttctttgtagtgctcttgcacttcctgctgcttatcagacactaatgaatgatgatagcccaattattgatttttatccaaccggtatggtctaacatttcagattttgtagtgtgtgctattagtgctgtcttttgtttgtgaaattattagcttatagtttgttctatgtgtagattttgagattgatgtggagggaaaacgattttcgtggcaggtctgctaattcctttttgttaaagtagagaagaagctttataagactacattttttttaacatgacaatgttttatttctcatgttctttccattagggtgtttgtaagcttccgttgattgatgaaagccgacttctttgtgaaacgatgaagttagtgaaggatctcgaggtatgaaagtacatttgacatgaaacttattggatgttaaattttatggtatgattgtctagtttcttaagctatgttgcataattcaggttgaagaaagtgagaggaacacacagaagtgtgatcagcttcttgtgcgatccacacacaatttaggatcacacatgctttccatttctacacagctcaatgggattacaggatgcactagtttgagaaataatataattttttttttgtcaatgtgttcttgtatttgttatgaacattccatagccttgtaatttgggattaatatgttattgttgacaatgtggttagttcttttctcataattttctctattcttttcagtgaagaaattggtggttttttaaggcttagccaaaagtacattatcatggataaaggagaaattcaagatagccataatgactttgtcctgtaagcttaaacagaatgcgattttcattttcgcctgcctcgcctagttcttgaaactgtgttttttcttgttgtagatgtgctgattatgaccctcctgattgtggtgcaaacattcctcgcctacttgatggtgtaaaactacccgaaaaggtatcagtagagttaatgctatgcgatattgtttgttctcatttgatccaaaaccgaaaatgtgtgataatttagcacttgtgtttgtagatgattggaaaaagagaccttgaggacacagaactgtggcacgaatatcgcggaatgaggccaaacaagaggtctttctccaattcaagtctgtttgtattctctatataaatgttggtgaacataactgatagtgtgtcatctgcagatacaacaattacactcagaaccatatgaacaatggttttggctcttcaaagtggggatcatcagctggaagaggaagggcgaaactcgggtacaatggatcttttgccatggagaaccctcaaaaatctgtatctcatgatcatgttgtgtacaaaagctctggcactggatggtctagtaatggtaggggaaggcctataagatctgattgttattcaaaagctcaaaatattcaaacatctggttcatgtgagaagtggaagaaagcaacaacaccatggggaacacccttgacccaacataacagtattggtcaacctagcaaccgaaatttctggccatctaggaacaatgtgtcgagccagagtacttcacagtcaaattggcgccagaatactcggtctggtgatggttctaatgagttaggccagagtacttctaagactcatgttagttacaattggcaccatagttcattgaaaactagtgataacagctcaaggcaagccaaggggagaggccaaagttttcattatggttaacagtgtttaccttagttgaatggaaagattgcatagctgtgcctgtgagaaagtaaatatttttgggagcaaaatgtgtgccatagaagaaggctaatttttgtttttcttttgcagtgtctaaaatgatagtagataaatgtgctgactgagacatgttttaaattacttattttatcttatcttctgttctatatgtgaaattggggttggaaccaatccaatctaattagtaattggattagaaatataaaaattacatgaaatatgagatttgataagaaagttataaaaatgttgtatttattaagtttttcactctatagtattttatacatttaagatttttatagtgtttgatatgtcacatttttatatatttaatatccaaacttatattttatgtcttttttttagtccaattggttttatcattttttttttagtttattttgcatttgcattttaagatttttatttctctatttgtttttctactctaatatttttaataggttttgttttgtttggggtattatttgattataagagggctcgtttggtacgtagtataatagtcgtattgtattaaataataaataacactatagtttagataaaacaatgtattgtattaattactacgaccaatttttttaatatattgtatgttgtattatttaatacataagaaaacggttcgtattagcttgtattataatatttacaaagtattcggggtcaacactaatctacgacccgaactaggacctggttactcggacccagacccggacgcagatccaacctgagttggtgttgaggtcgagtgtattaaaaatatattataactttaaacaatctataatacaagtcaatactaaacatagtattgcattaaataatactaatataatacaatctaacataatagaatataatacggcataccaaacgagctcagagtgtatatattaatctactttcttttttttgttgatttttatatgtaatttttcctttgtttttttattcttttatgatttttattgttttttgattttttttttttttttttctttttttcttttttcttaatggttttataaaaaattaatgggatgttaatgagtttgataggttttaaaatttagtaattttggaattataaaagcctatctttgatgattatttcttttttctttcaaaaatactccttgtagtgtccgtttagaactaatacttaacaccaattagttttaattttaaaacgacactaaagggaaaagcatatacgtacactttaagcgtcgattttaaaacgacaccaaaatttattagtctcgatttacaaccgacacttaaacctttactttttgtctcggtaaaatatgtatcggttctatgttacgatactattatatgtataagtgttaagtctgagtgttatttataagagtgctcattgctctgtttgggcctgaggaatgggctcataaattgattttgagccttaaaaatatacttatcacttatccagaaaacttataacagtagcatattttgtagtttattcagtctatgtatctctcacttcactttttatctactcacttgaataaaacaataaaaattaaagttaccaaaagtatttttattttaaaattaaaaaataattatcaaatacattt

SEQ ID NO: 294650 - DNA, 3679 bp, Cannabis indica
tagcagaactgaatttaaaattttctttaaaagatcttagtcccttacattacttcttgggcatataggtgtttcgtgatgacacgggcctctatcttacacaaacaaagtactttgaggaccttttaaagataataaagttccaacacctcaaaccttgccccacatcaatcactgtaggaaaaccaatgtccacaagtgatggagagcctctcaaaaatcctacaaagtacagaagtattatatgaggattacaatatctttgccatacgagacccgatatatcatatgttgttaataagctcggccagttcttaaacgcgccaaccacaacacactggagcggtgcaaaacgtgtaatgagatacttgaaaggcaccatggaccaagttttagatatcagttgtgatgaaagattgaacatcactggatattcagatgcagaatgggcttgttgtccagacaattgcaaatctatagcagggtattatgtgtatcttggtaatactctaatgtcttgatcgttgaaaaaacaggttgtagtattgagatctatagcgtagaatctgaatatcgagcacttactcatgtggtagctaagatttcatggatagaatctcttctgaaagagtttaattttcctattttcactgtagtgacgtggtgtgataatcttgatgctagtgcacttgcatcaaaccctatttttcatgcgcgtacaaagcatgtagaggttgatgtacattttattagggacaagatttaaagcaagcagcttgaagtaagatatatagcttctcataaccaaatcgatgactgtttaacaaaaggattatcacattcaagatctcagttcttaatcaacaaacttggagtgatgccatctcccttgcgtttgagagggaatgaaaaaaaatgaaattatatagctaggattgttattacacaccagcattttggaattcaaagaagtggtcctgcatcttactttgttgtcatcagctcatgccttattctctaaactcttgggattgtaatatattgttgtataattcttcccttttattgctcaaatattcctttcttttcccattctgttatgactgtaatgagccaaaaggctcccatctttttctatataattttcttatataaagcaatgcatttactcatgccaaactataagctgagaaaattcaaaacaattagtcccaaaattttttcttctctaatggactaaagaatcattttggacatatatacttaaaagaaaaaaaaattcaaatcaatcatgtaataaaaggattttatttcatttatttttgcagctagttcaaattcatgctagcttagcaaaaatagtacaatcacaacattaaaacaaacgaagaaaacacaacacaaaatgaaacgacacacacatatatatattgtcgtttgaccaccttatttaagtctaaacgtagtagtagcgtgatcaaatgatgtgacaataataataagacacacagaattacatatatagttttatttaattgagagtctgtatgaaattgaagccagtgggaacaaagttgttgatgtggagcaagccactgacaatggatccaatgctctgaagtgaggatatgagagccccaaccgaaggaagagtggcgttgcagcttgacaatggtgtgttcaccactaatttacactcagattgtagagaagacaataaaaactgaactggatccaacaccattgaaaacattcctccattgtttgttgttgtgcttgaaactacatttccattgcactcaagttgtacaacagcatctacaaaccaaaacaatcaccaccattacacattacttcgtagtattagggttctatctcaaaattaatcggtattacgagtgaagttcttgtgtttgtttttgattgagactgatgaaatgacctatactaattctatgtgacattgtagggtaaataccattttagaccattgttttacaagagttactaactcgatcttctgttttgttaaatgacaaaatggatcctgaattttctaaaattgtacaaataggaccctgaactgattttttgtcaaaacaaaacttaataataatttaatctaaagatgttataacaaaactagttacattttcagtatctgttcgtgctagaaattgtcttaaagttagttatattaaaaaataaaattgttgaaaaatgagttcatagtcttatttttactattttgaaaaatataaaatctattttgtcatatttaacaaaacagaaagtttaattaataactttcgcaaaaacatggaatacaaaataatatttacccgactttatatatatggaaatatagtcaatgttatattattagattcaatctatttatttgagtaaataatgaaaagtgttatataaaaattaactaaacaaagcttgcatatacatataaatgttaagaaatttttaagcttactagagaaaacaggggttgaagtgccattgactctgccattagcagtgcaaaagatagtgccttgtacacgtattaaacccaagagtgggcccacgatcccattaagaagttgggcttctgccaccattgaagcacccaacattaacacacacatcacaaacacaactgacattttcaaccccattttttctctttcttttgttctaatcaccaaattaaacaaaacccttttcttgatgaagttcaatgtttataacacttcttggcttggtgaaaatactcttcatataaacccttatttatagcaaggccaaacccaagttgcatgcagttttgtttgacaaaaaattatttatttattcaacttaagttgagatagaataataagaacaaaacaaaaacaagtaggaaattctcttaagttttaaaatcttttccatgcatgcgtgcttagtttgtgggcttcaccctaaagaaatggtagtgatcttcccttattagaatattgaatgccctttttgtgaagtttaatttgtttcttattagattgggggcaagtcaaattgccactcccacacacctagctatagcaaaattttggtctttttccaaaaaagtttctagacccaggtccaaacatataagtagctgtagaattatatatagtattagggagttttcttagtttaatttggttgcaactcttgcaactcgtgttgccgtgtcattttcgtattcgtgtttgtattatacatgttgagatgtctaaattttgatttgttgtatttttcgtgttgaattattgtgttctcgaccatatacttatcttgcattatatattaattaacacgattaatattgcattatatatttttaattatatcaatttgtttgaaaccatcaaaataatacactcaattaaaaatatataaagttataaataaataaatttaattaattaaatattttataataaattatcaatacagtgaacaattttttaaatatctagtatagataagatatcttatattcttgttaataatttttttctactatagattaattttttatgaaataaataataattataaattaataattttgaggattattttaaaaatatacgaaaacaatcaaaaagttacaaaaatatagctgtaagaaattttatatatttttacaattttt

SEQ ID NO: 294651 - DNA, 1906 bp, Cannabis indica
  modified_base (80)..(80): a, c, t, g, unknown or other
tgtttcctgatatattcaacagtcaaaaaccaccaactatcagtctgacaacctcaatgcagtgttattgactctttaancttattctacatgcctgaactaagcacattgaatctgacttatattttgtgcaagaaaaagttttacaaagggctattgaagttaagaatgttctactttttcattagttagatgatgaattgataaaggcaatcactagcagttgctttgtaaatttttgcactaaacttaaatttgaatgtctaaattatgactttgaggcgaggtgttatgacaattaattttgagaattattagtttgttaagtttgatgcttaaatgtattataactgttattgcaacaaaattagatgacaaaacttacatataatcgatctcatcaattactctttttctattaatgaaaactattctttcagtttcagtttcatttccattctttctctttttttttttttttttattttctgacaaatcgatcataagtgctaagaacctccacaatgagaaagaaaaaaaatatttatttggatgaaaaaaatcacattatttagcagtactggattcataattttaatataaaattacacatttggtatatatcaatttgaaaaaaaattaatatcattaaaattatgtttacacaatataattatatatttgtgatatatctgaaacttaaagatcttacaactttttcacaccccaccctcccctttagcaacaataaaagagagagcagccgccaaagccgattgaaacttaggatttgacgtaattgctttggttgctgctgcaattgtctcagtcgtcagtggttgctgttgattattatgggttgaagctgtagtagctgtagtagtactactactactaaggttgacaatgttgttcatgtaagattgataaaatttataattagtaccattattagcttcttgaaatggtactttcttattatgattcccatcgctagtagctagtcaccattgtcccatgagatccaatacgtgggttacatataaatttgttttgaagagacgtaactcgaaaatttttcatgtaatcattattattggtaatattgtaaccattcaaaatattgttccacggcaatacagaggaggaactcaaagacgaggtcgaaaagttgagacacgtagaggaatatctggatcctatatgagaagttgaatatgggtttgggagcgttagatctagagtgactgttgggtgagaattggaggttgaaaatgatgtattttctggaaaatagactttttggggtaagagttgtttattattgttattatcaatgtttgaggtatggaagaacatagtactaggtatatggaggtgattggaagaagaggtggttgagtgagactgaagcatggaagtagcagcagaagtggtggaagccatggcagtggcggagatgggaagtgggtggttgtgggttccttcataagtggtaattaagatagacatatcgtcaatgcatctttggacctgaaaagtattataaataacaagtaattagaattaatgttgttattccatcttatataagatatatgttgatgtgatcaatacatgatcaaacacctcgcaagcaacacaatacaaagaacttgattaagaacagaactaaacaattgaaaattaaacaatacaactgtgaactaaaaccagttgcagaaaaccagtaacaagaactagagtttgacaataataggtaatcaatttaacagtaaaagaattagagaaaagagatcaaacacaatagatttacgaggttcgaacaagtgattgttgatcacttgcctactcttcggccagaacagcccctaaggcctttatctttattgatgctagatgagag

SEQ ID NO: 294652 - DNA, 5244 bp, Cannabis indica
cgtgtccttatcttgttggtccacgtacattgggcaaaatcaggggcaacaatatataatatttaaaaatatatattgaaaagtaatttaatttttataatatttttgccaatagttataaattttcatttaaagtagtttttttaacagttataaaccgtcatttaatttgatttttccaacagttacaaactgtcatttaaagttccgtatttttatgatacccacacatagccaacggttttaggaaccgttggaaaatagtatataaaagacagttataaactgttggaaaaaggcaattttgtagtagtgacaagttctctatcagtttacatagttccctctccgttacaataattcttgctagttcgtctatcttcgagttaaaataatctcgagaatgtattctgaaagagttttgactagcctgacgtgagcaaggattcgtgtcgattttcgaatgaagggatcttttatttataggcgcaaaggattattgatccttcgttttcctcctattatgattggtccacgtggattagctcctcttcacttctctgcacactttcttttcttattttctgtttctgtgctcttcaagctctatcttttatttcccgagttctactctgcattcttctatggctaagccttgtttctcttgagctatctttcttttttagtgaaacagtgtgtttataagtgtctgtcatattaattatattagctttgtttttaattattgatggtaggaaattacttttctacgactaagattatttttatcactatagtaagtagttgtttccttttttttttttggcacaacaaatcttttgaacatttctgaaaatgccaagtatttctaaaatactaaattgtatacgatgataaaaaagaaaatagactaaatatattcttaaatatcgtaacagataaaaaagtataaagaaattgtgttttagaaaggtatactatagattttttttctatacttgacgttctttctgtttacaaaattatatcaaaggtctataaactaaaaatttcaattaaatcaattacaaacttgatttaataacgaaaacaaaagattgtgacacatatactaataaattaaaataaggcacaacgaaaactcttagcgcaaacaaaaaagcctcactaggaagtttctttgtgaagaaatagctgagacggggcacatcaaatataaaggcaactttaccatctaactatatatcgaatggaataaacggatgtacatacagctcaaaaagagagcagctcccaagcaaaatccgttattatactagttaaatgagggttagtgtttgttacatactagacgaaaccctttttcttcagctatattgttagttaagctgtataggcccttttttgtcatcttgcacagcctatataaaggtttttaccccatgtaagagatacggttttactttgaataaagaaataaaatgaaatttatctttcaaataattggatgaatgtcctaccatcaacgaaatttattatataatcaaaatgcatgtttaactaatttatgcatgattgtatttattatacgactaacatgaaattttgtcatactttttgggacataataaatccaagatgattattaacgtacgtagttaattatttctgggaatatattggggtgcacaacatataaattatgtacatcagagatagaataatttgtttaattaaggttggaaaaggaagcagaaaggaacaaaaagtgcatcacccaactgtgtacaaaattatggaataggtatctcgatattagtattaaagaaatgctacaaaatagttagcacaaataaatatgaagtctcctattatttaatataataactttcgtaaaatattattttttagagtgtaaaatattgttaacaataactgatattacatggaatatatttattaacaaattttatatcttaaaaaaaattaataaaacaattaagttatctttattattctagtgagagagagttgtttacagagcataataatatccttattttccctttttggtagtcaatattgttacctattatggaatagaacaacaataatggtagccagtgatcctattggttacgcctcaaaacaaccgacaccccccgtctctttctctctcttaaacatgcacaaacaaaaaagtaccattatagactcactcgctaacactctcagtaggccattctaatattaatgagaattgctattaggtccgaatgatactttacaaataactatctacattctataataattattaaattaaattttgtgaataataacataacgtgaaacaaattcctaccaataataatacaacacctcatatcatattatattacgcatactcttaaataatatatatttaccatgaacaagtacaacgttgttactattattaatattgttttaagccacttgagattaaagagattattctctcatcctatttttacaacatgattattgctaatacatatcacaacactcaacactcagacaatgaagaagaagtagtagaaaataaaattacatcgcagagattatattaaattatttatgatatatgataaatataacaaacgtgccaccggtgtggtccgtcgccaatactgtgatatatcactattactacgtccgtgtagcttgagatatgagtagggggtaagtttccggagactctgttgagttgaacggaagatcgtcgtcctcgtcatcaccatcatcatcattatcatttatgcatacaactatgatctcttcaagatcatttgtaccacgcttgttgtgatttctttccctgattatcatagaatcatctggtgctgacgtagacgaagatattgtttccaagggtggaccctcaatattttcatttttgttgttgttattgtttagattattaatattattataattagtactcctggtgtcgtcgtcacaatattgttcatcttttgtgagattgattgctctctctacctgaagcctccaatccgttgtgcacagaacgtaaatcatgagtaaggcacaacacccttgggctgcaagcaaacctaaccagagacccggaaaccccaatttcaggaagaagccaatgaatacagccactggcatccccaccaagtagaaagaccccaagtttatgttagctccgacggtcggcctagcactgcctcggagaaccccacacccagtggtttgggggcagtttcctagctcacaaagcccaacgataggcaatgctatcgcagttaacttcagtatttccgcgtcatcggtgaacagccggccccattgatacctcatcgaggttgtgaatatcattgcagttagacccgcaaagaccgccagggccatggacacaatcatggaaatgcgggctttgccaggccggttggcgcccaactcgtggctgacccgggttgagacgccttggctcagggaggaggggaagacatagaccaatgaagtggtctgaatcataatccccattgaagcaacggtggcttttggattaccgagcagtccacacagcagtatcatgaactcgtaccaccaccactcgaggcaaacggaaatacaagtgggaaccgccatagacagcagcgaggaccagccgcgcaagcagtcaatgctgggactgacccaggagtccttataaaccccagaaaaataaacaaagccgccgagcaaaaggaattgatgaaggttagtccaaaccatggctatggcaacccctgaaatacccatttgtaatttgacgaccaggatgaaatttaaaggcacgtggagaagaacagatatggcagtacagtaagtcaatggtaatgtaatgctttgagtcctgagatatattcgtagagggtggaggagagagagaaagcagagatcggggacagagaagaggatgaaagtgtgggccatagaagagatctcatggtcttggccacacagtaataggatgttcttcatgttgagccacatgaaagagatgggtatcgaagttgagaggaggaggaggaccgtcctctgaagtgtcaggccaagaagcttccattgtttggcaccataagcttgaccgcaaatgggttccattcccatggctaggccggagatcacagagtaacctgtgatgttggcgaagccgatcgcgagcgatcctcctgcaagctgaagctccccgagatatcccaggaaaagcatggagatcatggctctggagtagagaagaagacccgttagggctgttggaccggatatcttccctatggccttgacttcctctaaaacctgacaataaggacgaacatgtgataaacaatagatgttaattgagtaattcgcttcctgcttctttcatttttaaacatatatacatacaattacaaaacatatatatatatataataattttctgtgttctgtcactaagtttttcattttattgttaaaaaaaagtataaatatttacctctgaaggtgttggccatctgtgaagttcatgttgatcttcaggataatgaggatcgaccggtttcctgtgattcatgagaagggctgtcttgaaacagagaaatgaagataacggagaagagggtttggggtgacacataactcaaataagctatggagctgttaaataaagattctgccaaagagaagaacttgagccagatataaaaagaaagatattacttggtaataataataatagaggtaaggaagtaagttgagtaggactctgtttttggaattgtgctctgaggtcaggcgaggtgcggttggtttgtttttgtatttgtattggaggaggatgtgatgagagacctcgaattatatagttgcttgaagtgggtcctatatcttctgttttatctatttattttttcttaaatattagtacattatcattgtatgaccgagcaaacttaattgttacaaaattatttatgcaaattttaaaccaaaaaaaatatataattacttttaaattaaactagtttattgttacgtacccaatattttatattagattttttagtatgagttttaaaagaaaaaactaaataaaaaaataagtaatatttttttattgagaaaacactactataaaaaccacctttttgctaccgacgctgtcgattttggcaaaatttgttaccgactctgatgaaggcgatg

SEQ ID NO: 294653 - DNA, 7155 bp, Cannabis indica
gttcaatgtaattttcttctaaaaaaagttacaatttatttctattgacgttacaaatgtaatataacaataccatttattacatacatatcaatatataataatataataaaatactatactaatatatatatatatatataagatattttagacaccatagaacttcaaagcaattcagttcgccacaccacagagctagccagagccagagctttggtctgtttttttttttaagtgtttaacaatggagggattggtttcatttaaggcggtgccacccgtctctcgcatgcccaaattttcatgcttgaggtcgacttcatcttcctccttggaccttcgaagaggaggcaactcgttctcgtttggctcctcctcaatctcctcttcatcttcgtccttttccattcgagcccaagaggtttgatttttaacgtttttttttactctcaaatgctttgagttgagcaatctttctccagttttgaagattacccatttggagttttatgattctttgaatgacccaatgctttgttgtgtaatttgaagattatccattagatgtttcatcattctgtacatgacctcatcaaatatgtttctttacattatcccgaaattgaatttttagtgcaatctatattatgatgctcatttttatcaattgggtgcttgtggttcttacagatggactctaaagatggttcggccactgttactcctgtgagtgaatctgaacctgaaccagatcctgtgaagataacggaatgggaagtgggtatgttccgtgatgaagtagctaaaagccagggcataagaatcagaagaaggcccccaactggaccccctttgcactacgtggggccctttgagtttcgtttgcagaatgagggaaacacacctcggaatattttggaggaaatcatttggaacaaagatgttgaagttgctcaagtgattttgctgacttgattcacaaatgatatgcttttcttttaagttcttttcgttttaaagataatatgtttttgaagtatatataaaaataatatgtgttgggtttccagttaaaagagaggaaacctcttgggtcattgaagaaagccttggacaatgttgctcctcctagagactttgtaggggctctcaaggaggcctattcacgaactggtctgccaggtttgatagctgaagtgaaaaaggcttccccaagcagaggagtcataaaagagaattttgatccagtaagtctgcctcctttttagcctgttattagttgcctttctatcattgtatcatgttacattattcagttcttcaacatattttatcttttacaagctcttgaatggttgtgtattgtatcttgttagaatttggaataagatgaatgaggttttatctcaaaaccaattggcaatgagaggagtagtccattcatgttatatatgataatttattttcacacattagtaatgggagattaattctaatacaccctcctcatgtataacgaacgacttttaagagaccacaggaccgaaggtaacatttgaaagaatctcacaagcgcaaatatcgagaaatttgtaagtgtacacgtcggaaaatttgtgaattttgaaacaggtcgaagaccccaacactgaaaatgggcacacattggccgaaggtcccaaatggagggaggttaaaggggaagtttatagtttggctcgtcttttagaccggcgacactttgagtttgagctcacaacggatcacaaggctctaataccatgtagagaatggtgaagagaattgtgtgctgtattccatagaatagtatatacttatatacaaagctagaagattgaatgggaaattactgaatataaaagagaaactactaaatcaatttagcctaatattttacaactaatattctaacatatcctaatggatgaaatagatattactgaagatcataagtttttattgtttgcgagctgttttgcctgaaaaatgcttggataattgaaaatcttgtatgcagaaagaaaaatagcatgtgtaagaagttggagactgatgtgatttataaattattcttgattcttgctatgaaggatttgtttctgttttgatcccgtattcaatgttgcaagaacttgtaactgtcctaacattatgaggccttttttctctattctctttctttgatattggatttgtcactattactaaaaacaattttgcaggttgaaattgctcaagcttatgagaaaggtggtgcagcttgtcttagtgttttggcagatcggaagtattttcaggtaacaatcagtttcaattttctttctgcaatcacattgaagacttctttagcattgaagccaatgaattcacttcactggacttgcttcctctacagggaagttacgaaaatatagaggcaataagaaatgcaggagtgaaggtttgttctgcacgcatcttctttcgtaatcttcattgttgaaagcatgatagtggttaattggcataactgatatgtctaaaattcacaaattatgcagtgccctctattgtgcaaagaattcatcattgaagcatggcagatctactatgctagaagtaaaggtgcagatgccattcttttgattgctgctgttttgcccgatcttgacatcaaatacatggttaagatctgcaagatgcttggtttagcaactctagttgaggtaattatcaaaatagctcttgccataatcgatttgaaactcttcattgataagtgtggatttttattttgctgctgtttaatgtcagtgtagataaaaggtcatccaattaagttttgatttaaacaatgattcgaagatgtttagagcattgttagtgttcatttttattttaagtcctgatttgtggccatgtcatatgtttcaaacatcaggtttttcaattttgaaacaagacttctttgggtgttctcagtattcttctctgtttgttgtcaccctattttatattgagcttgtcatttgaattaacttgataatctttcaggtgcatgatgaaagggagatggatcgtgttcttgggatagagggtattgagcttattggcatcaacaaccgcaatcttggtaatgtggcaattagagggttactatttctcgtattcttgtatttgtttcacaggataagaacaaatttcaatgtttgctttggtcacatactttatttaagttttcatagatagtagacactttgaatgaaggtttgggttgactatattatcaattatttcctcttagtggaaaggtcaacagagttcaacattatataaatttgaagggtttgtattattgtatagtctttctatgcaatgagatttcttttcttttgtatatttatatcacagaaacttttgaggttgatacaagtgtcacaaagcggcttcttgaaggaaagcgtggcgaattgatccgtgaaagagacattattgtaaggggcttgtcgaccatcttcattacatactcagagcagacacaatttcttatgcaacttatattatgtggttggatggagatttggtctttagtgattagtgatgttaaagtcttttcctttcaatattttcaggtagttggagagtctggactgtttactcctgaagatattgcttatgtgcaagcagccggtgttaaagcggtaagattgaaaaatcacacttcaagatgccgactgcattcagcttcactgaaaactgtactttctttttttgcagcaaaaaaagtagttatagttgtatagagatagatagacaaatatttgaacaaatgcttaatttagatcaatgcaagcatttttataactgattttgcaggttttggttggagaatcaattgtgaaacaagatgaccctggaaagggaatagctcaactctttggacaggatatttcaatatgagatcaaattagcaaagtccacagcttactttgtgtagagtaatctgcaagaagatcagttatgttcaacagagtttcatgctaaattatgtgatctttttgtatgattcctgtgtccggctatgtttgctcttatagtactttgatatttacatacaaataagttcttggctgtcaaattcaatctctacataataatggtgtagtgcaaaagttggactaggcacttctctcagttattgcaaattcgtttggttttgacagaatagcaactctctgctcccctggtggttagagcaactctaatgggtgttaccaaaaatatattttttcctgtttaaataagggtctaggctatttatttttattttgcaaattgcggaatttaaattttaaattataatttaataaaatagaaggttagaataattttgtacaaaaataaggtgtcaaaatggtatttgcctattttttttaaaacactgataggggaaaataaatttaagccataaaaataagggcagtgagaataaccatagggaacccaaaccagaaaaaaaaaacaaaatattaaataccatcaaggttagttctattgtggtgaaccattaaggtatatatggttatgtacatgtaaacaaaaaaaatataaaatattatgatattttcgaggtctaaagagttgtattgaggtatacatgtgaaaaaaatacaaaacaccatctaatctaatctatcgaagcatagtaagatttgaggcaaactatcaaggtgtagtgaagtggtgtggtataatgaggtctatctggaggtgtatgtattcgtgtgtaatttatgtgtggacatctcattacacataataataagtttagtgaggtgcaccaaggtctatcaaagtgcactaggtctagtgaggtgcgtgcatgtagacaaaaaatttaaaaaaaaaatacaaaggtccatcaatgcatggtgatttatatcgaaatccaataccattgaggttttatcgaggtgtggtgactggtgagattcatcaaggtaaatcgacaaattttagcagaaaaatgagaaaaaacacaaattatcagataaaaaacgatcaaaacacacaaatgtgaacacaggtcaatacaaaatagattttaaatgttaatcattacttatggattgtttactccatgcactcaaaaaatggataatttcttaagtgataactttaaatttagattcacttcaataatgaaaaacaatacacatgttcttaacaaaaataaggtattaatagtggtcttggtgactattatgaaggctaggatcttcaatcttgtacgagggagagagtaactaaaataaaaggaaaatttaatttttcatctttactgttaaaaataataacataaactaaagtatttcgaaattggtaggtgtttaccaaaatttttggaaatcaataatttaaatgtcagagtcaaagaataataattttgaattaaaagaaataagaacacttaagatttttacgtggttggaacgttaattagtcttagtctacgagtcaatattattaagagatgccagaaaagccttagagattacagaaggtataaacacctaattttgcctgagcaagcgagccaagaatttctaaccctttgcatgtagggtttttatggaatttagtatagagctcatactagttaccctttttccctctaatagggagtttacaaatataatattaactttggacttatttgatgaagcctaatgtgatgaccacatcatgatgttagttgtcaaatctgtgtcatatctttgtagaaattaatgacacattaattacttaatttctaattacctagttttcttatttagtaagatatgatcttatttagttatagaagcttctttcggctatgcgattgtatgccttctgaatgttgaccatgctggatggaatcacgcttgagcgagttaatcattatttacctggaaggactgttgatttatggatccagcccaacgatattattgttggaagttattttagtaggatccagatttactaacatgtatgttgattataatactataaactaacatcctaaatatgaatttcctaaaataatgaaataaacacgtaaaagttgtagaaaactttacattgatggcagcagaataatatgactccttccgttcagatctctaatccttggtcctttctgttgcagagtatgatcaagatctgaacctgaattctccttcaattgacagtacgaactacacaatcttcctcactaaattgagtattgctttgatgtgtgtggcatattttcaaactaatgaccaccaaaatttagtgaagaaatactaagaaaaattcaaaatcaatgataaaaaataataggtcttcttttgattcagtttgttagacaaaagagagtcttagatcattatgaatcaaaactcttaatgttctgtttatagagattcattaagtttaaggttagagctaaatgggctgaattgaaagatccaatggcttaaaataaactactcatgttcgaactcctataaggcccatgagttagattttggccattattttgcttccttaatgaagcaaacttatctttcttcagtaatattatttttctgctctagttatttaattataattaattaattaattatcaaataaaattaccatttaaatatatttattaattagaccttctaaggtctattaatcaataaataaactttgaattctcttttcttctcaattgtgtccatccttagtaaaattcacaaataagacataatttttatttagaatcctaattgattaaataaatcaattaattgagactacaaaacaatattatctcagttaatgtggggaccatggacctatgtaaccaagctctcaataagtagctctagaatttaccaagtaaattctctatcttattaattcctcccgactcaactatagatttggaattgcacttttggttacatagaatgctctatacaccaagaatagatacactataaattatttagtatttcactctaaataatcaaagatcctctatagataatttacatcgagtagggacagatttaccgttctacccttcaatgtattttatccttaaaatacttagcttcttataaatgatat

SEQ ID NO: 294654 - DNA, 1840 bp, Cannabis indica
ttatcctgcaagctctcggccagagctttcatgtccattgagcccatcacagtcaccagctccttctgcttgtctatcgacatgtcattaaatcctgtaataaaataaaataatacagatttatatattatttttttttcttaaaaataaaataaaaagtggatttgggtttgggtctgtcgtttaaagggaagaggcgacggcatttcttacctttggtcctcgttaccgttttgtgaatcttcgagatgcaaccctggcagtgtagtctcagcttgagtaccgccgttgtcaccgcaggcttcattataaaataattgagaaaatagattaaattagtacatgtcttcgctgtatctatgtatatttaattaattgtaaatataaattgagattgattttggattaataaataattgttggtagcttaaaaatataatcaagcgaagacaaggtgctcagacccaaaacagaataaaagggcaaaaaaaagtcaattttaaaatggctatcgtgcgccagaaaggagcaaaagtaagaccagtagttgagcctaacagaatctcatggaaaaaggggcgtagagaacgacactagcgcacgttagtggggaccagtaaggaaaagagagagacagaaagagagaagagttacctccttctctttgggtttcttctcgtcgggcttcttcttaggttcgtctgctttcttcttgatgtcgttttttgcgttgttgtcgtccttcttgtttggctgtggagaaatcaggtcgaccttttttttagccttctcggcaagcaactcccggagtttcgacgggtcaacttttccgatcactgttagcttgttcgtcgcgaactctgttttcgctgcttcgaccccttcatttaaaccaccaaactagtcagtaatggatccttgatcaatttagagaaaaagttaggcaaaaataaaatgtaaatctcaaatagagaaaatttgaaagacacggatggggaagaggggaccaatatatatggttattctactttccatttttattattatagaatctgaaagagaatttagcagattaaaaatttgaaaatgatttttgataacgaatttcccacaacattcttactgaagagaatgtaaaccaaacctatataggaaaactaaaaaagaaaaaaagtagacaacaaaacagaattgttaccatcgaaagccttaactatcttcccgattttagaagcgcaaccttcgcaatgcatgtcgactttgaagaccacagtaatggggttatcgtccttcttcttctgacctccatcgccattcttcttttcgccaccgttcttcgtctgcagcaacaaaacagtcacaacaatgctttaaaataactagttctttaagaacaacaatatatatatagaagagactcacctcgcccatagtttgcagtgaagagggttttttcttctggtttgagttttttattcttttaagggtttcttcttttccttctctgattgtaatgtgagaggatgagaaaacgtgacgaggatggggaagtatttaaaggagtagagaagagtggatgttttggagggttagttgtaggacagtgggagtggtgggtttaagctattattatggcattcattatatcatcatatatcatatcacatcatatcattcacccagctatcataccatgtatggtttgtatggttcgtatgaatgtacatgtatgtatatagtacatagagcaagactatggttagatctagtaaaagtgacctagcagtaaaaaactttgggaaatttgattttctatacttaaaaatctttaaaaaaaatt

SEQ ID NO: 294655 - DNA, 1469 bp, Cannabis indica
agtcacgaacaacatcagggtgcgttctgataactttgtgaggtctagagcacaacgaagtagagccttcaaatttacgcttcttaaaaggcatagttctctcattggtttccgaggtaggcactactccaatatcactccccaaactcttaatctcatacaaatccaattttctaaaatgttttagatcatgaagtaataattcttgagcacttaaaaaactgagctagagcattttcttcttcatcacttgtcacgacctttgaaccaccagccttacccacaatattatccacaccaagtgttggcctagtatgcccgagagaggactggttgataaccccactaccatgcaaaatatcctctctatgttgctgaagaggactttcaaaagcacaaccaaaggaatttctcacattactagtggccacgttcttcaaaatagaagaggctcccaattccccaccaagactattctaatccacaagcccattagttgactccttgactgaatcagaggggtccataatattattttggcctaaagggggctgggccgtagccttaacaccacagagtgggccttccttcacattcaaattaatattaatattatcacttaacacttcagtccccacatccaccttagagttggtcaaaggcacattaaacaactcgctaggcccacataaactcggcccaataccaaccgcacaacccacttcatttaccacattcaaatttttctcataacacgaggcacgatcaatccttcaattgctataacgggtaccacctcagaagccttttcccctactagcagaccctcttcacctccaacaccagaaatggcaatagcctgaacagtgacatcaggggtagtcttggggagccacaccgcctgatttgaaatctcggaacccacagccgcgtgaccctgagcggtcaccataaccttcgtgccccttggtcgacaagcttgacccctcagaccgaagccaatgatcctgtcaaccaccctcgttgacttctctacatgaggtgatttccctggcgttgtgccccgagctccacgagcagaaccagagatcggaccggagaagacatccaaataggcaaactcagtggatagccaggggccaaacatgggaaacggggtgccctcgcgatttgtaataatcacaggtgaagccaacttgcatcccctccgttggtgcccaagaacaccacacttataacagaaaattccaattcattcaaacttgaactgtaaccatcttttttcaccatttgctaaatcaaaatagcatccagatgtaaggggcttagcaaagtcaatgtcgacttgcaccttcaaaaatttactccaaaaggatggtttatcatcatctaaatccaccttcacaacccctctagcaagattattcaagagattaccattagttgtagataaatatgttgggttttat

SEQ ID NO: 294656 - DNA, 5990 bp, Cannabis indica
tttgcacgtagttgccgcctagttaccttttaagtctctgttatcttcttccacacaaatatatctctatgctcttcataaaaatcatcgagattgtttaactcttctttcatcatgtttccccatagttttctcttggagcatactttagtagttatgaccatattgagttcatcctttaaatccaattctatcctaaaatttaattgaaatcaatatatttgaaagaaaattaattttgaaaaaccttgagtttttaatctgaaatcttcatcattcctcaatcaaaaatccaaaaaacccaaacagagcacaataaattaaattcatcaatgggaaatttacactcacatacattatattgaaaattattactaatttgttaggtatattttaatatacattctaatattaattaacataaataacaaacattcaacatttaattatcattctattatggccattatttttttttaatttaataatgtgtatataaatacaatttattaaattgactaaattaatatatttctcaacacaaaagcaaaaatcaatttttctatgctgattttcacatctgaatgggtatattgatagaaaaatataaaaaagtactcaatactaaatttgatactcgttagcatttttttaacaatttaaagtaacctagtgttattgtttatagtaagacttttataccatatgagatcctacataattaggttactaagtgatatttttttacaatgtgatactatgacattttataacaataagctactaacgtaaaatgcatcattattatataattcgatattaattggtatttaaaacaacatgccatggtatctaaaataacatgtcatagtatctaaaatatttttgattatagtatgttatataatactttatggtatcatacaaaattaggtactaattagtaaaatatatatcattataatttaatttgacaatatagctaagaaattttgatgctattgtgtattagttcccattaaaaatttctttattcggtaatgatattttgcacttaattagtaaaattataaaaaagaaagttgtaattggttttcatatatataaaaaaatatgattgtaataagctatatataataataaataacataattagagtatattatttttttaccaataaaattgtcattatttgtctctataagtataattgtgtaaagtcactttatcaatacacatgttttaatcaaatttcaaatatgttccaaagaaaacaattttttttataaataacttgatatgcctgtacttactaaaactaataccagaagaactcagtagcaaaaacaaaaccaagaatttgatttaagaaagaaaaaaaaacactaataattgtacatcttcagtatccaaattcattttttaattaattaaatttcttttaaaatattaaatagtaattatacttattcatcaataagaaacaagctaaggatttaaccgacaaaattagaacaaaattgcagttagtattttaaaacaaaaattacaataactgagaacttacaaccctcagaagttgaatgactattgaagggaacagcaccaagaacaaaccactgtattcaatctttgcaacatcgggcacgtgtgatcgtttcaactacacattccttcccacaacatgtatttacttcgctctttcagctgttattcttcaccttcctttctgcaccaccttgcgagctccagatgcttcacatgaagatgaaagatgaaccctcttcttgataatatgggtaccaacctggattcaaacaagactacagtaaagatgaattcacaccgtataatgtcaacaatgacgatgttcgtatatgaattactatgcagtaaatagatttactaagatataacaatgcaagactaaactatagaattagatttgatagacattccattaaagaaaaaatgtaaatcagtatttagctagtaaattaaagcaagcaaatgttacatccatacaatttgcagcaagaaaaaaatagtgcatagaactaaaacatccaacaaaaagtgcacaaaccaggctggtatgcacaaacacaacacaacaacgttagagttgccaacaagtactacacaaaagcaatcctatcttcctatctccagtataaagcaattagagaataggacctcaatagaaaactgtttataaatatcatttgtgttataattaaacaaggtcaatgtagacatggtaagatggaagagcaccagccattgcattagtggaaaaggagtatcccacataaacagaaagttggaacttctgataacgaatgaaatagatgtacacaacaattcaatcacaacagaacataaacaagccacaaaataacttgctagaaatccttcaagacactcaaatttagagattcttgattatacaggttcaatagttttcaaccaactgtggttagatagctaattgcaaggtcaagcttccctcattcgtttagtaagccaatggagagcccatcaggactacctttttccatcctcaaaagcaggaatattgtgcaagaaaacgtgcaacagttcctccacatgagtccatgactacgcactttaaaagagttgcatctacaggaatatctatattttctaatttattatgactattgatcaactacttatcaaggggtcaacacgtttaagaatctctctacttctttttaatgtttttaccaacacacatatatatcatcatttgctttgctttcttcccaaattctcccttcattcaatatatgagcatcccttatcttgccattcgaacccaaagtgacaaattgaacatgtagtttcacattctttctcaaagcatacaaatccaataagtaaaactaaaaaaaaaaagacgaaaacttgaaacaaaccttgtgtatatactcttgcagcaaaatagctgaatctcactaactaggagtatcgtttggcattgaccttcccctgctactagaaagatttgatctccctcttgaacttctaccatggttttcagtttttagcgaaatttgggacgaagatgaagatcttcctctagtcctgccagaatgttttccagctgacctcctttccgaatttcggccccgccctttcttatctgaatatggtttcgttgatcttcttctattatttgcaacagcttcttctacaccttgcttactgtcatcatcatcctcttcaacatcagaggagtcgtacaactccccttcattttcttcctcctctatacttccttcctcctctttacttccttcctcttctttgtccccttctttggaatcagaagtagtctgcttctgcttttgctttttagcactaccacttccaccaggcacacttatgggtttactatcttctttcaaagtgttcataagatgaatgtacttacttctcatgttcatcaatggatgattctcagttaacaaacctctcttataaccctcctttaaaaccacagtatgagtttcattcttacttgacatatagaatatacctggatgataaagaagtgccctcttaaaccttgatcttatacccaaatactctccaaagcacaacacattctccctctctgtcttcttcggagccaaaatatgcagaaactcgtgcaaaaccgcaactgcccacttatctgattcatcatccttaggaggaagatgagtagcattttcgtagggagaaacataaggcaacttctgccaatcatcttcccacttcttcatgttcttatccatttcaaaacctctagataaatgcatagggaaggcaataggcatccctttagaataatcggacttgccattcatcaccttcttctccataactgaagtccccatttcactaatccagcaaacgagctccaaaaaaggcccagatgagcgatccttggcaactccaattcgaaagtagtcagggaactcggggattaagctctgctgatagtcttcaggaagacccacatcccatttcaggcgctcgacgagggttaacggcagtttgttggttctacagagcatcaggagcttcaagagccgatcagcaacctgctgcttataactctcgctctgatacataaactgttcttcaacgtcgatgtcgaggacttcgggtgtgagccgtatatggggttggaatccagtgccgccggggaggaactcctggaaaatcgcggggtacttgcggacgaactcgatgggacgagtaggtatcttaagggagtcccttttttcggcgataatggagatagggagagagttggagggctctgatttgattaagttcttgagtttgatcatgggtatgagattcttctccctctcgacggcgtggtcaaggccgcggtctctaacccatctgatggctgtgccgtcaatgaaggttcggtagtgatggtgtgagtgggggtggggcttgggcagtgaaatgaagatgaaacgaagaggagacattggctttggtacagagccgaagaacggactgaagagttttcggtcttgcaagggtttgggttttagaagggttttgattttcgaaatttacataaattatccttttcttaataaaaaattacatttaagtacaaatggtacccctaggggtccagttaagagtaagacatcatcttgtgactgtgtatcaccaatggtcatgataatggcatttgttggagtagacggaggatcatcatcatcatgttctcaattttctaggtacacatcatcgtcatgatcacaggagtggtgaacctcatcattaggcaattaattagtaatcttcttattgtggctgtggttatggtatccctccttcaacaatatcatcaagtgcccaaccgagccataaataactctttcatttttttttgattatccagaaacaatgcctcatattagtttggttgttcagtaaatttgtttgagatgatataatcatagattgttgcttctcaattctatccaacctctcctccaacgatctatagtcaggtgtattagctgcaggaactatattaaatggcttggctagatccaaatgcggtggtgggggaactatattcgccttactcacaacatcaacaatcgtctttgcttgtgtttcaaacatcaaaccttgtgtattatcgccgtccacctggtcatcgatgtccatctcaaaacaaagagggactttaccctcattgatggaccagaaataatcctcttcagtaggtcagaagcaaaagcatttctatgaccaactgcaaacaaaagaggaaaaaagtctttaatgctgcagtataggttgccaatatgtggctaaatattgcaaactaattcaatttttcatttaatgtagttactcatatatattgtaaaaaatatcgaacatcgccaactatgttgctacactattgtgtgttttattcatacatgtgtgttgtcaacaatatcattaaatgttgtgacatgtcctacatcatgtacaactatattaaatgttgttcacgaatgaaatgtgtcgcaaaaccatattcttatatgtcgcaaacatgttgttaaacctaaaacagctaatggtacattgctagaactagaaaaaaaattgcaacaaaaacaattagttgtttaaaaagcatttaacaacttacccttgtattaagcagtagtgcaatgtcactcgccttcacgtcttgttttttttggccctcagagtttttccaatttatcatcatagggaatttagtcccggtgcacacaacatatcgcgttcccactttctatatggcctcataggcccaatactgtatgaaaggtgtgtgacagtcagtagtcccatgatccgtaaggggaaataccgggtaagttgtgtaattccacaccgcctggggaatgtcaagtatgatgattctgaaactgtataggtatgggactacactgttg

SEQ ID NO: 294657 - DNA, 921 bp, Cannabis indica
aagtcttttgcttattaattatgtgtaacaaactagtaaccaaaaaggctgttactatgtattaataatattaatatgggaatgtgagagactaccactctcagaaagacattacactactaccaaacaaccttctttataataaataaagtgaatcatgaaatagtaattattaaggaattaattaatgttttgtttggtttggtttaatttggggatgcagggattaggggatgtgtgggggaatttgtggcaagtgcctgaaaatgaagttagtaaagttgtgaagatgatgaaagaggaaggagaaggtaaagataatcatagttggattaataagatgggtcaaagagaagccagtgtgttgagatacaaggaaaagagacaaagtaggctttttgctaagcgtattcgatatgaagttcgaaagctcaatgcagagaaacgtccacgcatgaaggtacctaatttattaactctttttatctatctataaagtctttgttatgatttttgtgtggggtgggggacaaaatattaaaatatttcaagaacctaaatgcatatataacataaatttaataaaaactacacaacaaagctgtaagaaggagataatctaaggctcctaaacaactctgtctctagcttttatggagtctagaccaaaattttaaaaatgggccttggactgaggggctgcctcgaccaccctactctaaagacaggtctggttcctatatgaagtggaaattgttagataaattaacaattaacccaagatctatttgtatataacatagaacacaataataagatataataattaggtatgtgtacctgattgatccatagcaattatctctgattgatccacagcagttactccaattcgatagtgcaatactatcaactaagtct

SEQ ID NO: 294658 - DNA, 3392 bp, Cannabis indica
aattcgttggagctttctatttgattgtattgaaaacccgaatcagatgctttcttcaggaaaaagctcatctttaatggaaggagctatccattgtatttgaatataagtaatctcccaaagatcatcatcttctttctgaaccaaaatcccattctccttcatctcagtaatcatttttctcaacaagtcaggaacaacaccaggtaacttagacacaccatactcacctaaatcagctttcatataagtatccattctcctcaaaacacctaaccaaaatgtcctaaaaccaggactattcgaaatctgtgtcatcaacttcaagaagatctcacacaaaagttccattgcaattgttaaagttccttccatgcttctagtttccctctcagcattttccctcctcgaatactcgaacatcttttcgtgcaaatcatccaccatagcaaagatcacaagattgaagcagttaatgcagttgttcggggtaaactcgagctcttcagcaagcataaagcttttctgaagagccataactgcagcatttcttatctcttctcgtcgagctaagcttgtttttctcagcgcttcgcctagtttgatgaacaaactcatgaagaagttcaatgagctaggagctctcaaattttcctcgaatgaagagttactcgcgttacttgtcgcgctgaaattgttactatttgagagctctaagcactgtgttttgtaccattggactaattgagtaactgtgcttgccaatagatccaaaatcattatgttcttctccaatggactgtttctaagagcaagaaagctaaaagcagagtcaatacaataagtataattcatttttgagatatgagttccatctgatatcaacatgatcaaagtctcaacagcttgatcataagtttcaggttgtctacctgtgattgacaacaagtgtagaacagatttccaaccgagttgagtcttcaaattcgcgggaaactcagttaaaatcttgttaacagattttgttatgaactcacaacaagtgtcaagtatttccttttcaagtttccacattaagtttatagacttgaaaatcatctcctcaggggttttttcttgttggtatgttccaagtagctttaggcaaactttgaagaggcctacaatgcctttttcagcgaatgggacaggcgaaaaggtagggaattgagcaactgcaaggagatgatcattaaaagcatgccaaaaggtttggaatctatgtaagtttgccaatgtaatggcaatgattagatcccaacagaaaccaactgtttcttcttcatcaactggtgtactaaacttctgtcctttccctgcagccgaaaagattagagaccgcccgagattgatcaaagcatcttcaggcaagtttgaagtcttgctgaagatgttaccaattctacattgtttaataatcttaagattttgctcaaattcactcacaccaagtgaaagtgaatcttccatactttccaatgatagaaaatgagagaatctgctaacatttacaactttagaatcatttggagtagagaggccttgttctgatgtagcttgagaatctgatgatgtagtaccgaaattagcagcatcgaattcaatgacagattggggaagaagtttaagtcttttgagctttaacaaacaatcaacaatgttcttccaaccacctctaatagagttaccaaagttatttgcaatagtgaaaactgcaagtgttgctatcttaggcttcaaatcatgactaaaggcgaaaagggtctcttcagcagaggcataagggttcaaaagagtagtgaattttgaaaaagaagcaagaagctcatcaagggtctctactaatccatattgagctattctagctattgaaaacaaaccttcaacacattcatggaggatttcttcttcatcaccatgctcgaaaaacgcgcataatgtagagacagatggccctgcaatactaccaaacatgtctctaccaattctcttatcatcatcaaaattacttaacttataaggttgaataattcttgacctgtttataagctcaatccacctacttggattcatttcaacaatttgaccagattgaccaaagatagtaatagcattgtttgaaattgagttgaatagttcagataaatactccttaggaagatctttaccaccattaatagctctattattcctaataaactcttcctctgtcatctttttcttcacttgaggattatgttgatcagtattaagcattataagagaataacacaaaataaagacagcatctttactagcaaaaatatcagaagtctgttgttcataaaatctatcagaaaaagcttcaagaattctagtaatcttctgagactcaccgggcaaccgaaacgtttcgagataagttctaagagcatgatcaagaatcatacttgaaaactcaaaagtttcagtgaattccttcaaaacttgaagatgaaaactttcaggatcaccaagataatcaccaaccatgctcttatccaatccaggagtgtatctaaaaaagaaagctaaagcctttggatcatgaggatcaggggacaatttagaaagctgtaaatactccaaacctttcttctcatcacaattaaaatggtaactagtaactagtaactttctcttctgagcttttctaaaccttaaaaaatcaacccaattgattgaatcatttcttggtttatcttcccaaaagggtctaaactctgaaatctcaactgggtatggctcaaaaagtgttcttgaatcattatcattatcatcatcattgtcatattgtctatctatgttgtcagctatgttatggattataatcattaaaccttcaaaagcttgaatctttaaggaagttagaggacttgttactggaaatgagtgtttgcagagtaattttccgatgtcttcgaagatgtttcgacagagtggatcgcaatcatagttttcgtagatttcgattatgaatgttggttgtctgcaaaagtttatgattccttcaagtgaaacttcttggagttggagtgaaactccttgtgttgttggaactctaagaagaacaaagttgaagaaggcttctatttggagacgaaggaatctgcaaacaaatgtataacacaaaaaaaaacacatcaataattgaatgtagagggtgttaatttgttcttggtttaggttgtattgtatgcagtgttgtgttttttgtttttcttgtgtcttaagctaagttaacaaaataggaggcgtttggttgggaggaatgaaaatataggaataggaatgagaatgggaataagaataagaatggaatggaataaaattta

SEQ ID NO: 294659 - DNA, 2911 bp, Cannabis indica
gacataaggatctcttctcctttttcaaaaagacaagatggatatcccaggtgtgaacagaatagtatcttatgtccaatggaactagggcaaccataagaaagacataaagatagattgtagaggctcctgtctcctagattggtgtagaaggacttcttctgaatatttggaatatgacaacttctaggaaaatcggagcatccaagaacttgacttgtggggtttatacagttcacatcaatagggtatttaaaagaatttatgacaatatatttttaaataccctcagacgttttattttgtggagcctagggtttacatgtggagacccatggaatattcaaaggattccacatggcagcaatctacatcgacaaaaatgaaaattagtttttatttgacccattttgaatgggccttgaaagcgacaaggaattattcaaggcatttattaatggtgatttttttaaaaaatatccctaaaggagagagcagatttcacgaaagcaataatactttcttggctagatttaatcgggtgaaaagaaaaaagtgttcattccttatcaaggaagtcgcaagctctattcaggaagaaaaggagcaagagaagctgcttgtatgtagaaggaagaagaaagcttcggaaggggtcaatatgagactagacagtatgatggattgtcccttggaggagatagaatgcatcactgaactttaggaaaatggctttcgcgatgatatctcagatgagtgcactaatgtgaggagtttgtggaataaaaatggagatgtgagaatggcaggggggacataatttattcaaaggatagatcattgtgttgaactataatttattcaaaggacaaatcattgtgttgaactagaaaggaaggttcaattaaggaaattaggtctcactaggaagggaagtcttctcagcatcaagtaaaagattggagttcaatctttgagcaatatggggatgttggtggtactacaaaaaccaaggagtaaagaattgagaaattttaccttcaatgtgaactatgaaaacaaatgaaagaagtaattctaagcgaagataatgacttagaatgtgacgagtagtggggtagtagaaaaaggagagctatgaaggcaactatttgcaagattaaccctcattttactgtgtccaagaggttagaaggtggagcgtggatgcatggattggggtgtgctattataataatcctgggtttttgtgactgctgtcacaattttttctacagtttttttcgtatttatttttgcttcttgtttgtttaccatggttttcctccgccttaactgaggcttgcaatatatattggggggaggctagtctaagacaagtggtctctttctcttttttcaaaaaaaaaaaaaaaaaaaaaaagaaggtgaagcgtggataagaggtttgtaggaagcatttggaggtttaggtacaaggcttggactctactacctactactgtagggcgatcaagtggaactctaatagtgtggggtacgaggaacataaaagtgttggattctttagtggcggagtttccaatatttgttttgattgaagctggaggtaagaatccttggtggtttttaggggtttacagaccgagtaaatgtggtgagaggtcttcgttttgggataagatagcaggattaagtgtcatttgcagagataaatggtgtttgggggagattttaatgtgattcaaagggtgcaggggaaaatgagtagtagctttgttacgtaaagtatttaaaattttgatgaacggacaagggagctgatacttatttatttcgatgtgaataacaggcggtacatgtggtcaaattttagataacaaaccatatgatgcagattggatagatttctttttcactaacaaatgtataagctatattcatttgttaggtaggatgttcatgtaaggattgtattagatcgttcttgatacaaattcacccttgtgggaacctagttttttttgcttcgataatgtatgattagaacatagttcctttaagaaggaatttgaaaatcggtggaagaatgcccaagtaggatggccaggttacaatgaatggaagaaagaagtaggttacaatgaatggaaggaagaagtagcataataaaagagtggcaacatatttcctttgatgaggaaatagggatttggttataatcgaaaacggggtctttgtctaaagaatgcccttcaatgtgattgtgctttttcaactctctcaaaatggaatatattcaaaacatgtatgctatggtttctcactttgttagaattcaaatatctaaatttgatgcttttgtttgtttttctagacgtattgcgattctaagtaacaccctgaattttgtatccatatggatcaaatatattatgacgaattcttcaaaaggaaaaaattcattcttctactatggaatatgatgagtgagatttcaattaagtgtttgcataatctttcttttgtccaaatgaacaattcatcaaaataatgagattattgatatccacacatatgagattgccaaatgtttcagttcgagagttcctctcaatccttttcctccttgttgctggatatcacgtttgtacacatctttttgtttctcgagcctatagtgaattatagaccatttgaaagggtcaaatctataagaagctttgaactggtttgttttggctatttgttttttgggtcagttttggagagtaacatagggcttaggccttattgttttgtttgaaattgtaactatggttttcctctgccacaagtgaggctttttcaattcatattgtggagggtcctgtctaagacaagaggatcctttttacttttttcaaaaaaa

SEQ ID NO: 294660 - DNA, 3509 bp, Cannabis indica
aaaaataaaaaataaacaaaaacttgtaagaacctaaaacctgcaagatagatgattgtagagctaaaatctgtgtcaaaattttacaacataccttcaacttcctcaaattgaatttctttcacaaattcagcacctgcatgatactcaaaactggcaaaaagacgagaaaatttgtactcagccgaaacaaaacaacagaagcaaaaacaatcgacatgctgattaaaaaaagactttattaagatactataaacataagcaaaaacaacaaaaggggtcataataaaagtagatgtactccgtttaactatggaagttgcaacacatatacaataaaaaattggcaagcatgtcaaaactgtaaggtcttaatttaaaactttaatgaagaaagacagtatctactatctataaacaatagattgcaggattaagagtatttaaagaatctcagtgaaattgaaaagcttcccatagtgttgttatttggactgattgatccacatttgccccaagaccaatatctatcgactcactataatgtaaaatgatttttttttaactaggattgcagcctaatcctacaatattttgggaaactaacaattaatatgtaggcagctaggacagactaactcacagccagaccatttgagatacccacttggttattataacacttctaaacacagttaatcatttaattataaacaaacagtcaatgcctatatttttcatctaagaagcatcttcttttcttacctgttagagaaagctacctcaagttcgtagttagaaacattcttagcagattcagctaatacagtaacaatctcagtcttccgagtactagccatgagcaaatcatattctgcaggaacaataatagcgaaaaaattatcacttagttcactcaagcacatcttttcaacagcagcaatggctattctccgttttagggtattcgtctccgggtcaaccatatatatggccaagtcagtaatcaacaaaatcctccttttcatcttcccactaccagtaaacttcaaaactttatcagcaaaaagaacttgattgtcacctacaatacaagatgaaatgcagtatatttgagagatatggctacaccaaagttaaacaatctctgtaaaccaaatacagacatttacacaacaaggattgaactttgaatcaccaactgcggaaatatgtaacacaaaataatcatatgcaaattaaatatcagaaaatctatttgtttgttaccctatgttttgaaattgtatacatttgttactctacactcaaatttgatcaatttgacaaactactctcaattatatggaattaattaattctttgaacttttgacacatataattgaagatagtctgaagatattaattctttgattaaatttgggtttaggataccaagaatgtatgattattgttttatcaagaaattatattcatataaactaaaaagatactaaagattttgaggttattcaatttgatatgagcaaactcaagctctgcatttctacactttagaatcatgccatactcaagaaaattcatatcatggacacaagttagaaccattattcgttcaaaatcactagagaatgaggaaattaagacaaaaattaatggcagaatttaaggctttaatgaatggtgtaaaaaaatcaacgcatgataccatgtttctgtaagagtttcaacaaatatgaatgcgaagggatgtcgatgtagtctcctctgtactctctgtggaaagaagtttttcttcgaaccttgacgcccatgaagggttcctgatcttcggagacattgctcccggagggtctcaatctccttcctcccccactgttttcgttgtctagggtttcgtcgtcgtcaaaattgggagattggggatcgtcgatttggacccggcgctgcgacttgagtcgatccattgtttgctattcgggtcggtccggatccgaatagagggagagaacgaaaggttgtcttgtcagttttaagttaagaggacgagtagaggtggaggtgagctatctaacttgcgcagggtgggtaatgcgcaccatgtgacagaaatccatccatgtatttttttttttttaaaaaaaaaaaacaaaagaataatattccattcaaagtcacaaaaccaaatgatcaaaacgatcaatacaaaattcaaaagctaaagatcatgggaaagattctggctccaaatataagccgtattcaaagaaaaaataatacgagcaagcgagtgggctaattcattacaagatcgcttgcaatgaaaaagaaaaatactagaaaaagaggacctcacatttttaatattctcaataatagcgttaaattcagtagaacgtgtttctttactcaatgtaacttacaccaagcaaaaacaatcagagaatatcatcatgcttgtataccttagacggcgacaaagaatcatctgttgcaacaaacctactgcctctgtcgcatgaggttcataggctactgccaccgtcatcgtctctaagagaaaacctcacttgaccgactcatcaccacattcccaagatcaatcttccattctttggcattaacaccaacatccacaaataagttgacattctccatgtaatatcctaaaattgagaaatagattagcaatttttattaggttaattaagaataaatgtgaaattatattattatataattaattgtatgatattatttgtgaatatttaaaatttaagactccatttatgtgttagaagtatttttgtaattttgacccgaaaaatggtaaaatagtaattttattatatattgtgctagtggactacattattatctagtatgtttactttgttgtgctagaggtgaatttcgacaagtcaaggcagtatagtcacaatcagatattttggttcaaaattattattatgtggttatggcaattattaacctcactttcagtgaattaaattaaagtgatttaagtataattaaaataataaatatgaataatataaagtaaagaaaatactagaattatagaggtttggtcccttgatgatggtaatagtctactcccatttagttgtattgacttgtgagtaaaggagcaagaaggtattaatctctctcgaaggctcttacaatgatctctgagttcttgcactcttaaacactactagaaaattgggttttagtgacacacattgagtaactctaaaagtgtatagtgacacttcaacgcgcgtcactaatgagggtgactggaaagacaatttttagtgacacttcacacgtgtcactgaaactttttgcattcattttctgcgtgtcactataggcgtatagagtcaggttttgtcagactaaaaaggtaacagccacacacatgaagtgtcactatatcctttttttttcttttttatttaatatttttagagatatagtgacacacaaaaagtgcca

SEQ ID NO: 294661 - DNA, 3936 bp, Cannabis indica
tccaaatctccatggacgcggtggaggctatggaaggatttaaagtggtggtcttgaaaatcaacctcaaactccttaggattaaaaggtttgcaaaaatgcaagcccaaattcaccaacaagaggaagaaattcagagggcgagacaacagggtcctcttacaatgcctccttagcaagttctcgtcactttaattccagcggtgcaaacctattgctagcaactgtatggaatctttggatgagaggttttgtaaacaagcacctccaacattttttggggaggtcctgatgttatgaagtttgagcagtggttaacaataatcgagagaattctaaattttatggaagtcaccaaaaatgactgggtgacgtgtgctatgtttcaatttcaagaagatgctctcgtgtggtggaaaatggtgtccctcactcgaaacgtcactataataatctgggaagaattttaggatctgtttaatgctaaatattataaggaagcaattcgcagtgttcagaggaaagaattttctaacttggtttagggcaagaatatgtaagtaagaaaatatactatgaaatctgatcgattagacaagttggcttctagaatagtgccaacagatttcagtaagaaggaaaaatacttggtgggttgaatgccaagatcagccataatttggttatttcaaccaatgacacaacaacctatacaaagatggttaggaaggctatttgagtcaaaggtgcagtgaaattccttcagaagactcaagcgacttcaagtgttggtgggaataccacccttcctacttctggttctagcaaggagggtggaaattctaatgttgacgtgaagggaaggaattttctgacataaagcttatattagagtaagaggtttcttgggaaccaaggtagaggtgggcttcatgcttactcctatcttgagtgtcgagactctaagaaacatcaccctggggaaagtaaccagaaattctatttctagtgtggtttggttgggcacctcaagaaacattgccctcaactgaagaaaaaagaagcaaagcccgctccagcacaggtttttaatattatttaagtagatgctgcagccagccctttagtagtatcaagttagcttcttgtcaatgacttctttttacagttctatttgacgctagggttacacaattctatgtggcgttggaagtgattaataagttgggtgggcccagagatattattaatgtagggtttgaagccatactacctggtggagagttagttatctctagaaggtgggtcaggtctgtgccaatcagaattaagaatagggagttgagtgtcgatttggtagagttatcattaactgagtttgacatcatacttggaatggattttttgtcctagtacttatccaatattaactgtaaatggaagattgtaacttttcaactagagagtgagaaatcatttatgtatgtcgggtacgtctaaggttctcaaattctaattatttcagtttgagagctaagggtttactacatagtgggagtgtaggattcttagcggttgtcatcgactctagcagacccaatacattgggcctaaggatgtcagagttgtaagagaatttctggatgtatttcttgagaagttactaggattaccgcatagcgagaaatagatttcatcattgatttagtacctcgggtagagcctatctcaaaggcaccttattgaatggctctagcacaatttaaggagctaaaagtacaatttcaagggatgttggatttaggatttacccgatctagtgttttgccttggggagctccggttttgtttatgaaaaagaaggatgggtcccttcatatgtgtattgattactggagttaaacaagttaacaattaagaataagtatctattgtctagaattgatgacttgttcaatcaacttcagggtaagaccattttctccaagactgatttgcatttgggttatcatcaattgagaatttgaggagaagatatcccgaagatagcattttaaatcaagtacagtcactatgagtttccagttttgtcgtttggattaaaagaatactccagcaacctttaggaatcttatgaataggatattcaaagacttcctcgactgctttgttatagtgtttattgatgacatcctagtatactcttagcagaggctgagcatgagcaacacctcctaatagtgttgtaatgactcaaaaataataagatatatgtaaggttcaaaaaatgtgaattctaattatcacaagtgtcatttctagagcataaagatgggatcatagtgtatctagggaagattgagtcgattaaaagaaatgggccaaggccaaaaatagttactaaagtttgcagcttatagtgacacatccaaacaaggtctagggtgtgttctaatataagctgacaaagtcattgcttatgtttttgtcaattgaaggaatttgagaaacgttacctgatacatgatttagaaccttgtgtggttctgcttactctgaaaatttggcgacattatcggtgagaggaaaattatgatatatatattaaccataagagtctcaagcacttctttactcagaaagatttgaatatgagatagaggcagtcgttagagctagtcaaggattatgactatgagattctgtgttaccccaggaaagtcaatgtggttgtagatgctttaagtagaaaggtcctgggaaggtttttagtgccataaagatctcacctcagttgactttagatatggctagggctggtattgagtttgtagttgaaaaactgcataacctaatacttcagtcagatttattagatagatttgtatactctaagttagctaggatttgggaggaggtattagcagattgtaaggacttctcaatctcaaaaaatgaaatgtttcttttcaaggctcaagtatatattttgagcagtggtgagctcaagaaagaaataattgataaagctcgtactacaccttattcattgcatctagatacccctaaaatgtaccaagatttaaaactctattactggtggtgcgggatagagaggaatatagtcaaatatgtatacaagtgcttagcatgtcatctaattaaggcaagatatcaaagtccggtagggctattgtaatcattaacatttcttgggtgaaagtgggaaaatgttacaataggctttgtggttggtttgcctagaactatgggaatgtatgattcgatatgggttttagtggatcattttcaaaattagaacacttcttgccaataaagaacacctgtacagtagatcaatatacgaagttatacgttaaggaaatagttcgtctccatggagctccaaaatctattatttcatatagagattcgaagtttacatcagaaattttgggttagtctttagagagagttttgggtacaaagctgaagttcagtgtagcttttcacccttagactgacaaacagtccaagaggacgattgagattatagaatatttattgtgagcctgtgtcatggactttgagggctcatggagtaattacttgactctaatagaattttcttacactaacaattatcatagtaccataatgatggttccctaagaaatattgtattataggaaatattgttccccaattcaataggacgagatgagggaaacaagtatttaagtcttgaaatagttcaaaggaccagtgagacaataaatgtaaagaccgcttagtttaatttggaaattagcagttaatcacgtttaattatgaaattatttatagctatttaaataatttattatactgttattattgaattcaaagatgcatttttatgtcatgtagtagtcttcataattttgcatttccggt

SEQ ID NO: 294662 - DNA, 7259 bp, Cannabis indica
atggtgaagtaaacgcaaatgatggcttcagttggccatggtgtttgctgctaaaacattgggaatatttcccactgtatcaataatgcagccaagctggtgggactgatgaaatggctcccgttactgacgttgagaggctgcaattctctctgttcgggccctcacttcatgatcccaattgttgtgacgttcatttcggtcctagatgtactaattaattttctgcattgttatcaaaggctagtcttgtcaagctcttatatgatctttgtttgttgatgtaatgaagttgtttcatttcaaaaataaataaataaataatcatacagcaccttctcaatagacataattaaccttcgttttctaccagagaagtgcaatcagttacgacattaggaatagtttccagaaatttatcttaaaaaaataatataaaaatacactattaaacagtatcaaatgtaacaataacattaaccaattcttactactaaattataatagaattatttttttaaaaatataatatttacaatttaaaataaaattattaattctatataaataaatttataaattatatatattttattcatataattattcttaattaaataaaagttcaagagattgaggtagaaatttcagcctataagaaagcaagacggttatagtatactagttcaaactcatataagtttaacatctctctctatatataataatataacatgtaaccttgttcgtcagcatactcctatttaactatttcaaccatttcactttccatcactccaatttggttttcagagcggttaaaaatataatatggatatcaatggaggtgaaggaatagttgggcagttcgacgagaaggtgaagaaggtatttgggttcgtgataaaggtgacattggatttatgtctagctggctgtatcatctatttcatcgttcaggctttgaggaatatgaaaagcaaccaacaaacaaaaaacgacaacagttttgattatgtaaccttcttcgcactcatgttttgcttcctcatcatcttccttctaatcattcatctcatcgtcaattgtcatttctttatcaatgacgtcattcattctccaaaggttgagccctttcaaaacgacaatacagcattgcatacggcaccctgattatacgactctattctatgcatatttaagtaggtaaagaggttacttttaaggtaactgtttatggatgtgaaaattttctgtttgttgtacatagtatggtttgttcgatatttttcataaaattaatttattagtctacgttctccataattttttttttttttctttttgtcttgttcgatttcaaattgtatataattcaccggatggaatctgaaattattaacaattatgaagaactgatttggcacatgttgctatcatagataaaacattccattccaatcataaatatatatatacgtatatagagaatataaactaggaaactaatactattttagcttcctttacatacaatgggaaaagcagagcataacttaaaagcttgtttgtaatgcactaaactgaatcctaactttatacgcctattgcctaacatctaagtttaccataatttacaccagccaacataagcctcctcgtcatagtgctattccatccgaatcatttacaccttcaaagggtataagaaaatatgcaaccaaaatagcaacaaagaagaaaaaataaccttagtcaaacaaaagtctacgtcttacagacttagacaagttgggatttcgcattcttcttcttccctttgaattaccgtcactctgactatcataatccttcgctgaaccttcttcgtcccctgcttgtaattggactttggttgaacggtaaaactcagtaatatttagctggacatccctaggctttggtgtttccaatatcaattcatcagcgcccgcactcttctttctttttgattctttcagttcctgtgagtttttcaagcactattatgagtttggattaaatttaacaatgccaatagcagttcactgaaattctcttcttagtctaatattataatgcaagtgactttaatatcatacctttcctctcaaaaacctgtttacttcctctgggaaagcagcatgaacaagttccatattttcgtccgtcaacaaatactgacaccccccatcattatgaatcattggtgcatctaactcatctagtaaactaatagattcatcaacacccataatatcacgattagattcatcggaactcggtgtagcactacacataagggatacatcttttctccacttgacaacataaaatttatgcccttgtcttatcttcacacgatctacagagtcaaagtcaaactgcccatacaataaacttttgattgaatggttggctgtttctctcaagaatatggtggacagcatgggaaataacatttgacgaacataagatggaatccagtgttgatgaaatactaagaaatcaatcagcaattcagttttaggactttcccacgttaaacattggtcatgctttcctgtaaacaataatataaaatttcaaaaagaaatcattgatcatgataacaaaaacattcgcacacaagtttactcaactaaggctagttatacaatcttggccttgctcaatcattgacctaatcatgagcgattcaagggctttacaaaaatcaattacagatcttgtgcaagtagtgctaagtgctaacccacctcgaaaggatactaagtatgtttatgcactttaaacaaataaagcaactttatcccaagaaatcaacacacctgtgaaagaaccatggctatcacacgtataaatacgaatgagttcgtcattagggaagttaggttccatagcaatcttggagcaaacttttgataaccaatattcttgcttcttccgctccttttcctcccgatcctgccattcagaacactgttactaaatatagggaaaggaaatattgccgagaatttaaatgaaaaactataacatctatctatgaaaaagtccaagacgataatgtacctcgtgacatgaaagacaatcacatttaaacccttcaggttttttcttgcagcccccatcaggaggagagcaatattcacatgacttctcaacatgagattgtttgctacccggatgcccacagaaagaacaatgagtagactttgccttctgtgagcttgcttccggattggatgtaaaatcatcgacaggtttaatattatactgaaacggaggtgtaaccttgttgccaatttcatgtaatctgcagaacataatcttcagttcacattgtatctagtgttgagcctaatattacaatatagaaaggtttccaaattcatcatagaattaacatacaaacgcacctattcaatatatcatcttcactaaaatttcgaacaaagcgaagagccgtctcaagcccaatgccttgcactccatttatatcatggtcattcccaactagtagagagattgctatcaaatggttcctctttaaaccaagaccagcttcaatatctgacatatagtaacattcaaatggttcctgcatacaatgaaattttcagacttgcagcaaaggtgatgctttggcaaataaaactatataaaatgagaaagcttaatgttgcaagaaaatgaaatctcaaaaaggaaatggaaaaaaaaaatcaatgatacaatcaaatatttgattcaaaagagtaaagatgcacttctgataaaatgcagaaatcttcagatgattgaattttgtagcttttctccttaaatgcaacaactttcattatccaatcaatgtgcttttcaaataatatgctattggttttggtttcaatgtgtgtacgttagtgaaagagagcagtgatggagtcgggatagcagtttatgtttattaaattcatgacatatattaactcaaggaagacatcaatactatatgtaaggaaaaaagatatcactgtgcttgttacatacatgcaattagaaatgcaaatactagaagaaaaaaaatgtcttgatcataatatttttaaaaaatgagcaataccactgaatacgcataccactactatagtaaaaaaatcattttattaaaaaaaattactagactaggttaaggtcccacttatttgttttacttaatagtcatatgagcagctaaaaattgaagatttcacaatgatgaatcagtcaacgactcaaatgaaagcagagtcataatcaatcctgaaatgcaagaacctacagagaaacatcacttactttagtgtttggtttaatggattttataacacacttagccccaaagagaaatgaatcactatcagacgtgatgcaagcatctacatgtccttcagcatttaactgggcacacagtgcttcagcttctccatttgctttaagaacaggcatccccaagagctcaagtagttcctgttgaatcaaatttttaactagtttaatcattcatcgagaatcaccaataaataagataatcacaacaccacaacgtgtgaaggatcacaagaaaagcttcagtctcatacgttggcctacttatgagttgagtaaaatttttagctgaaataaccaaagatattttcttattgaatttgaaatccgtttcttctaaaacctatacagtagcatattcaagcacctgttgtgcagttgctataatttcctggttccccaaaattgtacagttaggcgggcatatcctagtttcaaaagagcatagataataatatgattgctcttagaagttctatgataacatatcatgaaattctattcccgttttcatctcataatagggatagtctatttcataaacgacaatggaagaaattaggaagcttgaaacagcttaagaattaggcagtttagaataaaagctaaacaatacatgaaacgacacaaaacgtttcgctacaattcaattgaaacttgaaactcaaaagtcaaaatgtaaaccatattttatataacagcaaaaaataaataatgtcaaaagtaacccaccacacactcttgaacgcacttcgtaaatgcccgattcctctcaaacgaaacaccatcttcaggcacaggcaggctcgacgactcaattccagaagaacgatagaacctcgcaattctggttttcgatttcaatggagatggagttccatcaattacaagaccgggaatgctccaaactgcaagttcagtagacccatcatccattctaactaaaaatctatgttacaaaaatacatatatgtaatgtccattctgtagttgttctacaaattgcccagtttagaaacgctacaaatgataatggcttaagcgggctgctaaatatgatttatttttctcaagaaccaaacagaaaaccgagcaatacaatactacataagcacacacaagtgttaatatatatgtataaagtgaaatagcaaaccttagaaaagaggttgatagtacggaagaaagtgagcctgaggtgtgggtttcgcacactgtccttaattgcggtctcgtgctgaacgatccagaaggagaggtcaacagcgacacgcttgttcctcaaaaagtcgaaggcttcgtttcggacataaggtttaagcaaatcccagaatttgcctccaacgcccattgcttttaggtttcgaaaagaaagttgaacaaataattagagagacttagataaagaaaaagggaaagaaaaggaaactacaaaggggatttcaaaatcaaaaatcgaaagcatccatggcagaacgaagaagaagagaaagagtttgaggtttatgaaaagagttggcctggcctggttgttttgtctgagcaagaaattttcctaccaaaataggaaacttacgacgtcgtttagtctttcgaccgttgtaaacattaccgagagaattggacagacgttttcttcggcccgttgccaaggcattaaaggcccaattttcatctatttatgggaaattttaaaaattttggattgttaattattttacaagaggcccaattatatgtaaaacaatcactttatatattatttggcaaaatgcttattaaacactcactgctcacaggaggaatgagccaaagttttacaaaaataaatccgaaaaatacaatcactaataatttctctaattcttattcctcctttataacaaaaaaaaatagcaaataaaaacataatccgaccatttaaattataaacggctagacaacgattataatccttttacttagagctttgaaaaaaaattatttatattcaaaagctaaaatatttcttattacaattaaaatatttatacttacaaaaaaaatattttttttcctttttactattagcattcaattcgtatctcaacttgctatgtttatttggaattggaaagaggatacaccttgtgaagaaaaatgaacattaattattattattttgaaaattaatttttatttttgaaatgagagaagaaaattgctcataaatatttattactttttaaattttaatttacttgttttttttactatttccaaaactaagagattgaattttaaaattttgaaggaagaatctattctttatttatgctaaatttttttacttcttcctccacctcttttctccatccatcatcttctcatctctaccgaatatagtgtaaaagacacagacgtacataattaaaaaaatgagaatataaataaaatttaatatgagcagaaatttgtgacttaagcccttataatatatggggtgttcgcaatggccttagaaactttatttatatctaagctgatataactgaaatgtaaatatatcaccaccaccgttaaattgtattgacaattatagaaacattctaatagttaacaaggtatcttttttagtccacaataatacatataaactccatcattattaaactctgcgaaattgtaacttgcaagtaagagagagggtcaactgaatttccaaaaggacatgcttcttgtgatttctgtcccaacacaaaccccataagatcttccccaaatctcaatctttcacttacagcctcactcgctagtcctttcaataattgtacaagtagaaaagaaccatccactctttggcatctaatctgtcatttttttttttcatttaaaattattattattat

SEQ ID NO: 294663 - DNA, 6974 bp, Cannabis indica
ttagccacgtcaagcttcttttttatagtgtctttcaaggtttcattttaagcctcaacttgatcattggcccgaggccttgatattgacgagaagcttttactaattttattcctttcacagaactcagtgaacaaatctccatcaaactaagttctgtcgtcggacactatctttatgggtatcctgaatctatagatgatattcttaattatgaagtctcttaaaggtcgttcattatacccacacgttccaggcccaaacaagaggatggcgtattagaacaagtcccacattgctaatatgtagaaagagaataccatatataagatccatacgctactcctctcatttccaattaattttgagatggaaccctatgcaccttacttgtatgaaatgacaatattgtccctacacacaatagaaactaaatcaagtttccaaggtctatcttgacctttaacctccaagtcaaacacacctttgactccaatcaaaaatcaccattttgatctcttccaaaccctaacaaaataatcaagatatacacaaaaccaaaacacacacaacacacagagaaaaccctagtggagcttcgagtttcttcttcaaaaactccaagtctgtatcaacctgaaaaataggtcgagtaactccacctagatcaaagatagccacacacacaaacaaacaactgaatcaaaaataaagaaagatcagagaaagaaaccaccagagttacagaggttccccaaatgattttgacaggtatttcctctttcaagctctcctcagaagcaagactcatttccactattagatctttaaagatcagttagttgcaacaacggattctaaatcacaggtattgattagtaatccttagatttacaagtatttctttttccctctctctccgtgattatctctttctcattgtgtttctcttcttttgcatgtatcacttgggaatggatctttgagccttaatactagggctctaaatcttagcacagtaagcttcttcctattcctttctgatctcttagtctcctagttttagttccttgtatttatagcagtaatagattaggtgagcgagctgaaaattagttgcaatagtttaacaaactttacaactaactttggttctggttgagagtttattaaggccgaatgccacttgctaatgtaaagtttttgtttcttgttttaattttgttgtaactatattatgctgatctagacagtgtatgtggggatttaatccaacaacttccacctaaatcctcatatgcactggtaggaaattgatctagtttttcttagggtcatagcctaaacccataagaggttttacaaacatatgtctatccctaataagattaagcaaagcttaaacttatttagggacaccactttagttcccatgtttgtagggcttacttctgtagacactttctcaatctctatctccccctgagtaatcttgcccttgatgaaatggtattttatttttatgtgtttagtcttaccatgaaaaatagtatttttacataggaagatgttgctttgactatatgagtatatgatagggttcctcttagctaggtttagctccttcattagaccctttaaccatagggcttccttcatagcttttgttgtagcaatatactcagattcagtagtggataaagccactactagttgcaataaaacttttcaactagtacaatttcccctattaagaaaaagtaggttgatataaatattttagtgtccctatcccctacatagctagcatttgtaaatcccctacatagtcagcatttgtcaatcccacaatgttataatgttccgggtgtgcctagtatataaatcctactttagttatgctttttaggtatcttataagccatttcatggctttccaatgttctttccccgaactagacatgaacctgcttagcacactgattgcataagcaaggtcaggtctagtgctgaccaaaagatacattatataccctaccgcgttaaagtagggtacttctgccatttcatcttgttacaatttattcttagggcgcattatcttggacatgtggtattggttggtaattggctatataatacccttagcatccttcatagagaatttttctatgattttgacaatgtaatcttcctagtgtagcatcagtcttcctttatttctgtcccataggatgttaattcccaaaatcttactttccactccaatatccttcatctcaaactcaggcttgagtaaaatcttaaccttatcaatgtttgccatttccttgttgacagcatgtcatccacataaagaaatagatagacgactttggtcactttagtgcctttgaagtatagacaacggtcacaataacttatgttaataacatgcttagtcataaaggtatcaaaccttatgttccattatcttgggaactgcttcaatccatataaggacttgcctagcttacacacatacccttctctgcctttgacctcaaatcccttagattgctccaagtagatgtcttcttctagatacccatgtagaaaagttgtagttacattcatctgatcagtctccatgtcaaactgagttgctagggataacatgagtcttatagttttgtacctaaccactggataaaaaatcttagtaaaatccaccccttccttctgtttaaatccctttgccactaatttggctttgaacctcataggttcatccttggtacttccctctttaaccttgaatagccattttcaagacactacactcttgccttcaagtttaagtactgctctccatgtcatgttctttattagaaagtacctttcttccttcattattttcaaccaagctttgttgtttctgtccttgaggacttcttactgaggctcatagatctcagtatctaacttgcacgtctaggcataggcaatactctcatcccatatgttgtagttgtatttctggttaggcttaggtatccttattgcttctgtccttagaaaattgatactctgttaggtcttcttgattgtggtcctcctgatcttgtatcccaagtcccccatgatctattttaaattggtctagtgcggcctaaggttccacctgaactggttccacctgatttggattaggtttaaagtcagttaccatgcttttaggttgaatatccatagtagtacctgtagggttagtgtttgtagaaattgcattaagttcattagaatttttgaaagaaaaatcattttcttgaaaaatcatatccctacttataagtgttttgaaatcccattttcctttaacccacaacctgtagcctttaactccttctgggtaacccagaaatacacaatttagagcccttggctcttcaacacattggtgtgcaaaagttgcacaaccaaagacctttagatgagataggttaggtggattaccaagccacttttcctctggggtctttccttctattgcactggaagggcttctgttaatcagaggttttagtgaccactgcttttccccagaatccatttgtaaggcctgcattgaaaagcatgcaccttgctttattcaattttatcatgttcatcctctcaacaacaccatttttctgaggagttttcctcactatcatgtgcctctaaattctattgtcttgacaataccctgtaaattcattactacaaaattttatgccattatctgttctcaaggtttttcaattttctgttagttagattttcaacaagtaattttcaatgatttttttttttttgaaaagcttcatttttatgttttaacaaaaaaaacccacaccttcctaaaaatagtcatcaacaatagacaagaaataggcactgcccccaaatgttaggattttctcaggccttcataaatctaaatgaacataatctaatataccttgtgatttgcatgtgtcagtttgaaatcttaatctatggtgttttcctagtacacaaaatttacaaaaatcaaccttggttaccttatccttaccaagtaacttttattcactcatgatttgtaggcctcttttactgatatgccctagtcttctgtgtcatagaacaaccttagtatcttctattacatgttcttttgtattgtggcagcatgccactggacttccttgtaagtaacatagatcaccattattttatccctttataatcaccattgaacctttagctagtttgatggtacctaccttaattttgctattacaattctcaaatcgtcaagtacacttataacgattaagtttctagacaaatcaggcacatatttaacattagttagagttctaataatttcatcatacattttaaaataattagtagaacctaatctgtcaatatttcaagtttgatcattccctataattactttccctcctttagactccctgaatacaacaagtatgttttattgttattcaaatggaaagtgcacacagaatcaataatccaatcatctttaaaagatgatgcagccacatagacatctccactattataaccatcactgagattgacattatgatagtcattctagttctttttgtgtttgtttgaatcttcttgatgatctgaattaggttccctccacttctcctgtagaagtagcattctattttgaaatttccaagttattcacagtgatagcacccattaggatcgttaggacttttagagtttgatcttcctttgttatgatggttgtttcctttgtaagagcccctactttggcttcttcctctatttttccaaggtttcttttgacttgatcttccccttcttaggttcaaagcttccttaaaaattgccaggtatttcccctttcatttccaaatccttaaatttcaatgttgagattacttcttcaagagtgatctctgttcttccatactttattgcattcttaacttccctgtcagttttggcaaagagttgagaattattattgctttgattctcattactcaaagcttcattttcccctgagttagccaactcaatgtgcaatcttaagaactcatctaagttctgttaagagtctttgaatgacttattttgaaatcaaagattctctcctttcaaataaatcttgtttgatttagagacttcttttttaaagctgttcctccaatttcttccagatcttagcaagtgcgttctctttatcaaccaatacgattatagtatcagaaagattaaaaattattaaactagttattatgtcaagcaattcctcttggtgagcctttgtagtatctgctagccatgcaataggatcacttaggacttttggtaatttgttctatgcaagtaaggctctgattttcttcctccatattcgatagtccgctgaaccatctaatctgtcaatgtccattttaatagaacccatagttattgtgtaaagaattatatcaagaattataaagatttaggttctagaaatatcttgatattaatcttgtagatgtgtaaaaataaaatgttattcttgatgttctgaatttccctgttccttccttgattttcttccctgatttctgtcgtagctttcttgccaagaatggttctgatacatctataggaaatgacactgttgtccctacccacaggccacaactgttgtgaaactaaatcaagtttctaaggtcaatcttgacctttaacctttgagtcaaacacacctttgactccaatcaaaacacctttttgatctcttccaaaccctaacaaaaaaattgacatttatacaaaaccaaaacacacacaacacatagagaaaaccttagcagagctttgagtttcttctttagaaacttgaagtctcatcaacctgataaataggctaaacaactccacccaaatcaaaaatatccacacgcacacacacacaaacaatcgtgaattaaaaatgaataaagatcagagaaaaaaaccaccatagttatagagatttcccaaatgattttgatgggtacttcctcttttgagctctcctcagaagcaaggctcgtttccactattagatcttcaaagatcagctggttataacaatggattccaaatcacaggtatcgattggtaattcttagatttacaagtatttctttttccctctctctctgtgttaatctctttctcattgtgtttctcttcttttgcatgtatcacgtgggaatggatctccaagccttaaccctagtgctccaaagcttagcacagtaagcttttcctcttcctttctgatctctaagtctcctgattttagttccttgtatttatagcagtaatagcttaggtgagcaagcatgaaagctagttgcaacagtttaacaaacttggtaacagtttaacaaacttggtaactaactttggttctacttgagagttaagtgtgaaggccactttctgatgtaaagtttctttatcttgttttaattttgttgtaactatattatgttgatttggacagtatatgtggagatttaatccaacattactaaattcgaacagataccaacatgagattcgtagccatttggtctctttggctaatttttactagagttaactataaacttggtatcaagagagtgtaaaacaaaatttcatttcttagaatcgaaagaaatcgtatctcctccaagactaacacctaattagtgttttaaggaaaaaaaaaaaaagaaaataagaaaaaaaacttaagtattctttttaaaataaacataaatttatcactatcatgatatcctctaatttttatttattttatcatctttgcacctatatatagccactagaatattaaagatattgcatactgcaaaaaaaaaaaaaaatacacaaaaccaaaaacaaacaaacaaaaaatt

SEQ ID NO: 294664 - DNA, 2998 bp, Cannabis indica
aattgagtaattattatttttatttgatagtatgtcctcttattcaatccaaaaactaaaattattttagattatattaattgactcacttatacatttaaaataactattaattcattttttaagaaaaaattatcaagtagaaactcgtctaattaaattttgtaattgtatatacaatatgccgaaactattaattataagaggtgtagaaattaatggatttacctgggcctggttattgcttcgatctaacattggcagcaaaggctgcccttcaagcttgccatgaggaagtaacccagaacctgaattttcagcctcctgagatccacggtggtgatcgtgaccatgaatattagaagtttctgagttcacagctccagactcagaaattgaaggcttcttttgccagccttcaccatcctgtgtaataaatcttcctttaccataatgatcacttctggattgtgaagattgtgaagacatcctgtatttcatcatatcagtgtatcccaaactgtataaacagattatataccaaaggaaacatgaaaaataaaacgaacctggagatgtttgtttcagagccaacttttgaatcaagtttcttatctcccccagagaggccaacttttcggttgttggagctgctaatatcagcagtataagttttctcaggatatgaggaaccgcccccagattcattcctattctgtgtaccttttgcatttgaatgaaatttattttttcgatcttccccactggaagcaattatggtttcgttacgcccatcagaagcacgtgcttttgcatttaattcttctaatctctggatcagactggaatcttttggggcagctggaagtggtgaagcttttgacaaacccaaggcctcactttccaatttctttcctgaaatctcatcaatgaccttcatatttcccccactactaggggacttcactttgacagggactaaaagagcacctttgttgtcggaattcggaaatgaagcttcttccacaggggctttccttaaatcccttacctcatcctttttatatgatctccagtcatcttcccagtatgaagttgtctttggctgatctccccttgatgtatcaagggctacagcactctcgcttttatgctcctcaatttttctatcataaccatcatgctgcttcagaaggaccttgtatggtcctcgattatcctggggatgaactgattccacttgttctactgcctgtgtctggttgacagagccatatccactagaccgtccatgggaattcccaggctcaggagcaacttggccaggatacatgttataaacaggacgagctgccatgcccataaaaggaacatcacgatcatttgaactacagtatcccataggaggaccgtagtaaccctcgtaggttactggaccagggtaaaaaccaggctgcataggcacacctgggcgaatgaatgcatctggcatatgaggtctgtacatatctccatttttaggatgaggacctcttggcccagctccaggtgggggaatcggctgtggattgggaagaccagcagtgggcatatgtggacgataatatgggaagggttccattggataaccagcagcagcaaccggatttccataaggacctcctggaggtcctctaaaccaaacacccccttgagggttatttaatggagcgccacgccaaccatcaaattcataatgctgtggatggggagggtaagtttggttattcccctgccacttttcctgaccaggcctaaccccatcttcacagtacggtggactatctcttttccaagaatttaccgtgtcattttttacaatgtctcttgttgaaagatcacctgaatatttaaaacaaaaaattaatgtactcatagttgttccaagattgatgttgtaaacaagctattaggagcaacgtaagaaattgtaatgcacgaatttcataagcgtgaacactaaccagtaccagaagtcccgatcctctctttagttgttcctaatccactggaggatgaaccaggacggctatgagaactctgatctgtcagcaacatcacatcaaaaaaattaggatgataaaaataacttacgagtacaccacaacatttcacataataagccttgtcaccttgatgcactttaaccctgttcatgcaaatttaggtcacattgttgatacatatgttatatacataatcatgcaaacagtcagcaatcttaccagaactttcttttcctgaaccaagtgtcggaaagtctccagaagtaagcgaaaatccatcattttttggtggcgttacaccctgccacataaccaaaaaggaccaaatgtataaggtatcaggctgtttacataatatgttgaaaaaagaataataaacattacaaagaggagcaaaacaaacaaaagcaaaggtggtgactatcaggtggggtcacaaaatcagatgtccagattaaagacaatcaactgcataacgttacaatctcctactcaaattcacactattataaatcaacaagatatataaaaacatagaaacctatcacattagaattattggcaaaagttaaaaaaaaaaaaaagaatattctcatttagtatcctatgttttcaataatacttatttggtactttgtattttgaaattgtacatatttggtaccctaaagtaagatttaatcaatacaattttatcaatttgaccaaacggttctcaattatatgtaatcaaataattaaatttgaattcaaaattcataaaattgaagagagtttgattgcattgatagaattttatcaaataaatttgagtttagggtaccaaatatgtataattttaaaatacaggataccaataattattattgaaaacacaaggtaccaatttatatttagataaaacataagatatcaaatgtgtagacacccaaaaaaaaaaaaactaaataatg

SEQ ID NO: 294665 - DNA, 5944 bp, Cannabis indica
gagaattgtctctgtttgaggtgcctcaacgtcatcatgaggctaacacctgtatttattattcttattttgagagtgcttgaagtgttgtgcctaacaaactagccgttgcgttgacaatgacattatttggtgcaacaaagtgacttttcttagtattggacctaacaatagtgcctagaatagttatttattacataaaatcatagcattagttagaaagtacgacatgagaacacttgagtttactagttcaaacttttaattgaatttgaatatatatatatatatatagatataatttcccttaatttttactattattttgtgttttttatgatttattagtgtttagaagtttaggattttgaaaaatagatttttaatagaatattgaggcttaaacttgtatattttaacattggataacaatattaataacggtcataattgtgtagatattgaggttcctgctgacccaaggtcgagacatagtgacaaggatagagaagttggccagtacatgcatcctccaacaaatacattaagagacactgatagcagtgctgctctgtttctccgcacaaactggcagatacaaggatttctacaagaacaagctgatgctattgaaaggtcacacattattaatttgttattattctaattattttcattaagtttattttagtttgcactatgtttaacaggaaggatttttgggtggaaggaaagagttggaaggggagaataaatcatgtgtttggtagggaagaaagagggagggagaggaaatgtggatggataccttctccttccaaatgtacaaaatccaatccttccaaaagtggaaggaagagagaaagggacaaaataaagtatattaaatgtcctaaatacccttcataaacataaataatatatatttgaagaagacaatatagtaattttgataaataactatctttctatccttccaaatctacttctaataccaaacaacataaaggagacttgttatcctttccatctttcctaaattctccctccttccttccctctcaccaaacatagtgttactcacttattttatgcagtttaggtggtatatattctgaagtaatattattgtggcaggcatggaggctctttctctttgaatgcttttgaacttgtcctgcggcaacttcaaaagtcagcacctaagctgcatcgtgtaagttatctttctaagtatctcattgagtttgtttattacttttgagttagttgcttatttctctcaatgtttcttttatcctctttcacaccatctttctctttaaataaagtatttttccatctattattattataaatttatgctgggttctattgcaggttcgtttcttgcgatatttgaatagcctttatcatgacgactattttgctgcattggagaatcttcattgctattttgattacaggttatcagttgttatgttttttgttacatcaacatgttacttgatctacttctgctttagttattctgttcattattttgtcagcttagcatctttaatgttaaatggagctgttggcattacgagtaaacaaaatggggacattgtaggttattttagtttgatgctaggtggatttggctttctagtattttccttctttctttcaaaaaagcttctatgattttggaaactttcaagtcctcttgtttgatattgtgcattttgtggtatattgaatttttgcttttgtgcacatgctactttatgtgggatcaagatgagatttataaagatgctattcttctccagttctcctcatttgttgctaattttaatatattgacttgccattgttcatatcaacatatgaaatgttctggatatattgatatgtagaatttacaatttagttttgatttgcatttccattgtgcttctttgtgacacttgtttttttctccagtttcttgtgcttttattataacttcctctgataaattttattataaaccaaaaaaataagaaaaggaaagcctaatgaaagtgtttacctcaaatgatctaatccaatatatgatgggactaaagtgcagggattgaaggattggattatgttcctcctgtatctggttgctataatttagggagatatgaagttgctttgttgtgcttgggaatgatgcattttcattatgggcacccaaagcaagctttggaggtgagtatgtggaaatgaattcatttaaaatcctcttcattttctccactaattatgagtctgattatagaagctgacttcttcataattgtgttgtttgaacaggtactcacagaggcagttcatatttctcaacaggtacctgttggtttgatgttaaaagcttataattgaatgtgctaaaagattattgttaatatccttgatctcattctcctgtattgaatttatgaaaagtcaagtgactttatccttcatgcttctgtcctagtctgatgccttgtgacttctacttgtacagcaaagtaatgatgtttgtctggcatacactctagctgctatctgtaacttgttgtcagaaactggtatctcaagtacaactgggatactgggatcatcatactcacctttgaccagcataggcatttcactctctgtccagcaacaattgtttgtactcttgagaggctctctgaagagagctgaaaatttgaagttaaaacgtttagtggcttccaatcatctagccatggctagatttgacttgacggtaagaacaaatttgttaccccattgtgtagatataggctttctctgtagttcttcttctgaacttcagtttttcattttttatttcttttgttgaaactataacacatgttcagtgttcataagttactactgcaacttagttcaagtaccactgtacgagttcttttctaacgtatattctgctgattttctaacttggaattgctgtactgtcctctacagcatgtgcaaagacctctgttatcatttggtcctaaagcttccctgaagcttagaacatcaccaattaatgtttgcaaggtaccatggatggtttgatgataatccttgttcattgcctttttcttattacatttctctgttttttcaacctattttaaccatccttgcaggaactaaggtcaagttctcagttgattaccgagtttgcttctgaagatacaacactgacaactgatggtcattttagcactgcatggcttaaaaatttacagaaacctatgggttcacaggtgttatctcaggaaaatggatctgaaagcagtaataatgcttttcagttctgcgggcaaccaagttcaattcctggatccgtgttgcaattaatgggttctacatacttacttcgtgcaactgcatgggagacatatggcaggtaatcttaagtgaggatcattccccccactctatttatttttaagattgttacagcaacattacttctgaagattcttgtaaaatagtcttctactatttgtaatgctgtttgaactttaaagtcttaactataaatttgactagcttgcgatcaaaaacttcaacttgacatcattagatgctcttatatgtacaaagtaattaaataggtagcctcattagatgtggctaaagaaccagggaaaaacaaattagttcattaaaaatacataggcaatggtgtgaatcctaaaaccattgaatcttgttttagtaagtgttctaaagtaataactcctagttacacggtgagtaccaaaagtggacaagcattatgtggagggattgttatgttttaatgtgttacctagttataggcatgaaccttactaaacggtacatgggaatttattacacatttgtttcatgagggttattgcaactgcaagaacttaggtgatctaatcggtcaacaattttttctttgttttacaaggcatagggttaacttgggtcctattttgtatcatgtgtatttcatggccaaagggattctatcttttcacatatacgttgttttgcatgctcatcaactctgaagtcagaagtttcttatgtttggttgagagtaatgaacacactagaacgggattgagaataagaataagaacacgaatagaataaaatttaatatgttaaaaagtattgtgtcatggagtggactcccctcctaagttttgggaggaacagccattcccattgtaaagcttcagagttgcttagtttagcttacaatgaattgattgcttacttgtttttctttcttctgtttacgtcagtgcttctcttgctaaagtcaacgcacttgtttatgcaacttgctttgctgatgtttcaaggtaatgtagcttaagctatcacaggatttgaacactttgtttttacacgtattctgtgattgtcaacctcattcttaacttatgtggtttatttccttcttttttggatatctctagtacatcagatgcatcattggcatatgtgaaacttatccaacatttagcagtattcaaaggatataaaggttaatttaaatgcttaaattccttcataacacttcttcacatggatttttctgtggtttagtggcacattctctctcacatgtatttttatctctatatctgtagaggcatttgcggctcttaaaatggcagatgagaagtttttaactgtgtcaaagtcacgaatcttggtactgaaactgcaactgctccatgagcatgctttgcataggttagtttatttgccagtctcttgcttttacttatgttatatttttgccataattctaaatctaatatgtggtaagtatcatttagaggacatctgaaacttgctcaacaagtatgtgatgagcttggagttctggcctcatctgttactggcgtggacatggaactgaagacagaagcaggtcttcgccgtgcgcggacattgcttgcagcaaaccagtttagcgaggtttgataatcagtatattaaaattcttgaagctaaattaattcatcgactgagtgcattacagagctacatatattgtaatttaataactcttgggccatgattggcataagactttatctccagcagataggtttatgtagtctaccagcactggagtccaataccttgagaatctccttaccctggtttaagagcttttcaagttatcagctgtagctcattgttttgaactatttggcatatgatatctgatatttgtgtattctactcagttgggggataagcgatcgcttgaggctagcataagtggttggtgggtgagcggttttgggattcaagctcctgtaaatatatcttaagaagaattaaaatgaaaagtagtctgagaatagaatagtgtcttttgcaaaatacaaatcaatggatttagtgattcatgttgctggaattttggcagctcttgagcctcaaggttctggaaattgataattcttggttatataaacctgcagttaaggaagaaggatggacctgaaccgtaacattactagtgtatcatgtatccatatatttcatttgacatattctcacattttctgtgtatgaaaaggtattgttttaaaatttgagggaaattgatagaaatgtgagggctgatgtgcatttacttatactaggagaggtattaggctgtaatgtggtgaactggctttgtgagtgagtggaggggtgtttttcatttccttattttgggtgagcattacttttatatctgatttgagctgcttttagggtttatgctagaacctggtaattctcagcatcaatagagagcttcagctctcctcccttgtagagacttggtctccttttttccttttcattcaataatagctcaccatttcagttcttcacttgctatgtcacttctctgttatttgtg

SEQ ID NO: 294666 - DNA, 1740 bp, Cannabis indica
ttttttttttaaaaaaagaagtgattgtgaaataaataagtttgcccattttagctcctcagtgttttaatttatttttggtctattatgaaactatgccggttgccatgtgcaaatgtgcagacaaattcaaacagaagagacccttttcacgggttaaatagtttatagaagaagatagattattaatgctaattttagtgtattaattagtatcagatttttaagctaagctaaagaatttttcaagattctttgcctcaataggtagatagagtactttggctgttactgtcacgggttaataatactatactaacaagagaatcttactagctcatttacccaaggcaagctactcaatagtgcaatatagacaacattaaatatcatcaacaatgctctcctttgtttaccttaaattctcaaccacttgtttctttaagtttagccctgtttgtgttgtcttaacacatttttggtcatgcattttcatttaagccaaaataagttacactaatttttaagtgcaagttctctctgtgttctgtttttgggttgccatagtaaagtggtcaagagtttagacaatagacattagcagttatttttttctagtcatgacatgattcacactgttatgttcagattttgagcaatccttgagtcgccaacctgtatccgagatgttcaccgatcttcctccaaacgaactcccgaatattcccaagaatcccaagcggaagaagagcaaatcaagttcgtctacaggctcagcatcgtcctcatcgagaggttttcggttgacaaaaccaaaggctacacacaacaacatggaggcatcaccaaatctgcagctaatttgattcataactttagttcatagaaattcacaagggcaagaatgaaaagtcttcaaaacttgaacatagatagttatttgtgtacattttggaattggaaagaaagggtatggataatggggctgcatataaaggggattagagagagatttgtggaagaaaagggtgtgaatgtgttgggctgagtcgtcatatagactttttggtggtttgattagtgatggtatttatttgctaagctgatatttggactagaacgccataaatttttacttgtaaattatcagcaattaaacaccattattagtatccaccaccaccaacagataacatttcacaatctgataacatctttggattgacacacaatagtgtcctttagcctttatttataatcccagatgatcaaactacagtctcatgcccttattcaaaattggcttttagtttcgattaatcattcaaactacaatgttgctgcaatcgtgtctagatgggttatctcctaggaataatttggcctctactgacatttcaatattgacttattgaagtcaaaatatagagaacgtacgtcatcataatgttacaatttgatccccatattatattgatatatttttgttgtgctctactcttttattttttgaccttgattatcatcatggattatttcataaagttaattagtcttaattttgatatgtaccaaatcttgtcccctgaactttaaagtcgttaaaaataccgctgaactattgagattgttgaatttagaattttatctcaataattcagggaaaatttataaatacgaaaaatgataaaaaaattatatttttacgaattttaatatatatatatatttttacaaaaa

SEQ ID NO: 294667 - DNA, 2293 bp, Cannabis indica
gagagagagagagagataagagattatatatgtgtgatgatcagatgtaatagaatattaattaataatatacatatatatttggggaaaagaaacagaaaatgatgaatatcaaagatctctctagctagaaattaaagaatgtgttataatatatgtcctctatctctttttggtatcttaccaactaaatatatatgataaaaaataatgtgaaaatgggacgtacgtacgtagtgtaaccaatgtaaatatacatataattaataataataataataatagttaggatgttgtaccaagaatgagaacaccagcgatccaagaaccacttcggcctctgattgcagggcggccatgcctatcaacacttccatcaagtgtttgctcttccttcttctgtttcttcacttcttcaatatcatcatatctctgcaaatagttgattaatattattacatcattttttttatttactatatatatcaattaattatcctctgctttctttttcttttttggtagtagtgtcgtatacgtataagcttattattatgtaatatatatatacgtatatatatattatgattatatagcatgatatatatgtgtatatcgttatatactattaattagctgcaaacactcaaaattccatcacatatattgtgagctagctatctttaaacctatgatcataaatatatggatatatagagtacattcatataagtgtatatatatatatataaacacttgtataaactcactacaatatagcgtatatattattaaaatttaccaaaaaaaaaaaatatagatcacaaaagcataataataattaattacctgatctttgaaaatgttaaggcaagccattctcctacgttgaaatcaagaacgagattaatgaaagaaagaaatatatgatatatatgatcagatttcagagagagagagagagaagagagagaagcttttcactaatagtgttgaagaaaatagagaaaagggttgtagtatatatagagaattgagggattaattggacggctaggattgcgtacgtggaaaagtttatatttatatatataaattaaaaagctaagatgaagaaaaaatgatgagcacccaatagatctaactaataagaaaagtttcacgagaataatgaggcactagaagcaattacatcattacaagttaacacaataatatttaataaataattaattaatgaacaattggcagaagtaaaaaaaaatgaaagcatgacatagttggattacagtcagaatatgtaggactcaatttggtgcagctgggatctatgaatctgcatgtatatccatccaactaaatataatttaaaagaacatataattaaaagaaaaaacatagcacagtagaactagttgatgagctggttatatatgtttgatattgacagggtttaaacgtgttattattcctttatgttctttttcttttgtattaatatgatgtttataataataattattattatttagagaagtgggactaagcagctgtgtgtatatttcatatggggtccaataaatattgaaaattaaaaaaaagaatccgacataaatattcttatttatttatttggaccaattcgaatgtatataaatacaaatatgtttatatatttatatatacatgtatatatgtggtgctgattggtaagaaaggaggaggaaggagaggtccccaaatttggtggcttattttgactcatcatcatcatatcatatcatatatatgtgctttgccacagcagccgctttaggcctaattacaggattattatgtatttccaaagctatatattatttcttacaaatttaaataatatatatttatataagttattgtgctagctagatatcactactatgaatatataatatataatattaattttctctgcatgaccatatatttgggtaattactggatgagtaaattggatttttgcttccaaactgttactaccattttattatgctttttaaacttttcacggtgttttaaatgcctcaactattattgttatattattgtgcatatagtttttatccaatgtgactaacgaaatgtataattcttttttggcactttaaacaataacatagtagggacacattattaccatgtgtattatttatttatttatttttgaaagaaattcaaaatttattatgaaaaatctaaaaaaacttaaaatacgaggacaaacatccgtccaaacacaatctcctaaact

SEQ ID NO: 294668 - DNA, 4060 bp, Cannabis indica
atcgtgactgtgctttaatatgggtgatagcggctgtgaccaccattgttctcgctgctcccccgccttccaccactcgagctcccaccatggttgcccctaccacctcgtgattgcattggagggtgatgtggttgcaagctaggctgttgcctattggcaaaatgattgaacttggcattagggtagaattcaactaaacttgtactatataccaaattatataaataaaggtgaagcctcttacagaacatatccaattcggccatcaggcaaaagcattggcatcatagctccagcaggtgtcggtccaccaccgtagataagtggctgcaacagattgttatcacctaatcaggcacgaacagttttgtaggccttgttttttcttttctggtataggtcttgtctaaatttacagagagattgaaaaaaagcagcatcttacttgagcaaaacctacaccaaaacctccagctgctcctacagaaccataaccaccaccaaccatgccatagcccatatggggcgggtaagttggaagcagggctgaattttgagaatttgatgctccggaagacctctgatctgcttgtggctttgcaagagaacagtccaaaacttgacctacaagcagaaaggatcgatttgagattgcttacctaaaatgtaaattaaaattaatcagcttgatagataacgagcctagactcaccgtcaatttcatatttctcagtgttcttcaatgccttcatagcacttgatctctctgcaaaatgtacaaaaccatatctgctcttctcctgacctggttttgcaggtgggagaaccactttagtgatcttcccgtgatgctcaaatgattttcttaaagaatcttgagtaatatcctttggtagattcttgatatatattgccttaacctggatcatacaaaaaacaacatttggaattcagcaagccagactttccatgtggtgcaaagggaactgtggggttgaattagttataaaaaattaacaagaaatataatcaatttaaaaagttttagcaaccaaaacccgactatttaatactactatatcctttctctgaatccaacagattgcaggcatcaccaattagcaaccatacgcagatcatatataacattaaaaactccaaacgtgagaataagcacaacaggaatccaataaatgcatagccaaaaatgaaaaaacacatatggatcacctgagaagaagaagaggattccatatttttagggtcagcccagctcacagttggagcattggtgtcaagcttaaattttgggtttgacatcttttgtcttgagtgttctgcacatgcatgattataatattcaatgaaagaaaatccacgattccggctggagttctgtgggtcctgcatggttgagaagattacaaaaattagagacactctcaaggcacaacagataatcatgaaattagttaaatttggatattaaaagggcaagagagtaacgaataaaaactgaataagctcagggctctgatgaaatattttggaaaagatgataaaccttcaatagctccaccgaaataacacctggtccaatatctgtcacagccttcttcatatctttctctccccaatttctaggaacattaccgatgaacaagcgattctttgcttgagatgttgagcattttatcttcttcccctgagaaagaaagcaacagccacccaaaaagaaagttatcttacaagagaaaagtagtaaactcacattattgattatagcagttcttcaaacaatttaaaatagagacatcaaattatcaatgagaaagtgctttaaaaaaattatcaatgagagaggcagtgacgcactatcatatgcaagacgaattagtagcagcacaattccaaatcaaataaactcagatttaattacttgatgagagtatatagaccaaaagtggtatgatcacctttagttctgaataattcagttcctcgatggccttagaagcaaattccttggttctaaaggttacaaaagcataaccctttgcctcacctgaatcttttccattcattatcctaacctgtcatcagtaacaaaatttagttcagagctttagtaccagcatgcagagaaagaaacagttaactagacactacctcagtaacttctcctacagattcacaaaaggccctcaaatcatcttcagaagcaccatgtggaatgccaccaaggtaaacttctgacccgtgagggggaagtgcaagaagctcagcatgtatttttttgtcatcttccttaactactttcttctcattgtcaacttcattggcaacactcttaccttcttcctcttcttcttcactgacctcctcttcaacttcttcctcttcttcttcttcttcctcctcctcctcctcttcctcatcttcttctatttcttcatactccacctcttcctctattgtctcttcaggatcattatctccttcaaggtccacacgctcttcagaatgtgttgacattccagcatccataggcttttcggtagcttcagcactgctccttgtccttggcatcttatgtatctaaagaaaagcaagcttgcaaggcaactgtgaaagaaacacagaagccagaagcattcacaggagaaagaataatatggaaaggtggaaacaatatgagaggccaaatggagttgcagaaaaagaatattgactgaatctgtgccatgaggtatggccttaaggagttacaaagagaatgatttacagctaacggagcaccaaatagtaacaacaattagagacaggcagaagagaagtctgaatgaaaatcaagaggatggtgatgttcaaacggtgaccaaaaaaaaatgaagatatggaaaggtggaaacaatatatcgatgttaccaaaaaaaggacaagtttagcaagttatctggatgcatcacaaaatggaaagagagggaaaagaaaaagaaaagaaaaaacaaatgagatatcaaacaacatattgtggaaattacatattttaacatataaaatatagatatatatatgtatataatatacatatgtatattcacatcataataatgcaagacaattcaagacaatagcaagttaaaatcagataattgtgataacaatagaaataagagacaacaacagcatttttgtaactgagtttgattataaattaaccattcaagagccaaaaccaaaagctccagaccagttgcaaagactaatctaataatgccaatctcacccatatgaagcacttctacctaacaagtttgattataatttacatttataatgaccgttaatcaagagcatcccgaaacccataaatgtgaaaaattctatgtatctaaatttaatattactattcggtaacctaaagaaaaatcaagaaacaacactacaaataacgtatagaaatatgctcagcaagttatagaccataagttatctattatgtaaatgaaaagacctcaaatgatatctggaatcactttgaggacaatttggaaataaatttgaatctcaaaatgagaatattgaaattacttccaattacttacgaaagcaaggcgaactaaacaagtgaacgcgtatattataaattgaattacagacgagagagagataagtggttattcgttctgtaacgaaataaataataaagattaatttaaatgatagattaggagctttctacaatgagatcataccgtagtagactaaaggttcacaaaatcatttactcgttattctaatctcaataaactacaaactgtaaacataaattgaaagagcaccacactactgatgagatattaaatgaagagaaaaaaaaaacacagttctctaagcctgacctgcgtgagagagagagagagagtgttggaggcggttccggtgggtgcgggaagaatttagagtcggcgccggcggtgtggaagatcggtaaccggggtggtgagtgagagagagtcgatgatggagagagtgggttagggtagaaagacag

SEQ ID NO: 294669 - DNA, 9060 bp, Cannabis indica
cttttgatcatttaaagtcaaattctttacttttcattaatttatcccatcttatgatattgcatgtttaactttttccatttattataaactcttcccaaatttgtgtttaaaacttttgtacgctcttttccaagtaaaaaacacaaaattcaatccaaaatggtaagcgttatctccacgtgtcactcacccatatgccaactggatattctctaatctaacaacattccccctaactgggcccactttgtctttctccaccgtcagattaaccaccaccttaaatccaacggtcaagaccatctgtatcctcaccaccttaaaaaccatacaaaatcgaacggtcaacgttctctggtaaaaaaccaaaaccaaaaaataaaaaaaaaaatcagaagaagaagaagagaccaaatttggaagaaggaaagctactatgctccgtgaagaagaagaagaccgaacaagtcgagattttgacaccaacccattttgaggaacaccctttttcttctgttgttaccgttttttttttttgggtatggaacttccattgatgtacttgaatccttcttcgacggcgtcgttttccggtagagttggactatgttcgaggcttagtgattttccagcgagggtaaggaggagaaaaaggagactgagtttttctgatgttcacatggttcagttccgaccggttaaagcttcgacggagcaagggagtagagaagctgtggatagtagaggaagtgaaggagagagcagtcgagggttcacgagtcctgctatggaggtcactacattggattcttttaaggatactgagtttccggtttgggagaagattggtgctgttgttagactcagctatggaattggtcagtttcttactttgttttgttttggttaatctctaatctctcataagatgttcccaattataaattttgactatctttgaagaaaatttagttgatagaatatactatatctatatgtctttcactttgcttggtgagattccttactactagtttttatgattgttagaatttcattacaagaaatggctctgctagttgagtaagcattgaatttcagcttttagttctaaaaaaactccttcaacataagccaatttaatgtctcatgtaaattttcttaatgtatatagactttcatatttctatctttagtgtattgaaacaaactatatttgttttcaatttccattatatgacttcttttcttaatatgcacaatcaggaatatatggtgccatggctttagcaggaagatttatttgctcaatcactggaattgattgcttgggaggttttcacccatcattagatgccattttagatggcctaggatatgcagcccctccaattatggctcttctatttatactagatgtaagttggcttctcatgttttgaaatgacatttcttcttgtcatagttctgatgattctataagtcttcttgcttaattgggtttgcaataaaacaagctgaattggttttaggatgaagttgtgaagctatctcctcatgctcgcgccatcagagatgttgaagatgaggagcttcggaactttttctatggcatgtctccatggcaggtaatgatcttgtgattatgtacttattaaacgtttcatagtttcttgaggagaccaagaaacaaattagttaactagtgctttaacttgcagtttatactagttgttgctgcaagctcagtgggagaggagcttttttacagagctgcagttcaggtatccttagttttgattatgtgaaacttcatgatcttattatcttcatgctaggtgtttttacttagttgtaatctcttttgactattttccagcataacaaaatttaacttgaagaaacactgaatgattaagatgcattatagtgattttcacaacacaacataaaaatctggttgccctttttatattagcatcttcatgcctaaaaatataacaattttgtaattatgtagggggcattggctgaaatattcctgaagggtacagatctgatatcagatgctagaggaatggcctctctggtatgcaactctctctctttccacattatcttttttttttttcattattttcatgagtgatgaattgctttttctttttcttaaaatgtagactggagttcttcccccatttgttccatttgctcaggcttttgcagctgtcataacagctgctctaactggttccctttactatgtggctgcatccccgaaaggtgaatccatcgatcatcgagctaatattgcacctgagttttcatctttgcttgttcaatttttcgtttgctcatcgtatttttatgtttcttccagaccctgcttacatagttgcaccagttttgccatctcgtgctagtcgcgaagatctgaagaaactcttcacaggttttcactatgactcttgtgtttctcatcaccttgtttgagttattccatcttaataatggcattgttcttaaaatcttgtacactaatttggttgcttaaaataaatcaatgatagtactcatgatttgttcatcattgggttctgcagcctggtataagaggagacaaatgaagaaaatttattctccattacttgaaggacttttggctctctaccttggatttgagtggatccaggtaaccattttgcctagactcaatttttcttaacctgcatactctgaaaatttcgaaaatggttgagttgttctaattttattctggtgaaaattttacagacagataacattcttgcacccataatcacacatggcatatactcttctgtgatactgggtcatggtctttggaagattcatgatcaccggagaagacttcgtcagagaattcaacaacttaaacttgaaggaaagaaagaagtgaactatgatcttcaggatttggaatagggaaaatatatggaggaactttgtaaataaaatgtagcagagcaaagttatttgtttcaggacagtctacaatacataggaatataatttagagtataatatgaactcatatttaaattcttataaaggaaaaatatagagaatatattttacactatcagttcatacattgtaacaatgtagctgtagatggtcatggtggtgtgccaattgtttttatgcaaaaatcagtatacattacataaaggcattcaagatttttaacttcctggaaaacctgttgtggaacttagttaatcgtttttgaaaacgaaatagtttcatttttgtaatttttaattgttccaaaattttagaagttgaattaatcaaatttaatttttctcgttctttctcagaatatccatttgaacggatgacttacgccttaccatggcattactctaccactgagttaaaatggcctgtttgattcaattcctgaataagccactagtcactatgtctttatttaagtgtatattcatattatatcttatatgtatataaatacatcgtatgcgttataatatattttttaatatatagaggttcacacaagaatgcaaaatttgatttacttaatcagtatagacctatgtattattgtactctctgaactttttattccattaaaaaatggtccccaaactattattcatagtattgtaaattagttcttctatcaagttttgtcacacgtgacaaataaaatgatgacatgattacttagctaattgtcacgtcagtgtcatgtcaacatcaagtatgtaattaattggaaaaaaaataatttaattttttttaatttagttttacgtaattttcttaatcattaattgatttttaatttgatgagtttcttaaaaatacataacttttatttttttaatgttaaattatacacgtaaaaacaaaggtaaaaatgaacaaatagtcatatcatcattttatttgccacgtatgacaaaacttaacagaaaaattaatttacaatattgtgaatagttcaagaatcatttataacagattgaaaaatttaagaagcacaataataaatacatcataaaatcctaaatagccttccataaaattgagattacacatcctaaacttttttttcatcccaaccaaatttaaccatataaccagccttaccaaattacaacagaatatatggaaacattcaagaagaaaactgcgctacattccaatggcggcgagtttagggtagaggcataagtgagaaccaatccgtcgctctattgtgtttagaagatttttgaaaccagaggaagtcctttttcttttcaagtcggttttaaataagcatatatccgctattctagtttaattagagtttttcttagttcgagtttagtgaattttcgagtgatggttggagcgcaatggatcttaaatttagagaatttgcattgtgacaatgatggtgatttgtgttaatagtgtgatatttactatggagccaagctctattcaagaactaataaaagaaataaatggggaaactcaaattcaagctctatttagcttagctaaaatccatgtctaacttttaactttcctccccaaattttcttccagaaaagctggaatgtttttggttcagtatgaaactaagtatgagaatgaaaacatgagtaaatttccacgaaaaacacaagctattgacataatcaaagtttatatcattatttggcctagtttacctccaaagaggaggatatcaggatgatcccattatttggcagtattaataacgagcgcttactgcctttaatcttccagttgggcgataatgctggcgaatacacggaagccttgggccatatcagagaacaggcagtactcatttttggcatggtatactttcattaagcctgcatatgcacatagaaatgaatcaaaaacttgtcatcaaatattgctgtacaccaaaatggagaagatattggtataaaaatgagtggtttcgtagctactagagcatgtaatattataaccaaaattgcagaaattcagactggattaatgaagacttctttggtttccttcttcagatttttaatccttatgttctacagtcttttaagacagaaaaaagtagatttttctctaggaaaatggcaaatatatgcgtaggtcatatggaaggaaattggaatagaatgactaatatagctccataataattaatccagtttcaagttattaaaaattatggtatgtacacaatctttagtaacatataaataggcttgtataagctgaaattatcttgtttcagatgtctaaattaataaagaaagaggggagtaagagtatcaaaccatagccagcagtctgaacatcaaagccttcttcctgccagaaattgacaaagcaaagtttaatgattttgattactcacagatgaaaacagtcaccgtatcagaaaactaggagctaacctgcaattctcgaattagtggtagacttccagttatagagtaaggctttacgtggccaactatctcttcagttgctttacaaagcacatgaaatccgcgagagttgagatcacaagcaactccagacattgcctcgtcgaaacttattgtaaggctgaaaaaaaaaatacaggcacaggattaagcctcttcaagagaatctggtaaacgatttaaaagtcaaagtaaccaaactcaaacataactatatatgactatgcattagccaacaggtactatcctggccagttgttctttatgtgtttagttcttgcaatcagcttgtgtgcaacaatattaataccccacacttttgataatagttcatgaaattttttatggaaccaaatgtttaccagaaattaacaagtgtagaatgaaccaaaagaataaataaacacttgggattaatatccttagaaggtattaattgaaaactcttccatgattaagccaatcacagttttctagattactctacatggttataatgagaaccgagaatgcaccggaacaaagtaatggcaagagagatagagagcggaccttcccctcaggttttcatctggtaggacatattttgaaactggacccctgcactccagcttttctatattttcattaatgtcatccacatattcttgtaacttctccattacatccttaacactataacagggtagtcagaatgaaaatcataagcaagcaagaaaaaaagtcatggaggattttttttgaaaaagaataagaaaaatcagattgcttacttgtaaaagggagttaacctgtgaaagaccaaaagaagaaaattaaaagaaaaaaaaaaaaaaatcaagaataaggagtcactgaacctaacgtctcctgaaaccgtacactcagctggaatttgattgattccacctccaggatctgcaaaataaaaggccatgagaaagagcacaactcatttatctccaaggaaactcacaggtaaaagtaactcacaactccattgtgttggtttcatggttgaaggtgttgcaaacccatagacctgctcttttgtatggggagggaaatccctataaaaccgtgtttggatttcttttagagcatccatggctaattccaaagggtttatagcctgcagatatgttcagcaagacaacaacacttggtttcagtttttttaagatgggattttttttcattttaagtttccatttttcaaaaaaaatgaaagactgacacaaactacttaaaaaactatagcaggcaataatacacaccttgtgtgctaaaccactgtgaaaaagcttcccggtcacatgaagcttccaaggtatcataccgccagtaccaatacaaggttgtttatcagctgtgtcaatccaaaacctgcattggcaatctatgagtgctgaagatgagttggaaggacattacaattaatttaccaatgggtatgtagaacagcatataagttattatatttgcatattaaaacgaaaaaaataagacttacagaggaccatctttcagcttattgagtaggccatctttcactagtgcatccacaccaacccctgtaatggcagaattctcttcatttgctattagtactacaactacagttgacttcaattttggctttgtttccccaagcttcttcatcagctcagttacaagagcaacatgccctaaacaatcagtagttccacgcccacggagttcatccccacaaatgcccaatgagaaaggatcaaattcctgcaaaggaagtgatcaatatattacatactgaccaacttaccaattaccaaccaaagataacgtctaactatgataaaaaaaaaaaattaatgtttaacatatcatttaatgttaaaatcatttggaaaatggtttcaaccataaatttaaatgatattcagaaatagggaacttcttcttcttttaagcaaaatcatttcaacccctaagcattgagacaagtcatagataaagaaatgtcaaatgttaacccaaaactaacccagaaggtactttcaacaaaattcttagtgatgggaacaagcagtcaagcacacaagaagtttacgtttgcaaagcctagcagtgacaagaggcaaagttgttcttagttcgataatttaaaacggaataatcaagtcttaagtaccccaaactatgaatttgtaaccagcacaaatctaaatttttatttttagtagcataagtactcaatatcaaaaaaacgcagtacaaaatctattagtgtcttaaacaaacaattctaaatcattggataatatcatttactttcaaaccttctttcaataaattcaaaaaaacaaggctagttataaatttaagatactaatggagtccttacagaaaattataattttcctaacataatacttttgccacttataaaatcacattgggtgtctactatgcctcaaacaaactcaaatttggtacttatgcgttaaatatcctcaaaacaagaaacagaataacatgaaaatatttgataataaactgctaaaaatacataaagaatgattcgttcttaaactagttctgatctgagccttaaaatcatgatgagaaaaagtattccccacaattaggaaaaactgagaatcatataattcagagaaaatttatcaacagctaaaatgaaatcatataatcatacaattttttcatcaattcacacacagaaaattcaaaaattatgaatgtccaaagttaattcgaagccaaacccagaaagaataaattaaaaaaaaacagtgaaaagaaaaaaggtattgaaatgaaagaaacgaacccagtcgttgggatcggcagtgacgacgtccatgtgacatccaacaaaggagagaatctttccaaattgggttccagggtactcaatgatgacgtttcctctgccgggaaagtaagtgacgtggttgatgataagaggtccgccgccggtggtggtgctgtaagggaggagagaatcgagtacatgcttgactacacgatcctcctgtgggatgagttgtggtgggttgttttgaacgtactttgattccccaatgagcttggaaaggagtggcacaaaggagtctctgttaaggtcgcctagagtttgtttgaggtctgaagaagtagccattgttgttgggattgagagctcggtttttggagtgtctgagatgagagcaaacgattagatatacacccaagttttaaacctctttttaaacattttacaaaggacaaagaactttttttttctttctattttttcaatataataattaatttattgtttagggtcattggttattaaacaatgaggaatttcttttaactaagaaatctcgtttttcaaccacttgaggttagctcaagtgacataggaggtgtgttggaggtcttgagttcgagtaccagttatgcattgtgtaatatataaacgcttttaaaaaaaaaaaatctcgtttttcatctggggctcgtttgaaatgccgtattaggttgtattatattgaattgtatt

SEQ ID NO: 294670 - DNA, 13610 bp, Cannabis indica
agccagtaatgtgtgagcagtgagcttggtctccggaaaagaacagactaatttgacttgctcaatttcaattattaaagacaaatagaaatgggttctactgattctccaataaaaaaaaaggaaatgggttttactgaactagatgagtgagcactaagatgaaagtttttttttttttttaactacatgtagctatagagaaattttagtatctctacaatttgaaaacttaattgatagcaggatatgtagttatgtgtgacttttaagtattctcctcttgttgtgtttttgtatgtaatcttgaagctcatatattatgattatctgtgcacgtacacactgattattctatatgtttgtgaaatggtgaattccaactttcattatttcactagttgtagtttttttttcttctcctaaatgctttgattacatgcatattttctttatattttttttccagaagagacttggctccacatctcaagtctttaatggggccatggtggttgtctcagttcgattcagtttctgaagttgcacaagctgcaaagaggtcattacaggtttgctttcatgaatataaagcttcatttagtatcatttgaaatacttttgagacaaacaatggatgggagtggagtggagtgaagtagcaatgtaactaattgaatattcaagacatagttgtgccatgagtaaaaacgagggagggaatttatttccacttggtcatttttaattgttgtttcaagagtttcatttccttctcttctaaattggatgtggtgcaatcctaaaaaattttgcagaatgtttttacttaattttctttaaaatgtacttatggtcatggaggaacattttacttaagttttacaatatttcttttaattcatatatatgaaaggttacattcagatgttctcaagtagatgtaaggtctaacagtttctttttcttattaaatatctaaatgctgacaacaggcggcttttccagcatcggaaaaaagactagatgctttaattatgtgcacagaagagattcttatgtatttggaagaatgtttaaatctcacaccaaaagacatgtctgataaagctgctgccttggatgaagtagaagagatgcataatcaggtactcactcaagagaaatatgtagtggctacgcttgtttagttccattacatgtagaagtttcttattaaatggtaaccaagaaggtttatgcttcttaataatatttattttttccttaggataactcttgcttctagtgggaattaatatctcgctcttgtacataatttggtatttaactaaccataaaagtctgaaatttgacaaaatggagttctgtggaagtaatttaaagtttagtggtgttctaatattacattattgtgtatagattgtggttagtccactgattttttaaatcacaagtgacaggtgttgtaaaaatttaaatttgtattacttggtcagcagcaatagtcactatttatcaaagtgatgaagatgatcacaaactaaaattttaaaaagataaagaagtcaaagaccatattattcatttataatatttattgtgtttatttttttctgtagataatatcttcatcgttactggcattggctaccctccttgatgtcttggttggtgttcaattagaaaggtcaagttctgacactgagagtgtggctgctcaaccaaagaatgcttcaaaagctaggctggttgctacctcctttgctgagaagttgtttgctgctcataattgtttctcggacttcctaaaatttcagagtgctgcaattcgttcagctacatattcagtgttaaggagtttcgtaaaaaatgttcctcatattattaatgatggcaatatgaaatctgttgctggaataatactaggtgcctttcaggagacggatcctgcttgtcattcatcaatgtgggatatgattttgctgttctcgaaaagatttcctgatagttggacatcaataaatgtccagaaaactattctaaaccgcttttggcattttcttagaaaggggtgctttggatcccagcggacttcttatccagctttggttttattcttagactatgtgccaccaaaagctgtagttggggagaatttttttcttgacttttttcagaactgctgggcaggaggaagcctttccaattcatcaactgcagatagattagcattttttgcagcatttaaggagtgttttctctggacattgcataaagcttccaggtaggaccttttctcttggctttgtgtaagctgtgccggcaattgctactctgtttattgaagcttcagattgtcttttcaaaaatttctttctttaatttctgttatattatcttgcttcattgcttgcaggtattatgacggagcggattcaattcatcattttcgagtcacacttattgagaatgttttggtaaagattttatggcagaactacttttcttgcattggttcaaatgagcaacagtatttatctaaggatagtggttttcccttgagcaagactttagaagcatccaatgtcaagtgtcccattacttacttgcaagacttgaagaactgcataattgacatcctctcgggtatctttgccttggagcccaatttgctctctggcttttgtatggaatttcagaaaaattgtttgggtttatttcaactccctttgaacatagatccaacaattgaaagttttgaacgggtctttcaatttattattttaataggacaacatgcatcacagaaaggtgaaacttggcctctggcttatgtagtgggaccaatgttggccaaatcctttccaatgataagatcacttgtaagtatttattagtttttgatgatttattttagtcgttagatttattctacatgtgtggtgttctacgattcagccattgctgtcttgaatttgttcatatgagtaacaatgaacatctatggttgggcattttatttctaactaattaaagccaatggagtcagtctttaagtcaattaattgtttgagtttctctccctcctactattcttacttttgtaactaattaatgccaatggactctttgtggaaaatgtgtgttacaattttggggctgttggttttgtttttctctttctttccttttattatttacctttggttcaatctccaggactcaccagaaggtgtgaaacttctctcagttgccgtttctgtatttggtccacgccagattgtgcaagaactttttgttcacaataaagagcattcctttagtcctgatgatcgggtagatagaagtttggaggctgataaatttatacaaatattcaaggatacttttgttccctggtgtttgcacagtcacgataggtcaacaagtgctcgacttgatctattgctttctttgcttgacaaggaatgcttttctgagcagtggtgtgctgctatcatgtatgctattaacctagaagattctggaacttcatctgagtctctagattcggaccaaataaccattttggcactacttctggagaaagcaagacatggaattacaaaactgaagaaggatgaagactgcagacactggatagctgcagagccagagcactggcactctgagcctctagaatcatttactgttgctttagcatgttccccattgtcctatcgggacatgtaattctcgatttctgtggtacgtgaataagaagacttttacatgatgcttttcaccatctatgatttggaaaacgtatcatgaggatttcaaacacttacattttcttcatatgtgcagtgctgttctaggtggttcaactgaaggcgagcttacttcttttgtatctagaaaggcatcaatcctgatttttgaggaaattttgaagaagttactttcttttatccatgagtcatcatttgattgggttagagatgccggctccatgataactgcttgggcaatcaattctgggttagaatctaagagttctgctagcacaaaagagatgtctcattttgctcttcaagtacttgatggtagttttttttgcttgaagacactcattaaggatagtgagttagtgccaggaattttaggtgcagttttagttattgattgggagtatagcttgagaaagtcattggataacgttgctgagaataatgaaactaacatagaatctaaggccaggcttgaatttggtgattctgttcatgccttttgctgtaagagaaataagcaatttcggaatggtcttgacataaacaatctacaaagattatggagtatcctgattcaatgcattagatcctccatctataatgaatgtaaattaaacacagagattatcacttcttggtgctgctcatggatactaggatttttaagttgtttctgtcaaggtcagttggaagaacaagtactgttagaaaagcttctgtgtgagaatgatacgtggcctttgtggatcgttcctgattttagcagcccagagcaattagctttcagaaaagcatctattcatgtgagttgtaatagtagcctagaaatattatggtgatctattgatattttatcttgttcttctttagtgccaatgacacttatgtcaacatgttgacttgaattttagttatagagtaaattacccagcacttgagatgcaatttatattttgtctgtgtatggttttccaagctgggaaactttcagagtttgtattgactcagccaatccaatagttaactttaaacactttaaaactttgttgtacatggtatggttataaacattctatgagagggaataaaacatactctgcttcatcttatgtggtattttgttctttccgcaaataaatagtctgttagaatcttcataaaagtgtataaggttccttacttataaagtttgactttgtggaaatgcaggactcaggtcattgcaagtttgtttcctttattgacaagctttcattgaaacttgggattgataaggttcttactggctatagaaagcttgcactcttgtcgccagaagggacaacactctcttcctcagaagagacaatacatgaagacgttactgttcgatcctggcttgctgctgaaatattgtgcacgtggaaatggcctggaggcagtgctcgagactctttcttacctttactctgtgcatatgccaagaataacacttctccttcaaaggagaccttgttagactccattttcatcattttacttgatggtgctcttgttcatggaggctgtggcggactgaattttgtcattccatggcctgctttaaatgatgaagtagagcatattgaagaaccttttctgagagctcttgtatctttcctttcaactttgtttaaggaaaatatatgggaaacatgcaacgctatcaagctgtttgaactggttgttaataagctttatatgggtgaagcaataaatatgaactgtctgaggattcttccttggcttgttaacgttttacttcagccactgtgtgatagcagatctggtgaagctgatagagatgctgaacatgattcttcatggaataatcacatccaaggcatcgttgctggttgggtccaaaaaactattctgctcccacctctggtcatgttggaaacagggcaaggtaaatgttcacatcaagtcagtaaggaattgattcactagcatttgaattgtaggtttggcctgtcaaagaaatgtttgatggcaatggcctctgctcctattattccactattggcaaagagtcatggttatagttttccctgtagttcttttattaattttttctcatttttttctaatcttattgatgtgttttcttttttaaggtgtggaagattggtttcagttggttataagcagttatccttttgttgcaatcgggggcatacaagaattgagtctggggagagttatcagtcaattggagaggactcttttacttgaattgtttcgcaaacagagacaagttgttggcacatcaagtatatctaatatgccgccggtggtacagctgctgctatcaaaactaatagtagtttcagttggttactgttggaaagattttaatgacgaagactgggagtatgttttatttcaattaaggcgttggattcaatcatctgtggttcttatggaagaacttgctgagaatgtggatgaaaatattactaacaactttactttagagaacatggatgacgatcttaaaaagcttgagcaaattgctttaattcccgactcttttccttttgatattgctaaaaatgcccttttatctttttctctatgttgcggaccttttggaattaagcaattaaatgatgcagaaaatataaatcctcttggaacagaaagatgggaccccatcaaggatcggattctagaaggtattctacgtttgttcttctgcacaggcattgcagaagctattactagttcctactgccatgaagctgcatctgtcatatcttcatctcgatctgagcacctctatttctgggagttagtggcctcgagtgtagttaactcttcagtaaatgctagagatagagcagtgaagtcggtagaatgttggggcttgagcaaagggccgatcagctctttatttgccatccttttttcttccagaccagttccttcattgcagtttgctgcttacgttattctttcaactgaacctgtttcaaacctggctattttggaagacatcactcacttagatggtaatattaacagtgaagaggattcacgccctattgatctgtcagtggaaacaagcgtccatttgaaaaaggaaatagcttgcatgattgaaaagtatccttacgaggtccttgaaatggacttgatggcacaacaacgggtaatatgctgcatttatgtagccactttgtttgtggcctgttgtaatattcacatttatatattcccttacagctctttcttttatgcactttctagctagcacaattttaataataatgtgatgtgctcttttaactttcaggtaaatgtattccttgcatggtctttgttgctttcgtatttatggtcattaccatcatcatcacctgcaagagaaagactagttcaatatatacaaagttttgctactccagttatattagattgcatcttccagcatatacctgtagatctttcaatttcacaaaatactaagaagaaagatgtagagcttcctgcagggctatcagaagctgcaatcgcagcaacccatgccatcaaaactggctcattattgttttccatagagtctctttggcctgttgaaccagtgaaattggcatcacttgctggagcattatatggtttaatgatctgtgttcttcctgcttatgttagagaatggtttagttgtttgcgtgatcgatctacatcatcttcaattgaatatttcaccagggcatggtgtagtccaagtcttatagcgaacgagctgtcacaggtatgtgtacttggatagaaggtctggtttttgtcagctgaattttacctacacaacagtattttgcatacaaccactgatgcacgaacaaatgcatgcatgcatgaataatggtgacttagtaataaacaatgtataattaatgaccgaagccacattataaagtttttaatttttggataggtgccatttatttatgttatctaattaaagaaacgttaaaaaaaaactggtcaacctgattctctattttaattagttttagaattaactctttgttacatgcagctgataaagaaaaaacgtcattactaatgatggtagaaaaaatgctgacaaagattatgaaatttatactgatttgtatttttaatgcagataaagaaaaataaattttcagatgagaatttttcagttagtgtaagcaaatcagcaaatgaggctgtcgctacctatacaaaggaggagacaggaatggacctagttatccggcttcctgtttcttacccattacgacctgtagatgttgattgtacaaggagcctaggaattagtgatgtaaagcagagaaagtggttaatgtctatgatgtcttttgttcgcaatcaggtacttattatcctcttaaatctctttatgtttattgccttcttcaatggtagacgattcagtatctgaagtatttaggataatactgagtgagacataaattgatgtggaaacagaaactgagattgaatttgggtaaaactttctaggctcttcaaatgggagtggttgtagatcagccagtttaagagccaccttttctttcagattagtataataagaataatatttagtggctggtggggtaggaacaatgtacaaacatgatatttttgcgttagtaggttgactcatttagcattatggatcattttcttacctttgtaatgcagaatggagctttagcagaagctattgggatatggaagcgaaattttgacaaggagtttgaaggtgttgaagagtgccctatatgttacagtgtcattcatactgcaaacaacagccttcctcgtcttgcttgcaaaacttgcaagcataaattccattcagcttgtctttacaagtggttctcaacctctcataaatcaacctgcccattgtgccagtctcccttttaaaatgaaaattgaatttttagttgtgggtttcatggacattgcaattcccattgaacctttctgccaaagaagttgatcttgatgaagttaaagaagaaagtataaacatgcataaacaaatagtttgaattattgtgcaagactgctaacgagcggtgtgaaccagaatatgattgtctcctgagtgtatacatatttggtccatatatccaggttttgagatctcatttatggtccattctggttggagagaaaatatatgccgagcccttgctacaatgtacttgtaagtttggcaatattttgttatgctgaaattatatattattctctctttgtaaatgcttagttttgacaaggttggtaagtagtggtagataacagatatattcagttcagtgttattttctacataatgaatctcagcaatttagaatataaacagttttttttcttttctgtcgaattgaatattaatatctgtttttcgttctcattaatgtctaccatcgaaacttgacttggatttaatgtattggacaaacaggttctgcggacacgtggtagatcgattccaagccatagtgatctttagtgccattttttttttgggttctctttgtaatattaattctagtcagaggtgagacgtgaatacagtagaatgtacagatacagaactagtcctttctcacgagttctctactcaagttttgcaaattaagtaataatattcattatgctttactagtttatctgatgatataatagtcacggtagtatatataattacaaaattagaggatcaaacgaaacttacacactacttcggtgcctttggggtcaaactgaccgctcttaatgttacaataacggttgaaacttgaaacacgagatcaaatagagcaaaagtacatgtatagtaagcttggcacaagagaaattttacagaaggaacaaaatgcttcagatggtagtccactagtcctttgacaaaaataatctctcaatggcccgaagaaatttattgggaccaaaacttgaacgtcctcgggcaaatataattgagagcttaagcatatgaatgtgaatttgagcgaggggttgaatctagacgcagccctttcacttgagtttttcctaaagtattgtcactaaaaaagggtatgcttgaaatgtcaccgcatgaaaggcattaaccatctcatctcagatccatttccatttgccaagtaatatatctttttccagctttcttcagagaatgattcacgccgcgctagtctttgtctgtcataaaacaacgagcagggcatattagagagcgagcatttcactagaagaaaaatagcagtatacatgcctttctcagtatgagaacacatatttttgcattcaacaagttattaataccgcaatactctacgacctgcccccattaatcaaatcatggtatgttgtttacatgaccaatagataagaaaagagctccatgacgattaagcacaggttttatcaatgttgtttgtctatggtcataatcatttatgatagtagagtttatcatgttgtttagaaagtttttaagttataaacttgctatcatactctccagagacaataaaatatatggatggcatgaaagatgattttggtgaattgtaaacaaaactttataacagttggtaacaaatcaggcaacactattttctaaagcagcaatataatgaacttggctatctgtcaaattacctcatatagtaatggctcacacttgctgcttcgtctaaagtgtagcgtggaagactaacacgggcctcagcaggaacattaggcaactgttgtcgtagctttcctactgctgttgaatgagagaaagcacccaccatcatgtcatcgtgcatcatagatctgaaagcattaacctgcaaggattcctcataaaaggcatataagtttcttatacaatgcacagaatgcaccaaagtgattagaagaatattaatggcaaagttattcgtttccagtaattaaatattaatatagattacatgccacaaaaaatacataattaccattaacagttaaataactctaactaaacaatggatacttactgtagcaagttctctagcatgtattggtcgagtagaacgaacagttactgcctcctcatactcgctgaatgtaaaccagctattgtactggagaaaaagcaataacaatgaattcagaaagttgttgggaattttccaataaatgtcatcaagtgttgacaacaataggatatgatcagaagactatcgtacttgatcaattgcaatgagaacaggtatatctttcacaactgatagctccctccttaaatgaactaacactccaacggctgcatgggtgtgcttgattcctgtatcaacaaggtcaaacagacttgaaccctcaggcatagccattgtatcagtgccgtctttcatccatccaacaccagcaccctctcccaagggaatgagatcaaatatttggcatggcaattgttttaaacgggtttcgttaaatttcagaaagtcctggacgggaataacgcatgtgaatattacaatcaaatagaaattagaaagaactgcaaattaagaatctgaatagtatggtaatcttaaaatttacatgcatgaggagcataacaatcaagactgagtacatataatcaactaatgatttaatgacatggacttgcttctcttttttgttttgttttggttttgagtctactgaataattattaatttatctgaactattgattcaaaattatgttcagcatactttggcggaccatataagaacttcaatactgaattatacaaaaaaatgataaaagattaaaaattcttgccttgagaattttttcagcttgaacgggtgtgtcccaaagacccgtttgtggatttttatagaagaaccctccatgcgtccactcccatcctctgggaacataaaaaaccaaccaaccttcatcacgggcccaatgaacaagcattgcaagagcaatactcttcccacagctaacaggaccatccaatactatctgctttctaacttttgtatctgaaaataccaaatccacagataatttagtgcataatcatgcattatgatctcaacacctaatgtattgactacataaaaggaatgaaactaaaagaaatgctcgtatgaatagggaaagagaaccaccatgtaatttttttcatattgcaatttatgccaataacaatattagaaaccacaaacgaaccatttctaaaactaaggttatttattttccaaatatacccattccaacaatctatatgttgtgtttccaatagtcataagcacgaacctttagtgctcgacaccaacattggtggatccacgactcgacggaaattgtcacggagatcgagaaaactctggcgaacaagcacggcggttcgcatcgaatcctcgaattctttcaccattccaagcggcaacccctccggcaatgcctcattcaattcctccattataattaaaaaaaaaaaaagcaatttcatgcgaactcgatcaaatcaaaaccccatacccatatttgcacatccatacatagatacaaagacagatacggttagggttatcatacttgaacttgaagtaagtgcaggaatccttgcgagtgagctcagacaacgaaggcgtggaagtgaacaaaggttgtccattggggcctatattgagggaagggtcgttctcctcagcagcgagccttcgagctcgagagccatcttcaaagagtgcggcttcgacatcggtggcggctgattcgtcggctgctgcggcatctccgcctttggatttggacttcttcctgttcttctcgttcttgacattggtcttcgtggtcttggaggatgagaaattggccgtcgacgagaggtaccagggctgagctattggggcggtcgccgctgctcgtctcagaatggacctcaacattgttctctctctcacactctctttctctgtgtttcgtttcagaggtttttacgaggttttggggaagttggaagtgattgagtccattgagtaggcccaattttatgagtttgacatgctaatgggctatgttaccaaaggactttcataactttctaagactcccatcactttgagtttggtaataatttttaattaattttttatatttttaattatgaaaatgaaaatatttttaaaaatatattcaataaaattatttttattttttaattgagaattaaaattttaaaaattttaaaaaaaaagaatcactttcaaatgcgcgtttgataacacttttattttatttttttttaattttttaatcacaaaaatataaatgtaaaatttgtgtttttaaaattttatttttagaaaataaaaatgtgttctataacaattttattaaaaaacagaaaatataagtgtgttctataactttcatttttattatttattttttaattttatttaagtcgggtccaggtctgaatttgggataggggtcgtgatctgagttcgagactcgagctggggctggagtttgggtcctaaggtccagattggggtcggagtctaaaatattaattaaaaaaaatctgtttaaagaaattgtgaaagtaatttttaaaattttaaattcttaattaaacaattgaaaagtgaaaacaatatattgaacatgttctggaaatattttcaaatttttaattcacaaaggttttttagtttcaatactattgactcgtggactagagttcagtaacactcgaacacgtaaaaatcttgatttcttcttctctaatttacttctttcttaagcttatta

SEQ ID NO: 294671 - DNA, 4457 bp, Cannabis indica
cgtggtctttttaaactatgaatgacttgttttctggtcgttgcttctttgaattctcatctttggtgtgattgtaagcatagaccaaagataacctattccattatggcgcccatggctaacaattatcgtgcggtacccaatcctttgtaaaacaagagtaagtttcttcttaaattatgactgggaacatcgaccatggaaacattctataaattgcttggaaactcccttgcgaaaaaaaagaaaagaaaatactgcatggcatttgtctaaaactattgttactccacaaatatccataaagtgcttttttagtagataaaatatagaatacactcgctagtctgcaaggaaagctaactgtttgatgttgcttttgtttgatttggtagaagtgaaattgtagttaacctgttgtggtgattaatactcctaacaaacaagaacacatataacagaagcaactcagtcagcacagttttgattggagtcaactgaggtttgacttggagtaaaaggtctatattaaccttgaagacttgatttattatttctgttagatatagggttaaaggcgtaatttcctaaaaatacttcaagctggccacacagaatttaaatcgcaactcgcaagcaaaccgtccaagtttaagattttgaactatatatacacgtgttaccctacgaatacttcaatatctttgctatattaaagaaattttcagacatacaactaggcaagtgtaatactttcaaatcattgatagccttacctttttcctctgccttcgtttactgtcagatggagaaaatgtattggagggaggagcagaaacaatcattaaattctccattgattcaagtttgtgaagaaactgaggttgagaatggtgttagaagaaaagaaattgttgaagaagtaaagaagcagctatggctagctgggcctcttatttctgtgagtctattacaattttgcttacagatgatatctgtaatgttcgttggtcatcttggtgagttaactctctccggtgcttccatggcaacgtcctttgcttcagtcactggtttcagcttactggtgagttgggtcttcactgcaactaactaatatgttgatctttgaaaaactagtttattttaattttctgttctaggtgttaaatacttatgacaaaaacaatttaaaaaaagagctctttgctatgatttttttttaatcaaatgacgcaatacagatttaattactttcaagctgatcaaagattcaaagcagtggtagttgctgtttgatttatactttttgcatcaaaaatgtttcctgccttttaaatagatgggaatggcaagtgcattggacaccttatctgggcagtcatatggggcaaaacaatatcacatgatgggtatacttatgcagagagccattcttgtacttgtagttgttagtatacctcttgctgttatttgggcaaacacagaacctattctagtaaccttaggccaagatcctgctatagctgctgaagctgggaaatatgccaagttcatgatcccaagtatctttgcctatggccttcttcagtgtctggttagattcttgcagacccaaaacattgttttcccaatgatggtttcctcaggaatgactactttgatccatatccttgtgtgttgggtactggtattcaaatctggacttggaagcagaggagctgccatggcgaattccatttcttattggatcaatgtgttattgttagcactttatgtgatgtattctccttcgtgtgcaaaaacatggaccggattttccaaagaggctttaagaaacgttccgacatttgtaagacttgccattccttcagctgtgatggtgtggtaagttatctttctgtttatgacgcggtgtcttcataacaaagttttcgctcatcaaatattgtgttgctatggatttctcttaacagcttggaaatgtggtctttcgaaatgatggtccttttatcaggccttctacccaatccaactttagaaacctcagttctttctgtcaggtttgttatgacaaagtttcacttggtttgtttgtttgtataatcaattttggtaaagagctcaacttttttctaagttaagccatatttattgtcagtctaaacacagcttcaactgtatggatgatccctttcggactcagtggtgctgtaaggtgagctagtatacatattatttattcctttagctgttactagaatataatgtcctaataagaatctgataaatttttgctcaagtatattactgtaacattacccatagctaatcataattgtaaactatacttattgtactttcaaaattctaaagattctgtgttttatttgatcttcttgtttctgtgattaatagtactcgggtttcaaatgaactgggagcggggcgtccagacgcagctcgtttagcagtgtgtgttgtgttagttatggccattactgagggtttgttgattggtttagtattcatacttatccgcaatgtctggggctatgcttatagcaatcaagtagaagtagtcaaatatgtagcagcaatgatgccaatactagcgatctccaatttcctagatgggctgcagtgtgttctctcaggtttagtcaaatttacatttgcttacgaacttcttattcgcttaaatatgttctttcaataatcacaaaggacatataagataaaactccttattaaacttacaacgtatgcaatttttatttgttcataaacaaaataagagaaacaattcctgccttggtcccatcaactattgtaactaatagttcttctaagctcaatagaaagtatttctaaacctttggaatctaaaacacaaagtgattaaggttagatttggttggtgtttacccaaaacctttggaatctaaaacaccaagtgattaaggttacattttgttggtgtttacccaaaaattttgcttgatgacgtagacaatatttttgacacgtggcacgaaagaaacaacattgggggctccgcatcctaggatagggtagtgttacctgcacactggggcacccaggtaagcaccaagatccaccgaagtcgtttctgagtgttatctttcaacaaataggtcgccatgatcctaaaacgatgaaccatgaagctaaggatgtcacgtggacatcctagggctgaacttgggaccaacatcagtactggccgcccaagttgacatcctgtgtggtgtctcgcatcagctttggttcctatcaacttcttacgggaaatcttcttagccattgtcattagatacgtgagagacatgtcgcagctaagttttagactttggagataagtctacgagaaacagcactcgggctccaggaagccctagtgggcacccaagttgacatatagtcgatttaggcgcaccgcgactagggttgaggtttctagggacatctttggaccccgattcctcaaatccatcaaggaacaatgtcaggatgtgatatttcatgaatgacatcttgaaggagcccattcttaactatgggcgctcaggttgacatttcaacatgggcagcagtttcgtttcaacgggtgatgcccgtgcaaatttgacgaaactgaaatccgtggagtacttttcaccaaaaagaaaattgaacatcaacaagaccaatttcgaagatgaagccccccacctggacatccagtgccccaaggccactatggacaccgaggttcacgtatctcaacctagggcacttcgagactccattctagagaagttttttggacatttcctttattttcatctacgaggaggatacatgttttctcgggaagcgaacaagccatctaatccccaaataaaaagttgggcgcccatggtgacaacacccgagtcactgggcgcccaagttgacgtcgatccaatttcgattttgtctcatgcattcttcttgtttttctccaaaaacaagataggggacttagaatcaagagaaaatatcatccgagtggtgagttagctcctagtcatcaccggaagctagtgtgcaagctcattgggcgcccaggttgacattagcttggggctcaatgttctttcattcaaataacagttttgctctaggcattcggccttattttgcctgccaaataagatttggatgcttctgcaagtcaatatcttatatacatgtgtcacgcgcaagtccaccgacaaccatatgcactagtgatcacccgggtatcatctagtcatcaatagtgattcaacgggcatcacccgtgcatatcaagtaaaatttctaagagaacttccccatggtcaaagagtgaactaatgatagctatcacatcattcaagcatcttaaaatagggaaacttacaaaaatactgaaatttgggttaactttt

SEQ ID NO: 294672 - DNA, 4225 bp, Cannabis indica
gtagcgtgccttagcattagggcgttacaaataagatttccaaaggtgatttattttgcagcaagggagtaggaagtttgttatgaatatagacagcaaccctgaatgcctcatcttaaaatttgagaggtaaggatgctcgagaaaggagagcaaggccattttcaactatgtgcctatgttttgtttcagctaagccattttgttggtgagttgtgggacaagggtgtctatgatggatcccactatcagtaagaaagtttgtaaattatttgaattcacccccagtctatttgcaaggttttaatagattttcctagttgcaattcaactttagctttaaagtgttgaaaagttttaagtgcatcagatttgtgctttaagagatacaaccaggtaaatcttgagtaagcatccacaaaatagatgtaatatttgtatccattaaatgatggtgtgtgagatggcccccacaaatcagacacaaccaattgtaaaggtttagaaatgacagtagtggaagctttagggaaggggaatttgtgaattttcccaaggcaacatgcaaaacacactgaaaattgagattctttattagcagtaggcacattacaagatttgagaacagtttggacaaccttcttagagggatgaccaagtctattatgccacagagtaaaactattttgaacacttgtattacatttaaaatagtttgacacagtggcagatgtgttatttagattagcaatgaaagtacacttaggcttggattgaatgttggcactgctgctggtttgaagttggtttagctgagagtaattgctggtcataacatggccaggggttgagtagacagggccaatttgggatggatcaaaagtatataggccattcctatatctcctcatcaacaaagtgatatgaatcacttcctccttaacataacacaaatcaacatgaaattcaaaatagacattattatctttggaaaatttagcaacagtagagtttttgtaatttctggcacatggagtaagttatttatgacaagagagtgagaagcatgctgaggaacaaagaatgattgaccaatatgctttattgacgaacctgtaccatgtcctacatacatttgattctggccaccatagtgtcatagaaatttgcaaggttctaaacttaagagtacaatgattagtagctctggagttaggataccaatttgcatcatctaagctactgtttgtggcaatattagcttgtggttgttgtatttcctgagatccattactactggtgtttgtccctgcttaaggacctaagaaagacttatcaaatcgatagaagcagtcgtgtgctatgtcaccaaatcgcgacattgcactttattattcatattcatacttatcccagcccttcccctcgatttgggtaaaagttacctctaccacttgaattttgtccagatgagaagccatattcatttccacgactgaagtttctattgccaaactgattcccaaactgactagctccaatgttggattgaaagtttccacgtccaagctgttgttgcttgaatcttctccaggcaagattggctcaggtcatcgaatcttgatcatcagtgaccaaattagcacttagatccacttctttacccgatttctctattctggatttagatgccaaaagtagagccttgatctctcttacagagtattgttcaacatgagtattggatgagatcacaaatgtgtcatactcactcgggagccccttgaaaattgcagcaacatgatcacgatcactcaaggtttctcccacagatgcaagaagattgacattttactttactttcagtaagtaatcattgaggctcaatatccctttcttgagattctaaaggtttctacgaaattctagaatcttaaaggagacttgtagagggaaatgcttctccagagtagtgcagatctgttgtgtagagttgcatcctaccattcttgtgagaagactttctgtcataaatgataacaaccacgaaatcataagttggtcttgaacttcccagtcgatgaaggcttggctgactctgttttgagctcaatactcaccagtcaaaaactcagctggtggtggttctttgatgaatttcaggagtcgattccctctaatagcaacaagaacttgctgattccacagcaagaagttatgatcattaagttaaatcgagatgctgtgattgaaatgcacgggttcttaagggtgaggagctctggtctgagtagcttgagtgttattgaccgttgagccattgttggagatccctacatctccaacagttagcattgagcggaggaaagtgctctgataccatattaaacctctgagccattgaaccatgaaaccagaaacaagaattcaaaggtagaagaacaaagaaagagaaagaaagaaagaacagagaaataatggagaagaaagaatgatctcattgattaaaatatgatacacgatatatatacaacaagtaattgaaccaactaatagaaaacagaaatgaactaactaactaacaattataaccaattaactaactgttagttgccttaacaggtggtttatgagcttgaggatgatcttggaaagggtatgtattgatttgtactttttatcttaacatattcaacacctaattcgaacgttagtcgtggccctcgtagctatttacatagtaacttcactgatgtttttgcaataaaacatgtttacatataacttaactcatgttttggcccgcgtagccatggtgattataaaattttaataaaagatgtaactcaccaagttcctttctttattgtaaagatatttttttttggatgatctctgagagatgtctttataaacttttgactcttttctaactcatctgggcctccacttgtagatggacatgagcttagcttgtccataagcaatgcaggtggaagattggcatgtgggaagtaaaaataaattgatttttcatctcaatactcaaataaagatttctcaaataataagataatgatatctgttaaggaacaaaaagtcattaaaattgtatcatctttatgtgcacaggtgtagttggtctaacaccagtgtgagggcaggtaatgtattgatttttgggccttcaatatttgttttggagacaatccggctcgtgttcacttaaatgagaggcaatgtagaactctctactaataaagttttcaaagctgctaaattattctatgcctgctctattaaagtttaataagtatttgaagatgacaatagatagagtgtttagatttatgcaactatgaattcttaaaaggaactattgaattagatttgtaatcaaatttgagattatttagttttctctctcactattttagtccttgaattgaatgtttgaatttagcatttattgtcgcctttaacaaatattgtcgtttcaaaattagtgtcggattttgaaattattgtcattttaaaattgatgtcgttcactaaagattttgtcatttttatcaacttgtctctttttataaacttatcttatcgtttttgcaaatttttttgtttcatttgtttttttttatttttattaatgtcattttcttaaattatcttcctctattgttttcttcaattatttaatatattaatattcagacatagagatcaacattttcatcctaaaatcaacaactaattttgctttaatcgtttattttattgttttagttttagcaacaactttttattccactcaaagtagaaagtcaccactaaaccctaacctactgctgcccctgatttttcccaatatacgtggaccaaccggacagggacacgtggaccaaaagatcttaacatttaaattaattgctaagtcttgatgaagaaaggcgtcttccgggaaatgcctcccggagaaggcatccggagccctctatgctcccggaggcctaagtaacatcaaagcatctccgcgaggtgtcaggtttcccctgagcagtcatctcgcatttaatgccgcatgggaggaaacgtgttgggactgccacacgcaataaagtctgacgacacaacccccaatctgcacctacgaagctatgatcacttaagtctattgacggctacactgcgaagagtcacgtcaatcaaaaggcaataagga

SEQ ID NO: 294673 - DNA, 5760 bp, Cannabis indica
ttttcaattttatttaactcaatagtttatgtatgtgaaaatttcttagaaatatgtgaattatggtctataagttgtcttcaatcaaatgggtatgctggcaattatttttgaaaattagttgcaatccaacctgatattttgtagtacttgctagctctgtagcaattctttatgttataatcgatcttgaaggttttgtatgttcttatggattcatgagtgattcagtttggtttgaatttgatgcttatgggaaatatacacgatcattatctttggtacattcaagttgttcactttgctaagtattagtaattagttcctttgtagtttttcaattgtgtgtaaagatttgtctattattaggctttacatggcagtttcaaaataattttattgcgtattaaattactatggagtcaaagttttattaccacgtaattgtggtttctacaaagaaaagaatctgaaaaataagctgatatgcaccatgtactgtccagaactgatcattcaatagtcatacatattttatggtgtgtgttctcattgtatgatatattttgtaaagattatgcttttgcatatattgctcgagccaccattactctctatgttgaatataacagtgttgtttcttcacttaaacagctggtgtcatgcaaccaagtctaacaactgagaatcagcaaaatgtccaggcggaagctgctaaggaaaatgcttcaacatcggtgtttgtgaattcggaaccaatgcgagaggatcaagtacagaatgcagtgaaattcctctcacacccgaaagttaggggctctccagtattgtataggcgatcttttcttgagaagaagggcctcacaaaagaggagatagatgaagcttttcgacgagtccctgtaagaaagcttttattttgtaaattatacaatttcctacaaagtatgttatattgccttatcattttcaaatattcatgttgttaagagaagtgctttcacaaattacaggacccacctccaagtgtacaaactgctggtgtgaatcaaggtagttttttcatacgggtttatagatttgaccaaagtttcactatttataacacaacttatgtttgctgttgtggggattttttctccttgtcgcagatggacagaccacatcatctagtgttcagccacaaacatctgcacctgctgctcctacaaatgctgtttcccaagtggcttccataacacgttcacggtttcattggtctcatgctgttcttgctgtaggattgttggctgtttcaggagctggaacagccatcatatttaaggtattgagatttgacctgcgtacttaaccatccaacaagtgggatatgttaatggtcattatcttgattcttgtccttaagatcgagtgctataatcttgttagtacatacattataatgcttcttgttctgaaattcagtttcagctggctaaccctattcttatactgttttaccttgtaacacttttcctgttttagaatgctgttattcctagattaaagtcatgggtacgcaaggttatgtcagaagaagaaaataactctcttgagaaaaaagatcctaaaccaagtgtagcagaagaagctgcagctgctgcaaaagctgctgcagctgcagcagctgatgtggcaaaagcaagccaggaaatgatgagttcgaaaaatgatggtggggtgttttatcctactttatcttgcatgatgatctgtaataagtcttcaattttaatttgttgtttcctttttcttaccatttgatgagtgattaacctaactttatttgtttttgcttcagagaggaaatactttggggagcttttgaatgtgttagacatgcaagtgcaagaaatgaagtcaatgggtaattccataaaaagattggaaggtacatagaaattactttacgatcaaagtagtagatatgaaccagaggaccagtgttgtgctcatgaatatttgctattacggctgtacataaatctgaagatatattggtttctgctttggtgtaggaatttatatttgaatattttttaccccagataagaatttattaagatgctattcaatcgctcttttttgcctattcatcaggtgaaacaagtgcacttaggagaaattctggcagcgattatgaaaatcatcaaatgaatgtcgtaaactcaagggttagttttatttaagcacaagttaaatgtaaatgctgaattatctggaaagcaataacaatctcttttgctcaagcgttggttctaactaactctcctttttgtacagaaaccatatggtaatggcagggcagattatgactcacactcaggttgttgttacacttctaagtttactgtttcttacaattctaactgtttcttactagatttaaaatcttacaattccccgtacagttagatctgcctcacctcctgcatctgctgagctatcatttgcacctccacctcatccaaagtcttatatggacgtaagttgttttctacatcttttttggcctaaaaaacgctcttaaatcttaatagttgatgtttagttatcaaccgaaattttgtatgaaagtaagttgttttctagatcttttttcaaaaatgttcttttaaacaactttttttagtgttttaaagacctttttccttgaggttatttagctagtctttagaaatacaaatattttgaggagcatgttagtgttggatttattatcctgttgctgcagtatctgtaaggatcttgtttttacactaaactgatgaagtgtgactcaaatacttctggtgtgttttctcatatctaacttttctgatcagctggctaatttcaataaactatgctcgggtcttcaaacgtaataacacatatcaatgtcatatgtgtctatctccttggatgatatctaatattatctttgttgctccaactagaaatgagtttattatttgtaatggtcaaagtgtttgatgttcttaattagaaatttattgatagaaatgtttttatcaccggctgacattaattatatgtatgttgcaggttatggccatggtacaaagaggggaaaaacctcctaatgtcagggtaatccactacttcaaatagagatcagtttagttctaatgtagatcagtttagttttattttatatttattttttatttttctggatttgttggcaggagatcaacgattcacctccaaaccctaatcaacaaccatcaaatcctcgtttagcaccaagatctaaggttagcttgtaatgcatcatttttccacttcaaattcttgtttcatttgtatgcctaaagagcagaaaaaattcctagatagaaatttccaagtcttttcagtagttgcgccaaattaaactgaataatgatgtatttccttgagtagccttgggaggctagtcaaacccagtactaccaaagccaggtaattcaatctcaagggagcggtgaaggatttacttccaatccacaagacaatgggccgaactattcatcaaatggagatggtccagtgccttggtggcaacaaaaaaatccaagaatcactgaagttgaaagtgaagatgaattgaagactaggtcttatggaccgccaaccactgaacaaccaattaggcgttcatgggttccacctcagcctccaccagttgcaatgccagaagcagctgaagccatccgaaggccgaaatctttatcgcagaaggagctttcagctgatgatcagtcagagacacgttcatcagatgtaacggatgagttgcagaggattacaaaaatatctgaatctggaggcccggttgaaagttatagcgagagctcattgatgaactcaagcgagatacaagaagctaaagatgaaatttatgggtgataccagcttcaatctgaggtatacatatactccacctacattagtaatgctgccatgaatggtattagcaattaaaactgctaatatattttagaatctcaagctaccattggtataagatccctaagatttagtaccaaaacagaactctccaccctacccttaatgtgtgtgtgtgtacttatataatcctttgatctttagataatagaaaggataatgcacaaccctgcatacccaagtccatggtattaggcaaccaagcatgttttctttcattcggaaactagtacatgtcatgtcacatgcctttttcctttctactgaaattaatataataataaatagtaattagtgatgcactaaaccaattcaactaatagtgtcttgccagcattgtactctgcttttttttttctcacatagacttctagtctactgaagtggggtttatggagtggacactctcttctcacccaccatcggtctttagagtgcatgagatttaaaagcgtacacgtttaacttcccactttcttagttacctgtttttgtggtaattacactacttgttgatagtttgacagtcatttataatataagttgactttttctgtaaactgtttctggttaggttttggaaaccatgatggataccagaattgtttatctcaataattcacagcttttggatcttttggacatggaagcattatcagacaacatattagtatatcagttcattatacgcatcaaatttgatgttgaagtcagtctgttatgaggggtctcaacccttataatttgttcaacagagtttgtatctttaaatgaggattgctatttgttttagtttgtaagactgcatataataagaaataatggaaaattatagcttccttttaggtaaacatcaatgataataataatataatatcaattttaataagaggtggtatattgttattggtgcaattcaatattggttctaaatagcaatgcgcatttatgtattctcaactggaagattttgacacgacgaggcatactatgttcaagtttccatttcttctagaagcacaagcattaaaaactcttccaaatttcttgccataacgtgaattttgttaccctctagactagaaggccctaagtcctaactttcattagtttggtaagttagcccctttcacaatgacaattgtgacctcataatattaaaaaatggctttattttttggtaccaattaggtcattttgaagtattgcagtataagtttaaggctacttttaattaagtatctcatcacaaaccaggccaagctattggttcattgcgatgaaagaggatctatgaaatcacaaagattagatacttttaaataaaaaagtaaataagtattgttcaaaaatataaataaataaaatagtccaaagtgaccgtcactcggaattgattatgctattatattataaaatgagataatgccatcttttactttatcttaaattgataagcatataactgtttttgtctatactgacccactaatcactacaatttgcttctttatttattgcttaatagttgttaatattagtattgattagatggccccaaaaatatgaacaatgggatattttggtattgagcaagaaaagattccaaaagcgaaatgtgctatgcttgttttgaaaaatgtcgttttttagtggtgggtagtttatttgacaaatgaaattgttgaaaggacatttgtgtctttatcattacaattttcactcatgatctcattgattttaacattttttattttttttttctaa

SEQ ID NO: 294674 - DNA, 1440 bp, Cannabis indica
attacctttctctacagcaacaggttcagagtagtaaccgcacacaagacatctaaagattgcttctctgatttccggaattattgaactgcaacggataaccattcccttcaaagacaccattctttcaatgtctagtatgaaaaattagacacagttaatacaaatattcagcgaactgggaaattttaaaaattcaatttttaaaaaagtacacaaaattcttaccacaggggttgagatttctcattgaagtcgaagttttgagattatatattcgagtctgaatgtgcttttcgaacaagggttcgattaaagggaccatttccatcaaaacaatgtcgaaaattgcaagaacttcaagtggatacctaaccatcttcgcatacagatcagaatcataatcaaacacatcgtgtgcattaacatcaagtgagtcaccctctatttcaagaaccctcttgatagtttcaatatactttccttcagtatgaaactccgaatcaggagtctgagactgttggtccctaaaattcttcaaaaacctcacaatagcagctttgacatcattaacactaatgttcgttccccaaacaaaagtagggcggtcctcatccatgtcaaaaccatcaccaccttcagaggaaggcggcaaatcgtcggtcgaagtgggagttgcagcagctgagggagctctccgcttgccattggaaccgttacggcgcgttccagccgatggtgtcggcgttgcttcggaagaagcggcgaaacgagaaggaggtgctgttggagtcgcagatgccgccggagtggtagatcggccccttcttctccggcgagaagcgtccccgggggacgagttagtgttcccgatttgacttgtaaacgagtcatcgggcgatgaaggacctgtgtgtagataattgctctgaaaattaattcaacagataaataaataaatacaaaatcgataatcaaacattcaagagaggtttaccgttgttgaagtttccctgagaagactcggaagccatgggcgaagactggagcgagatagtgagagagaaattgaggggtttggagagtgagaaatgaggtgagaaagctttgttgggttgaatatggcgggaagaagctaagggtttcccgccagaaatgtgtgtaggctaaatgggccgggctacaggtctagattgcaggcccataaattctgggcctgctttaggaccaattaactagccgagcccctgagcctttcatgttggaaacggctgtttaatagtttggaaatttacatggtatactaatttttaccatttttttacaaaaatactgtcaggtggtattttttacttttttactgtattttttataagtttcatactgcagtatactgtgttaagttttcactagtgttctactggtgttttttagttgttc

SEQ ID NO: 294675 - DNA, 1984 bp, Cannabis indica
aaagatgaccttgctgatcatatccaacacttaaaggacaaaagacactttctccagtcagtaatgtaaagaaaataaaaaactaaaaacaaaaaacagaaattctcaaacttgtagagaaaagtacccgaaaacaatattcacattggtcaaagaaccatttttcattgttaaatgaagatcatcttttgcaagaacacccaaagatgagctactgtcagcatattgaatctcatagtcacactgttgacatgtttcacattgtccagttttctgatttctctgaatctctgtacacaatgagtctttagaaggtagtatattatctctggtaggcttatataatggatttggtccctgcataatggacaatcattgattaaaaaaaaacaaacctttctcctttcaatacagcttaacacatttggtttatacttattgcataactgattatataataaaagcagagagaattaggctttaccttggcacagctactgcatggtgcatcacactggatccatgttaagtcactacctgtatccatgtccagaaaataaggtcttggtggattcccaactagaatatatgtgtaatacaacctgtatggaacaagattaactaaacaattaattaaccttcataatgatttctcatttagacaaaaatggccaagcatttatatgtagttactcaaaacagttttgacatttatagtacaataattgaattatatctcattaatgttttaataaagtctaaaaggcgaaatgtactaaatcgtgtcccctaaacttttacatgtaacaaatcgttttgaatccaataatctcagtagtagttcgagagaatatttaagacactacatgtcaaaactagaatgttgaaatcttttggattatacttaaagttccagatgaactaccataatatcattagcaattgttttaggaaagaacagaaaagaaaaacaagattcttccatacccatctggataaacattgcccctgactggaaaaatggttgatgagtcaactttagcagcataagaaaccaatttgttgacttttttggttctaattccattgacaaatgaatcacccacaacaacatctcccttatcaaaatccacaaacctccccaatttaagctccacatcgtttttcccattcatcccaaatttgggatacaatgggaaaataaaagactggggtttatcactatcatcatcatcatcatcattggatcttcgaaacccttcaagcaccgttggataaacatgagaatacaaagtcaaggcaaaaatagagatacccagaagaaaagcagcttttttataaagctatgaaagagtctgaacttgggaaacgggagttggagttgtgggttttgtggggtagtgagattgtgatgaagatgatgatcatggtcatagatttgttggtcttggtgggtttggtaaggaggtgattcggagagtgtgaaagcagtaatggtctttcctaaggaaggattatctggtggtggaagagagattataacgactcctgttagcttaggtggtgggggatcagagtcagactccattttctttctcccaagaagttgcagagtgcatattgcaatctgcaatctgctattgagttaaggatgttgttgtgaaattgacatttgagtttgggttgaaagactcagtcagtcgtggctcacaagtcaaaccaaagtaatgcagagaatggcaaatgtgaaaacagaaacttcttaagaaatgtgtcactccttccttcaaaaactcaccttaggtgtttgatgtttaataataggactaatgtaaagtaaataaaatatgtagggttcttttggtaacattttattttaatttttaatcactaaaatgagagtaaaatttgtgtttttaaaaaataaaaatgtattctataactatttttatgatttgttgtaatttttcttttatttccagaa

SEQ ID NO: 294676 - DNA, 18949 bp, Cannabis indica
atacatcctgtcttttcaccttagtagtcctatgcatagtcagtactatagccccaatcatggctactaataaaataagactaggaaccaaaaaccagacgaaatagtaggtataaagtaaattgcccaatgtttccaaattagtccaacttcgtacctttccggcataaaccgtatatctcagagaggtcgtatttctttgggttggtagtaatggaatggtttcattatctaaaatgaagaacatttcccaccaaaagatcagtccaataataccactcactggtaaatagcgcaatacttcttcgtgaatctccgctatttgaatatggaacatcataacaacgaaaaggaatgaaacggctatagcgcctatatgaactactgggaagatcatagcgaagaagtcgagacctaacaaaataagtaaacctgaagtgtcgcgaaagactggaatgggaaacaaaacggaatgtaccggatttttagcacgtgcaaccatcaaaccagagaccaaagctgggctcgacaaaactgaaagtatcatggtacgtcgtccttccctgaaatggaactttcatgctggagcaagaactagcatgaaagtcgatctattacgaccagcgcggttgttcgtatttcattttcttcttccaagccaagcccttcttagaaagcactcactgagttacttacggaatctataataaggatcaccggtggcccgaccgacgccgatcccgaaacaaagatagttcggctctcttttttcggtcattcagatgaaaaattccgtgaagacgacgagagatgccgcctgctctttccgttccttctctttcggagtggagcactcctgtttgttcctttctaataaaagcttggtacgtgttctgagcgagccttcacgtgacgtgaacggtacctatgaagtggaatccgtctgtcttgtcttccacctcataagggactcaaaatctccactgctattgtcaagcttggacatacttaacttaacactgaccaaattgagaccgtggccacaccttgataaaacagtgatgatgtggtctggatacgcggctcttcgatgggggaaggaccacgctagtcgtctgagtgtgtggtgtgtagtgggtgcatcttagtgtcttcttactacgaaaaatcaatgagaaaatatatgattctcgttctcgaaacgaaactctttttctctttcaaactaggaggattggcatttggccaagatgtgatctatctctttccttggttgtagtgaaactttggttttctttagcgaggaaccgtttcactcggcggacagtcgaatgatcaaagctaaaagctttaggcatcttttgagcatgttcagcttcaaaaattcctggagtcctacttctcacagaaagaaaacatggctagtagataactattttgttattgtagaaagcgatcttgttcgggcttggtctctcgagcctttatcaattccagaagtggaggagcctatgtagaagaagctgtagaagagcaccaccacggttcaggtcggggggattaattcagctgcaaggatcgtgaatcaagcaagggaagggaagaatgagacctgaatttggaagtcacccccgaccgagacctagatggcaacctaacctagtacgtcataattgagaaagggaacaccccccccagagccagaacacaggcgccgacctctccgccaacagcacaagtgaataagagaagatcacgtctccaaaggtggcggtatcaccgtctacaggtcgagtcacgagatctagcactcgacgccgtgaataaaaaaattcgggtgatatacgaaggcgttggtccatcggtgcctcaggggcaatcatctgcgccagtgtataaaaagaaattcaaaattttgacagtagcgagggacaaaaaatgttgattccggctacttttgccacttatgatcagtgttcacaagagcgagacggttcaatgtcttacaatgttcaagcagcattcttgtcggaaggattttttaggaggcccggacacctaccgaacatccctgaaggatggaacaacatgatgaagaaggcggcgaaggtatggaggaaaatctgggaagagaacaaggagatctctgaaaaggggaggcaagaaagtagtagaaatgttgaagaggagacaacccgctcttgaacttaagactatgcgcgtgctcgatctagcaatcttgtactattgttttgatgaactgtcactaaactaaaaaagaaagaagagaaagaactgggagttggcgcctacataactggttgcttgcttaccaagccatcctggcaagctcctccagttctattattattcttgacttgacttattattataaaaactactcactatcaaaatgaaagacgatcgattatctacccaagaagatagagagtcccacatacgagaaaaggtcacaaatagagttgaaccaagtaacattgcaaaggcataatgatagtagggtcgggatatccccgccctccgaaccggacgtgaaggtctcccctcatccggctctctgcaggggaatctccactcactgcttcccctaatatcctccctttaccacatcatgggggtttacaggagatcccagaggctcgctcggaacggctgctataccataccttttgactcaactctactctagtagtcactagactcactatagtagtccgtccggctgctcttgctgaaatcattactcttcattctcccgtgctctagcaattgcgctccctagaccactaccatgtagttaggtagggacaatcaatccgtagtgacgggaatctaggaatgaatgaggatccctatcaatataaaaatgaagaatatataattagagttttatccctttctctcactcaatagatgtttctggtctgatacggtacagtccaatacgagacgatggaatgcaatgggatggatggtagagggctgcctgcgcccaaaagcgatgattcacttgtccccttgtccatagggacctcgtggcatacaaccgaaacgactcccgctagatagccgcccctttctctctttttacagcctcgtggacggacgaaagaagggaagttacagaacggggcagtgaaggctcgcgaagtaggcagcaagcaacagcttctcagccccctaacctttctatgatattattaaagcgctagcgcgcccctttctctaaaggggcgtaagcacttcactcgctaggggatgggattcattcacttgcactcctgctagcactacaaaaagctccggtcttaacgcccctactactgctgtgcagcctttcctcgggttcgtagagtcgggtttcccgtttacccacaacggaggagccgcccccaccaggcaggcggccacaggtcataacgcactcttcgcacaacaaatccactttgaagttgacttattcgctcggccaatcgtcggaatgtgtacgagataccataagggcccaatatctcaatagcacctttgtctaaagcttcgaatgagacttcatatccgaaacgcaggaacgatctgactagaaagtcattcaaaacttgatcgaagaaccagcgtttattgaagaagctatagagtcgattacaaaaagtactagtttgaaaggctcgttggaattgatccgctacgggatttacattatacgcaacagaagcacctgaagtactaaacggaataggtattagtttggtaatggttggagcagcaaactctgattcggcaagaatctcattttttggtagtacgaagggggaattggcccaaaaattggataggggtcaagacgcagtcgggcgccggcggctgactcaagtgccccccgaaccgcgcgaaatggtcgcctattacacggctcactaactctgcctggggtgggggtacctattattcgtcggcggtccggcgcacccctactcacttaaaggataatgcttaattacgaaggaaattcattcttaatctagagagttccccttcgttaagcgcttcgagccaggagtagacatcatcatcatctgcagacaaatccagatcctgtttcatcattagcttagctaaagtggaatagtatgactggctttccggaaaatgagacgaaacccgcttgatcgatatgagaaagatgcgctcaaaaatacctcctaaaccccccctgccaagtgatcgagtttagtctgaatttgctgtagaagttgctcccgcttcggacttacttcaaggaaagataggattgggcaattccgccggttctgttctaaggtattccctttcattagctacgcgaggttagaccttgactgaaaggaaaggagaagggacgagtggctctgatagcacatagaaggcggtttttgatagcaccgctgaaccagttgccactcactggctccatatctccttccctttttatcggtccccctggaatggaaagcgatatatattccccccttaaactctgtactctagctatccagctgacgagtttacccgagctcttgtgctccggggaataaaataagaataagaagagagggtgtctaaaaaaggaagcagaggttcttcacgtgacatagctacgctcaggtttcaccaacttcgcgtcgggttcacttcagtgaaatcttgttaaagcaaaccaacggttggttgaaccttaggacggtcgcgaaaggaaccttcaacatcgggtcaattcacactcactacatactccatggaattgagaacccagcgtaattggttttctccagcggctctttttcctatattctttcagatggcactgctacgtctgcccactacagagcaggcctgactcccgtgagcaggtccgctggcttttcgtacggctttttacttttatgatccggcatgataacaactcgaactccacttctattctttcaagagaaaggcaccgagatcccgcgtaagcgtcgtttgcccgttgccaataggatcgacttggttagtaagattcaattgtgagattaaaaaatacgaaagtaaggggccggaaatcttgagatcaaaaggttgttctaaaggactgtaaatccttgctcctaggatccaagaaggggttttaggaaggactccaaatccttcctaattacctaacttaccctactagtgtagtgtctactgactgagtcgtgaattagattggatgggccgatggggaatcaaattaggagttgtggattggaattgtaatccctttcatttcttcaatcattgagttgaactaataaataactcaagtttcattcaaataaatcatttttacttaaggttcatactatacaactatttaaagtcaaaaagcagtagaaactagaataaacagtgcagtagcaataaatgctcggtacttccataatctcatcatcttgtttttttttcattctatatccctccccagtctcgaatcacaagaagttggagcagatctttgatcttttattagtattcccattccggacgcatacatcgagaatccagtgtgcaattcattttgataagatagatagattgtcccctatagtcatataggtaaaaaaaaatggttgtgctcccgggaaatcaattctactctattcgatggaccaggaacaatcgaaaaaagccagaccagtacgatatctctttgaatcctgaatatggtgatccccccgattgtaccaacctacctatgtctctcccccatcaatcggtactagttattgtcatgtcatttggattccttgacttgatttgtccgatgagaaatgcgaaacgaaagaaggatcctcctgctgggaattagatcctactctttgtcccccctcttcacagaaaatggagagatgaattgatcgattcatcggatcctaggtcgggactgacggggctcgaacccgcagcttccgccttgacagggcggtgctctgaccgattgaactacaatcccaggaaaattaggtgtgcagcctaaaaattcttattttattttctcattggatttcattcgaaccatttagtttcgccgtgttgtaacagagacacgaattatatactttattagtaaattattctcattaaaaatctctaattaaatagattatctatttatgcggctgtaaactcatagtgggctaattcatgaattgaatcaaatgggcccttttacggtagagtcacgctctttaaacgccctaagaagcgtaagtcatcggttccaatccgataaggggcctttatcttttccacgaaactcctgtcttagtcttcatttttcagcagagaatatagatatgaaaaaaaaggggggtaccgcctggcgagtcgtttttttttccttcgtttttaagtggaatgttcattatgatgagttgtagtcgattaggagaactgctatgtcactacagggtatactcttcctcatgtttcattattcatattttatgtcctgggacatagatattctagatacccattatgaatcgccaaagtcttcctacttctccattgttccaatcagatccgaaaaatgagaaatcaatcaaaagtcagtggacctgaattgaatcatgactatataagctattctgatatttagattcgatatagatgaaatcgtggaagcggacctttgatttccttggaccacgtaagaattcgtcgtccgatttcatcttcttgttcctggatgctccataggaatccatcgctattcctttcttccaccgagaaaggttcattccgaatcacaagagcaatttctcttttttttcgttatggtaatgcaatgcaagaggtctcggaaatctggttgtttctgatgatgaaaagagcttttttatgttatgtgaaattgatgaaaacccgatatttaaaggtcggtaatgttagaagacgactgtcggtatctgatggtaagatacctacggtcggtatatctttgaaagctcagacggagagaataaacggactcctcgggggctacttaagttaaggcactttagtgcaaaccagaaggactggagctgttggatgttgctcagtgctgctataacttaacaatcaaaaagctccgcgtcgaacttcagccccttcgagttggccacggggcaacagcctctgacgccccacaccattgcggcaggagggggcttgcccatcagcctactttggcaagaggtggcaggagcgcaacgatctagcccaaacaaacctacttaaacaacctacctaaaggcttggcccggtctgaaggaagaagaaagtagaccctgtagagaagcggataggaggggtagcctatagactcaagcgatcagctcggtgaaaactcaccccgtattccatgtgagttagttgacttcgattagaccagaccgacccagagaggaacgtgcccacgagggcaccaccagatgttttagataaacttacttgagtatatcagagcggaccgcaccatgggctagcccataacccactgcacgagtggaatactttttagtcaagtagaagggccaacctgagagcgagttctcaattttattttttattcatttgtcacatataggtaggtataggcgaataaaagataacgattttcgaagctgtgctaatggtaagaagaggttttaatcaaaaatacggggaagtatgaaattttccaatgttcgaccaatccctcgtctagggcaatagagggagaatgatcttgatttactttgtcactatacgaacactgatctacgaccaccctcaaagatggtcaagctttttactcgcctcgcaccggaaagcaagcaacaactaagggaatagggaatagggagcttcgggaggagcacttccactacgggatagagaataggtcctgttttttggaaggaacaatctttgaaagaactttaaataagagcttttcctcctcggcaagtagagttacctcagccagttaagttaccgggtacctctgtcctttcttctgttagctatctcaactcttcgagtcgagttctagttgctataagaaaattatcccatcgagttgtgagttcgttccagtggactatataaacatgcatagctgcgccttatgagggaccttattatgggcttcttagttgctttgcttatgccagctagcttttgtaggcttggttgcttctttcggcttgtacgctctgtcataggcttgcttccctctaaacaggtctttcatagataagggtatagtctcactccttctatcgaggggttggttttccctctcttttaatttatctttatgcttccagcgagggaaatctttctcgactcacagataagggatgtatgattcccgaaccttaacaaaaaggattgagctccgcgcatcccttgatctccgcctaaccggggctaggctagtttcagtgtttggttcctgacttgatgggagtcacaaggctttaaagaaggccgaggaacggggatgaacgagattcgttttggtttttatgctttgaccttgctcatatatcaaggctgagtctaactccttatgtctcggaaagacagatgtgctttctgatacactggactaaggtgactaacccacaggaccatagatgagacagagactgagacaacgatttgtcgaagacactgtgcccgaatcaaggaaagcaactgtgcctgagaagaaagaaagagatattgattttgaacagcctttaagagatagggggtgccacaagcctaggtccccaagagagataagagatatttgatattggtttggtggacagagcctaggtcgccaagcctaagccccccgacagagagtatggatcacgatgtctcaaaaatgcgtcttgcttaggttgaagcaaatgccagtatagttgctgttcttatgccgctattagtagatcaaacgctcttctttctctgatctttcggagtccttagtcgagtcagatctgcaccgcaggttaatctatccttttttggagctttactaataaggtttccaaacctatatgcttcaagcttatggacacttcaagctcgtaccttcgcatcttgcctttaggttttatcgacttgcatgctgatgagctctttccctcgggttctgtgactcgagtaacaagagctccacgctagagcacaaaagaacggcatctctctatcggattgccttacccctttctttgatatcccattggcttaccccgacggtatttgtatcggtatctcgttctgatagacttgcttgcgcatcttgtctttggtttgatacacttatagtccagtggcaagatcaatgtcttttattggcttctctgtccctggaacaatatctcctcttttctttctttgtttttttcaaataaagacctctttctgtcttctcgggcagtggatttgccaactctattgctcaactatcggtctgaattcctcttcatcttgcttttcttggtttgtggattctatttccccctgtgcttccacttcccctgcctcgagatcgtgcccttttttttttactcgactcgctccctgctcaaaaaagtagatcttattccgcaactcgggtcgatatgtttgggagtcatggtcacatcatgaatttttctacctgtcgcgctcgcgtcattcgctggccagtcgggaggatagtacattccaactcacatgcttcccaaaccaagactcgggggcaacagcgcgactgcttgatctggatcatccggaactacatctaaatctctgactatggcgactaggactctctttggatcacgatttcaaaatgcctggatcgctcttccgggccgggtcgagcctttcaatagtgcatcgtatgtagttgtagcgagcagttccttcccagatcgagaagcttgagcaagaaattcccccattacagatagaggcgcctatagccttgcctctggctttgcccccttatctactacgggtgaatctcttcgatccggaattaaactatccctaaaaaaaaggctttgctgctgccgccgctgggccgacttaaactactgccataggtccctctctatccgggtcctcaccctccaccggaactcctgcgggttagagagatggaactactgaagctgctccctctgcttctggaactggttaagggttggagggcaatcactttttagatcatggatcccttcggacctggagcctttcccttgacaaccgagcttgcctaagtacggcgtagaagagaaaaagtctaggattgagatctgagcaggaatttttcccaggtgagtggctacgttttagggtggtaattggttgcttggtcgagcagctgcctttggcacggaaggaaaggtgttccatagcatctggggccgaggccctgttctggttactacaattagtgtagcacctttattttcagggcttacttcggagagtaccgcagctattgtttgagtataatcctggtatccttctacaatcgtctttgtggctcctgttgctgcagagcctctgtgctgttggttttaccctgcccggtaacgggtccttgaatattctcaggttccgattgtcgacagctaagttattttttacttcctccagtaggtaaggcaataagttttgcaaagtccaacaggcattagtagcgtgcccgcggtacctgtggaatcaactgtatgcgtttgggttgggtttggtgtagtgaaagagaaaaagtagcttcagtttctgaacagacagggcaagcatacctaggaaatcgagattgggatcccattgatccagcggaagcaacggctagggcatggacaataaaagatccttttccatagccggggtccggaggtttctcgtagccgcagaagctacgacatgggcatagctaggtgctggcttaagtactggtgaaagtacctgaaccagtggtgacatcggcaggagaggctccagcactggtaggtaagggcgaagtcatcataagtggttgactgggcctaggaacatcggtcggggcccgcgagcttttaaggcaaattcatcgtttttcgctcgtgtttcatgcgtgcctgtatgaattgcataagtcattgtgttttggcggtggagaagtacagaagtgaacagtgtgctagtctttagttgtgcgaagcgttgtttgttgacaagacttactcaactcactgctttcacctgcttccggtgacaactaccactctcttataaatgggagggtagagtaccaagacataggggttggccagcgaaggcggtttatttagtaccagatatacgtatttcgaattcttttcatggcagttcaaagacacgagagataaggaaaacagaaaagcctctcaaaccagagtaggaattcgatcaggaatagacagaaaaaggctgctaggctcctttctttctcatgggaggggttcgcatccaacccaactcgatacccctcgctaggacatttaagtgagtcgggttttgatccggttccgaaatgaggcggtgttaccaatgactcgataccccgcagctaccgaatgaagttcgtccttcccccctttccctataataaggtgcaggagcgaagccactcgaacgaatgtgagaggagcgaaaggagatagatgccccatatagcctctcctctccggggttgggtcgaaaaaagaatcgaattgggttgagagaagtttatgaatcgagtgaaaatgaaaaagaaaaatcgtaaataaaaatgggcaagtgtgcttgcttattattattattatattagaattagaaaaataccaaaaagatgaagaagaactaaggcacttgcttcggcgaaacctttctccgtcgttacggagttcttctgctctaatctccgaaatcgaaggtcagctgactgaggagttagtattgattcatgcaaagatgctcctctgaagctagagtaagggattgtccacctcaccgccccgaagagcagtggctttgttgttttgcacgcctacagagagatattccaaaagtaccgacgctcaatcgaaagaaagagcaatcaactatatgcttaactcatgccccgggggtacaagatcttattttactggatggaaagccggtaaaaagcatagagcgtgcgggctcagctctcgcccccccccgtgacgctcccaaaccgatcgctatcgttttcttgctttcttgttgtcttgaattgttatagaacggctttctatcaggtatagttggtaggatgaagcgttagtggatatagcaagtgtgccggggatgcggctcgggcgtagtaggtctggacgcctagcatgaaacagccttctctggtagcggcactataccttagtatagtatctctctagcttccagtctatataaaacgtagttagcagaggctcgagagacctcgcgtaaagggctactttggcatcggctctctctcgttaggtaattaccgaggcgaaagccgctctctcggaagtaagtttccccgccatcttagtggtactagtctaataaactttcacttgaactgccactcggattttttttgttgtggtaacgcccttctagaattacgtttaacgtccctttatgactttcccgatcggcgcctcgggtcggtagccgggctccgggacattactaccacggctactatcgacccgagcccaaagaaggaaaagaacggactaaagcgaggagttcattagccatacatagtgaagggggatgggggtcaacctctttcatgacccatggccccagtgtgtcacttggttagcatttctagaacaaattaagtagggttggttttttgatagggaaacaggggagttggctgtagttgagacacgtttttcggatggacgatatggatttattcgagatggttaaccacttttttaaccgtgagagggaggtcattcagaacccgctggctccagaaccggtggaagttccccacgccgatccccatcaagaaagaacaacgtgaggaataagctcaagcggaaaatccattcacactttgattcttgagcaagttcgggaacattgtgagaaggggaaagggcggctgtccgttcactttccggaaatggcataaatctattccagtgccgcagagaacattctgtctcgcgatctggaaatatctgcggagatggatactgaaaccctccgcggatggggggaggagataaaggagaaccctaatctcctaaaatccctcattagggaacacctgtaagatgagtctgccgctttctttcataacagagccgagaataacggctggcatagaagtctctcgcgcgcaaggagatgctgctgctggtactggtagtactggacaagctctcagggaataatctctttcttatttctgcctttctttcccatgacgactaggaacgggcaaatcaaaaatttcacttcgaattccggacctcaacatcctgctgctcatggtgtttcacgatcagtattggaaatgaacggagaagtggtggaacgtgcggaaccacatattggatcactccagtgcggcacgaagccgctgacgccgagtcggctcctatgccgctagctatgccctgcttggtcccccggcacggtggaggttccgtagcgcgtcatgagcaccgggctaaggttgagcaactcaagcgaaccgccccaccttactacaacatagggacagaagggagaaggttgtgaaggtggcctcgttatccacacctccggtcggatgaatggaggaccgaccgacccgggttttcatgagcgttggcgggtcctggagtgcctgtcaagggcgctagcgcataccccggggtgatcatcaccacctgcacctcacatctcggcacagtggaacgtgtaacccgcctgctgtctcattcaactacatttgttcctgtaatccatagcctaacagaacgcagcagcgagggacaacccgcccatacagccagcggggaggatggcactactggcaaagaccgtctggcgaaaacgccgcaggcgcgaagcgtggtaggcctgcgccgggggagcatagcatagggaggaaagggagcccggacggtggaagagccaggggaggccgggtcatttgacggaaatggaaggcttttcccctattagagaaggccctatgaagtaaagggaagtgcatgaattcttggaaaaagagggagcgagcctatataaaaaatgtaataaagtaaattcaatgaatagatagagtcaacggtacgacagacagcgctgcctacacgcgaattagcttccgaggtcgagcagtctcaatttcactacaggatttgcgaatgaatgctgggctgggccacctcgaatggcgtgagccgcatgcggggagacccgcacgtacggtttttagggggatctggtcgaaagaccggccggcgcccacccgactagagggactgagaaattaatagagtacaaaacttatcttcaagctttaccttattctgatcgttcagagggcgatcgcggagtcactgaatgaagtcctccgtttctttcggaggtgctgacccgcagcgaggcagagatgactaagtgacatatggaatatggcgacgacaacagcatgtcgtagaaggagataacaggtggagccaacgacccactaagactaacgtatctacaactacatccccgagcggcagtcaaacggaggcgtgaatgcaagatgccagcggaatgatcggccggacagaggctagggctgcttccttcccaccgcgtccttccttgtgtgtcggagatataaagcgagtgcaccggaaaagaacgggaactgggtcgatctattctatggcgaagcatccgaagcataactgcacactcacacgatctttgccgagagataggagcattcggtggaaccggtgaactacacttgcttctggatagatgtgtgggacagagggctcgtggtaccagctgcccacccttcctcctctgctttgagaaccgtgtgaacggagagtgggcagaagggaaggaggtcctcatacggagtcgcacacttacttgagcagtgcgggagactggggaatgggtcgagtaaactcccctggggccgtaaaataacagacgaagctttacttagatagggctttgatttgattggtatttcttttttcttagtgattggaaaggagggcgcctgggtatgttatagaaagggaaggcagaggtagtacttcgaatggcgaagagaggcggctcggcagggaaggaaggggaaatcgtcaaggatgacttctttgttggcgaaacgttagcgccagtgattctctgagccggtctggatttccaacgcctcgggaaactggtcgagatagatgacagcacctttttcctctcttccttaccgggagggcaatcttatcttatggccttcacctcccgcccggcacggaaatagaacccagccccccttctgatccattcatttctgcaagcaggggggatccagagctaagccccccttctattgcataacctaaaaaagagagttgcaaagtaccgcgggaacgatacgctttggttaccggcgaacgcttccaaaggcgaccagctttccatactagttgttacgttacgctgccatttttccaatatcattgaatagcatggcctggggctaaggtaactcaagtgggagagccgtgttatgggtgaccttattgcacggttcagagagcacttgtgtatgtgatgcaagtgaacgtgtacgaaaaagctgtcgtaaagtttcgttgttcgttccgtcgttgaccctatctatgtttctatgatggcccaagaacacgcttattctttagccgtagagagacttttgaattgcgaggtaccattacgagctcaatatatacgagtgttattctgtgaaataactcgaattttaaatcatttacttgctttaactactcatgctatggatgtgggagcattaactccgttcctgtgggcttttgaggagcgggagaaattgttggaattctatgaaagagtctcgggagccaggatgcatgccagtttcatacgaccaggtggagtggcacaagatctgcctcttggcttatgtcgagatattgattccttcacacaacaatttgcttctcgtatcgacgaattagaagagatgttaaccggcaaccgtatctggaaacaacgattagtggatattggtactgtcactgcacagcaagcaaaggattggggattcagtggtgtaatgttaagaggttcaggggtatgctgggatttgcgaagagcagcaccttacgatgtttatgaccaattggattttgacgtaccagtaggtaccagaggagattgctatgatcgttactgtatccgtattgaagagatgcgacaaagtgttcggatcattgtgcaatgtcttaatcaaatgcctagtggcatgatcaaagccgatgatcgtaagctatgtcctccatcacgatgtcgaatgaaactatccatggaatcgtgcgccgtgtgaaacgtagatcatcgccgttcttaaccgagactcaggttaagctccgtctcggaaccttgtggggttaggagtaaagcatcccgaggttggcgtatctcgttgggcgtggagaagcattgggaaccccaatttctttcttcggagccgtttcttttcccgtccccccgccccggcatagcgcttcgcttccggttcttcggaagaatcaactgacttctcccttcttcattgatctgggggaaaaggaaccgtctacctgttgggaagctagacatcaagtaagtggcttgatgaggataactaagctgacacgccggagttggctgctggcacaacagggtggtgccttaccgcaccacaggcgaacgcgcggtagcgttcgtggtggtgcttcaggattccaatgtactgcgtccaagatcagaacgagcttgccggcggaccactgccgtcccattcttgagtgagctggagcgcagccatcttatccactgaactagctagaagctatcgcttcgggtcgaagcactaaaagaaaaggaccgggaaacgcggcggcataggaaccacgggaccccctactagtaaagggaaaacggaagtgcgctcctgcgcaccagccgaaaaagccctttccccttttcataataataaggtaagcttcatagctccggcttcttttctgccctttttttaggttgggttgctggatacgggatcctcgtagtaggctggaccaacatccagccgagagagggcagcctttagaagcaacaggatttcatagaaagagaacgcttcgcgttttcttatcttcttcccgccctaggagtaggagtagcacaaaaagagggagtagcattattgacccaatgataaaccactaacaccttcctcgttggggctccgcgcactgggaaaacgctctagcgacgggaaaccggccactaggtacaaagctccaataaggtatcgagagggctatcacagtcaggtgcgaagcaattaccccctatttgtaaagtacccctcttcctatttagggggttgaggcgagaaatggcttgatgaaccgttccgttcgccacgcaccggccccattcacttgcaactcgtagaggctgtaagtacacagtgccccacaactattcatagtatagtggggttgaaacacgagagtgcccccctttctttcaagcaggccactttttccggaacgcagtccgggataaccgtgaccatgtatatatatatatcttcgatgctgtcatttcgaaatgtccgcttcaaccgctgtttcacctcccaaaaagcaaggttggcttgacgagcgcagatgtgaggaagcgggagcaataaaaccaaaaatctctttcttgtccttctacttaaggggcaaagagaagcgcttttgctactgagaaagcgaacggtcagcgcgaaggttcaagacttagccgagcgttagcaaagctagattctcatagcgaggcgcttcgagttagcgaagcgctgtagttgcgccgaagccctatgtgctataatgctgagccaaggacgctccgccttatctatagaagcagtcaactgagttctgaacgaattagctccttggtaatggcttaatctatagatagaaagccctatgatgggaaactaccacgttaggtttggagagagatgggaccggttatataatagggggagcagatgcaagctttttctttcaatagccggccaaatgactacaggatcatcggtctactctacctcaattcaccatttcgaaccttatacagaaggtttttccgtaccagcttcttctacctataccgcagttgaagcacctaaaggagaatttggtgtctttctggtcagtaatggaagcaatcgtccctaccgtcgtaaaataagagcacctggctctgcccattcacaaggactcgattctatgtccaaacatcacatgccagcagatgtggtcaccatcataggtactcaagatattgtgtctggagaggtggatagataggaatactagttgctcgatcaggcccctagctttattgcgagccaaaaaccttgatggattccccttcctcttctatcctcagtactagagatgaacgaattccatacgcccagatcgaagaattttctttctgttgttggtgttggaatttcatgaacgcggagccaacgagttcagtcgaacagcgtatatagtaaatagaagtggaagagcgtttctttagagtcgtttaaaacgaaacgagccacctgatgcacaaagatttt

SEQ ID NO: 294677 - DNA, 4795 bp, Cannabis indica
atatatttatatttgaattagtaaatacttgaggttcaaattcgaattaagaaaaaatttgtattgctgtacggttaaaagatattttaatttatattattgatttttcgtaaaaagattttatcttttaagggacttttaatttcatttattttttcaaataaaacattttaattattattaaaagaaagtaacaaaaataaactgattcctatttgcctatttggaataggattatacaaaatatatttttgtttaaattagtacttgaggtccgaaattcaaattaagatattttatggtattaattttttattttatatttatttttggtaaaaaaaagtttatcttttaatttcatttattagaggtatctgataagtcaatttttttttttgaagaaaattaaattgtatatccctttacttaattaatttaatttaatttttatttctattttgatattttttaaatatacttaattttatggatgatatcttcattagacccctttaagacaatttacttaaaaaaaaaaagtgagtatatttcaataaaaaaaacaataccaaaatatttttaattaatagatagaaaaaaaagaaaatttaacttatcccattttttggcgggaaggttaacccatccctccttcttgaaggtgtcattattacattttattgggaccaacacctgaaacagaaaccaaccaatcatattgggacacgtggcagtcattcagagtacttgactgcaggtggactcaactcaagagtttacttgtatcgtcttcctcgtccgtacgtactggtgcttagcttgccacctaagtttcctccctctataaattctttggcttaagttccaaggtttgtacttttaaatgaaatgaagttttgaattatataaatatttggtttcgagaaaggtgaacttgattaatatcttctgcattgcttttttttttcatggaaatttctacattttaaagttgtatcgagagcttgtttggattaattttttggagatttttacattttcgaaagaaagattgaatttttaaaacaaagtctgtagcttttcccaggattctttacgttgggttctaactagttacatatataaaattgaatagagatcatatgtatgttataacccaaaaccgtttttcagtttttatttttttagtttcaaattcgggtctctcttaatttgctgggtttttgtttgaagttttccaggttggctgttttgtggatgatataaaaaatgtttccccagaaaggaacaaaaaggcaattgtttggaaccaatgatggaagtagtaacagtttagacgaaatatacagatttaaagttcttttacccaatggaacaaccgttggattaaatttgagagactctggttctaacatgggtgttaatgactttattaatttggtgaaagatgaatattctcgactgtcggaatcaatgcaacataaaagatgtatgaactgggattctgctggttctttatctcttcatgatactaatgatgccaagataaaaggggttgtggatttcaagaattttaagccacataagtgccacattttaatactccatgtgagtataattagttacatgaggagtagaatagtttatattttgtttgatttactcttcttataatgtgttgtttcttacttgttttgcttctgaattaggatggttctggcaaagctgttcaaacttttgaggtcagattaattgagtaaatttatctctgtggtggtactaatatttctgataaagaatttgttcttaaaccgttttgattccctgagttgcagaatatgtgggatttgactcctgatactgacattttaagggaggtacctgaatcctacacatttgagtctgctcttgcggatttaattgtaagtgtttggttgagttggaaaatcttgaatgaagctgtgttcttatctcctgttcactttgtatttaaatcttgtgctttatttttaccaggacaattctctgcaggcagtatgggctaacagtaacaacgatcgaaaacttgttaggtatgatgctaatgtaatattggtatagctacatttttcttttcttacattaactatgattcaacactagttttatttgcttgcaataagttattctgtttgtatttgtattacatagagattgtcctttatcttttctcattagactagtaacaattattttttttcttcaatatttgcagtgtggatcttttagaggatagaatttcagtctttgacactggtactggtatggatggcagcgatgaaaattctttggcaaaatggtacgtgctaccaatgtcctttccagcatttcgtgtgcatttgaatttaagtgtcttaactagtgctctactatataggggtaaaatgggtgcctcgcttaaccggtcagagaaagaacaggctattgggggcaatcctccatatctaatggtataccaatggattttattaatcgttttaacatatatctagaatgaaacattccctgtattctgttgatttgcattttatatgatcatcatgttgctggaacgattgagtatcttccaatactatcttgtaacaatgtcgtatgcagccttattttggcatgtttgggtatggaggatcgtttgcctccatgcatttagggaggtatgaacatgattcacaattttctattcttctatttttttaacaatcatttattaccttttttttttcacaattttgtttcagacatgctttagtgtcttcaaagacaaagaattcaaggaaggtatatactttacatcttgcgagagaggctttgctcaggcgctctggacttgaatggacggtaatggaatagcataagcggtttatttttctttgaagatgaaacattctcttatgtggctaactctactttttcatattagacttcaggagggcttagggatccttcagaggatgagcttacaaaaacaaaacatggaagctttacaaaggtaggttgttgcaaccctttaatggcttccaagtgattctttcatgggcatttgactcatttgatgcattgagcactggcatttgttgccaacattgatgtgcccacaagtctgtaaatgtatggttttttatgaacattaaaactaatttgtataggttgaaatctttgaaccaaagataaagccttcaaatacattacaacttcagtgcaaactgaaggacatatacttcccatatattcaggttttctatacttctctctttctgttttcgattatatttgagttggattatgtatacattaatggtatgatctttctactataacaccactcttaatttctcacttgtctttgatgcattgcttttgttgggattgcagtgtgatgagttgtccaactcagggaagacaataacacctatagaatttcaggtttactgtgttcttgttaagcaatttaattccgtttatgtgattattgattaattttggttaccgttctgtgattatgttctcatgcaagaaattaagtagctttcttttattccatgtatgtgagttgattatgtcatttttcaggttaatggtactaatttgactgagattgagggtggagaagttgctattacaaatttgcattcttgcaatggtcctgattttgttttacagcttcgtttgtccttaaaccaagacaatgtaaccaagagtcaaggtaactgactatggctacttcttctgtgaactttggattcacatttatttgtttgtttttgagtgtcatctatgttatgttaatagctatttctcaatttgaagttgtgtcaggttcgcggttgaatcacgaggccaatgtgcgactgaaatgtgtttattttccagttgttggggtaagattattatatgcatgactgttatttttatgcaaatacttgggaaactaaagtgtataagtgttttttagggaaaagagaacattgagaagattttggaaaagttaaaagatgcaggacatgaagtctctgaaaattttagaacctttaaacgagtttctattaggaggcttggccgattaattccagatgctcgatgggtaaggtttttgatcttctaataaaaagatatcaatgagctaatttaatgatacccttttcaagtagatcagttcagtcattgcttgaagatgaagataagtgttatcttaattgtctatcctttaataaaactttttatcaggattggatgcctttcatggacttaaggcaaaaaaagggaactgatagggcacacatattgaagaggtgttgtttcagagtgaaatgctttattggtaggctgacacagtgttatctgcactttatgaagagaacatttctttgtttgaggattttctatattgctttcatattcttgattaagttaaacaatgtcatgttgcagatactgatgctggtatcaatcccactccgtcgaaggtaagttttgatgctattctttcattaatgtatcaagattcaagcaaatttctacctctctctctctctcttcctaaaccttccaactttgctcgtagctggtgttgagtgccttgtacagatgcaccattgattaaaagatagcatgtttccttagtgttctatccttttgatttaatacaagttatcactaatttagttttagtcacaacatgtattgtgactaaaaatacatttggtcacagtaaattatgatttttgtgactaatacttttagtcacagactttttagt

SEQ ID NO: 294678 - DNA, 672 bp, Cannabis indica
tgcacgaggcacacggtcgcgcaaaaaatgagcccattgttactcggattgttggaaggttgaccttggcttagagaagtcaaggtgccgcacgggtgttccgctgcctgaaaaggtgagcccgtgacaccgtgccatccttccaagaagtatccgtcacacaataaacctgaacagaattgcctattacccttctaggcacatcagacggaacactatggccaatttctacttctgcatttacgaaaaccagatactcagaataccttctcaatatggagcttctaaccacttcaatattaaccaatcctcctttgaacaagtattcgttcctagctttccaaatgccttcaaacaaacaacctgtataggatagaaatcgatccgtaagatctctaggaagtgtcgacaagatccgttccaaccgccccttaaccgaattaccactcccttccccaaaacaaatggggaaagggttgttaaaccataaggctcgcgcacaaggacaatcccagaagatatgaatagtagtctcgagatcgctatcacacaaaggacacgattggtcccccacaaagcccagcctatctctagtaggcacacaacccgtaatcactctccaaatcataaccgtatgcctggcgtgaacattctgttagaatttattttacc

SEQ ID NO: 294679 - DNA, 2196 bp, Cannabis indica
aaaaagaaaaagaaaaatagaaacagaaattagggtaaaatgtgaaaacacaacaaattattgacgagtcacgacacgacctctctctctctctttattccaccatcgcagtccaatgtcctcccttttcttcttactcttacttctcacaacacttcaaccttcctatttcttcatcgttgttcgtgatcgcatccccagtacttgcttctccatcgttctgctcctccaacaaactatcacggtaaatatctctctctctatttttctgtttttctttttcgtaaactgaattcattctactttatatagttgtatttcgatattgtgtgaattgtgatagtgttttagttgctatatatactgcttgatataatgtctgtgtgattcgtgaaagaattggttatattaagggccagtgataactattctgaagcaacttttctgtagtttaatacatcttgatcatattcattgttcaagttaccttaagagttttctattttaattttctttgtttatcgtttgttgctgtaaatgagttcaatgcttttctttcttttttgtttcacaactcttattttttattcttttgaaattaaattctggaaaaatcaattatcaggtatgtatttccacttatccacttgcaattatgaaatgaatcatcaaattttagtgttatcataattaatgttctaatttatattgttgttactttagctgattattatgtgtaatattatgatgaacagagggaggtattattacaatatttaattgattcttgttgtgacgttgtgtattggtatttttagttaaattattgttactcatgattatttctgtgaattgtggaaaaatgcatactgaattgataatgatatcctgactaatattacaagaacaaagatggtttttttctttgcaattcagttgttttgactgaacaggttttttaaaacaaaatacaaaatcacatttgtcatatttatttctgaaacaaaaacctgtattttgtttttcagacagtgcaagcaataggaatactgatacaaagcaacggacaatgggatgagaacaagaattacattgggtttgaagctcatggtgaattaataccaatagaattcaaatatgaagaacttgtgcaaacactattgcttaaactgcgttgtaaccccgaaacaacaagcataatgatacaatatcaagtgaaggaaaactacccacctataaaattacttgatgatgccagtctacgtttttataagcatctgaaaataaacgaaacagattttataaagtatccattatgtgtgaacacagagaacaacacagctgcaacatcaaccatacaattcttcaaatctagagaatcaacagtgacacaaggagggctcataatggacaatggtccacgaactacagaatcaattgtagatgattctgattctgatgctactgatagtgaaggggagaaagaggtagggaatcttttctagttattttcattctgtttatttaagatggttcctttcaattttttttgttattctcaaataaactaaatgtcatttttctgaagcccatacagaatgatataataaaagaaccttcatcttccaagaagaaatctgaagatggagatgaagatgggccggagaagaaaaaacagaagaagaagaagaagaaaaaggatccaagtgcaccaagaagagcaatgtcaggcttcatgttcttctcacaaatggaaagggaggtgggtttgttttctaaatatatgtccttgcatattccttctcattgtggcaccaagctagctagttctagttgcagtcatttgcttcaccatatgctcttgtatttatttatcgaatgaaactgttgatgtcaatctagcaaggcagttgtcatatgaacaaattcattaccaagcattatttttttgttggttgcagaatgtgaagaaaaccaaccccggaatttccttccctgaagtgggaagagttttaggagataaatggaaaaggatgtctggtatgaatgatacatgctttcagatagttgatttcattttcccacttaatccacactcccactgtgttatattatttttaatataataatatgtagattaaaatgtggtaatatataatattatgtgaataatatatattaagtgtatggtaaata

SEQ ID NO: 294680 - DNA, 6735 bp, Cannabis indica
aataattaattattttattttataattttaaatatttgctatagtaataattaattagtagtggtgtgatgatgatgattcatttgctagattaatgagttcttgcctgtaatttgttgaacgttataataatgataataataatcataatattcacacatatagttatctcaagtgataattctatgaagttttagtaattagataaatgaaagagtgtgatttaaatttatcattattatatttttattggaatgtagacaatattgttatgaattaagtcatatatatatatgtgacattagagtactcactcgtaataactttctaattgaccagtagtagtcatcatttaatttattattttcatggatttatacattaatttagctaataatcattttaactagtattatttatacaaaaatcatcattattttttatatttatcaaattattaaattaagtagaaattatataaatttatgttgatcagatatacagctttggttgagcaaaatttggtacaagcagccaaggacatggagaaggtattagatgtttcgatgagccaaatcacagaagatggaccacttgtacaactccccaacaaccaaacacaccaatatcctttcttctcaaaaacattcttccgccgccacgggcgggatctcttcgcctgctccgccgcctggttcctcgtcgacattgtcttctacagcagcaacctattccagtcccacgtctacaacaactttcttaagccggccaacgaagtcagcgtattcagagacgcatatgacgtggccaaactccaagccatcgtagccatctgctccaccatccctggctactggttcacagtctacttcattgaccgtataggaagggtaagaatccagctcatggggtttctagtcatggccattgtttacatctccattggtataccttactacagtttttgggagaatcacgaccaccgtaaaggattcatggttctttacggactcacattcttcttcgctaactttggaccaaacaccaccactttcatagttcctgctgagcttttcccggcaaggtttagatccacgtgtcatggaatatctggggcttctggaaaggtgggagccattgttgggttagggttcttgtgggcttctcacaataaagcggaagaaggataccctgaaggaattggaatgattgcgtcgttggtgattatgggaggagtgtgcttggtgggtatggtaatcacttatcttttcactgttgaaaccaatgggagatcattagaagagaatgagattgtgaatgatgaattattaggtcatgatgatgattataataaggcaaagtgttttgtgagatgttttaagtatgatcatcatgatcatgattttggccacactgctacaactacaactactactacgtataaccctcaatctcaatcatcgactattagttaatatataatattatatagcacactattcttcttagtaattctgtacgtacactatatgtatatatatttatctatatatatacaacatgatattacttgatttattatgatattttagaatgctatgtgaattaaggttttaattaatgaagctatgattaagctataaaaacgacattttttcaagttttttttattgatatatatttatttcttaaaattattttttagggttctaaaaaaaatattataaattggactttttctaaacaaccgaaattatattttttttagtatataatagaaaaaatttaaaatataacattttggaagtaaaaaaatgaatcttttccttaaaaatatatgaattagtagaatttacactcaatatgtggttttgaaaactttttacttaaatacggtagatttaaattagtaaaaactaatcgtaattttttttgattgttgtgtcttgttttttgacatggttgttttgagtattttcaaaagtttagtcttgtccgattgtgctatttttttgttttatacgactatgatgaatcaacgacaatcccaacatcagaacatagttgatgactatgctagtttcacgattgaagatgaagatgagaaagggttggtgtttgatgcgggggaggatggcttaacagatatcgatgatcgatggctgctagtgggtcgattcttaaccaaccgatccattgactatcaagccatgcagaataagatggccacgttgtggcaactgggaagaggtctatatgtcaagcaactagattcaaatctctttttatttcagttctaccacgaagtggatatcgagcgtgttatcgaagaaagtccatggacgttcgatcgagctccactaatctttgaacgcgtcacacaaggggtgaatccccggctggttgcgctaacgaaactcaagctttgggttcaacttcataacatgacaatcgattttatgttagagaaggttattaagggggtaggcaattatatcgagacctttgtcaaatcggatctgaataatttttccggagtgtggcgtgattatttacagattagagtcaagcttccaattgatgttccattaaagaagaagaagaaactagaaatccagggagggctggtgtgccatgtttgttttaagtatgaacatttacctacgttttgctttatctgtggaatcctcggccattcagaaagattttgtgaaaggttgtttgacactccaaaagatcagatcataaagagatatggattagagttgaaagcggctccgagacgacgtaattatgttgatggttctaaatgcctaaggtcaggattggctactagggtcggttatcgtgcgggtgggactccaagtaatcacagtggtggccggactgtaattctggcgctagtggggagtgagggtgaccatttaatgcaggagaggaattcgggattgactgtagggaggaataatcaaggagccatggataatgggattgccaatcaaattaaatcccatatatcaggggacgtgattatgggggaggaaaacatggcaaagttggaggaagaatctaatgaggggctgatttttattgactccaaaagaagaagaatgatcatggaccaagatagtgggccaagtgatgaaaaagaagtggaggtgggccatacttcttcaagtgaaaacgtgcaaaatgccataaaaataaatgttatcattagtaatgttgtgatgaatgatgtggtgggttcaaaaaacttatttggggcgggctctggttaccagacccgccaagaattatgaatgtaataagttagaattatcgggggcttggaaaccaacagagtattcaatcccttagagaaattatttctcaaaagcaacccaattttgtatttttatgtgaaataaaatgtcaaaaagtaaaagttgatgggcttgctagattattgggctttgatggggtgtttactgtagattcaattggattggctggtggacttggttttttatggaaaaataaagaagatggccttttgttgggttactcaaatcactatattgactttgttgttaactctgttcaatttggtaattggaggctaacgggtatgtatggggagccaaattgtaatagaaggcaagacacttggaatcttattcaaactttatcctctcgtttggagttgcaatggtgcataattggagatatgaacaacattgtcagacaaaaggataaaaagggggctgaccttaccccccaaagactccttgcaggttttaactgagtgttacaacggtgcgacttgacagatttggagttgcaaggccacccgttcacatgggagaaaggaagaggtactaatcactggattgaaagtcgattggacagagctttagtcacgtcatcatgacttcaagtctttccttctgctaatcttttaaacttaaatttttctacttctgatcatgctcctattttttttgagcccacggtgtgcaatgtttttgttccaactcgtcgttttcgatttgaaaatacctggttgaaggaaccattatgttacgaaattgtgaaagattgttgggagaatggtcaagctactagtttcggtgaaaagttgagtctgtgtgctgaaaaatttgaagagtggggaaaagagatagcatgtatacgcttaatcaccgtataaaaaagcacaaaaaggagttgagtttgcttcatggtaagagggatgaggctttagttcaatgttataacgaggtcaagaaaaaactattcaaggcccttcatcagagagagagagagagagagttattggaagcagagagccaaacagttttagctgcgtgaaggtgaccaaatagtagctattttcataaggcagcaagcagcagaaaaaagaacaatcagattgagcagttgaaggatgatcatggaaattgggtaacttgggagtcgggtttatctaatgtcgtatctgattacttcaatggtttgttcgcaactgcaaacacttattgtgctgaggtaattgattgtgttccaaaggtggtgtctgacggtgttaacatggagttatgccagcctattgtcgaagaagaaatgaagaaagtcttattttagatgcatccggataaaagcccaaggtcggatggcatgacccctgctttttacaagaaatgttggtcgattgttcgaagtgatgtggtgcaatgcatctgttatttctttaatcagtgcacgttgggggacgattatagtgaggcaaatgttgtgcttataccgaaaaaggaaaatccagaacttatgtctaatctccatccaattgcactttgtaatatcatgtacaagattatcactaaggttatggtcaacagaatgaagctgattattgatacggtcatttcagataatcaaagttcgtatatcccaagtcgtttaatttttggtaatgttctggtttcatttgaaattctgcattacttacaaagaaaacgcacaggaaaagaagggtacatggctctcaagctttatatgagcaaggcttatgatagagttgagtggtctttccttgaaacgatgctccgtaaaatgggtttttcagaaaattgggttcaattggtgttgaaatgtgtaacatcgggaaggtacaaagttattcatgcaaaccacgaagttgggctgattattccatcgagaggcattcgacaaggggatcttctttcaccgtatctgtttattctttgtgttgagggtctcactgcgctactctgcaagtatgaacaaagaggttggcttcatggatgtaaagttgctaatggtgctccgaggatttctcacatgctatttgctgatgataactatttatattgcaaggccacgaaataagaagctatgcaaatcaaagaagttctccataagtttgaattggcttcatgttagaaagtcaatttatctaagtcttctattttttttcagttctaacactattgagacaatgaggaaccgactttgtggtttattgggaatgagtgctgtgttggatgggagtctttatttgggccttccaagctcaatgggacgtcataaaatagcagctttgggttacttgaaggagaaagttcaaaaaagacttcaagggtggggaactaaattcatatctagagcaggaaaagaagttttaataaagtctgttgcccaatcgctcccaagttatgccatgaatgtctttcttttacctcttgaggtaaccagagatatggagagtcttatgtccaagtactggtggcagtcttcttctgacaacaatacggatattcattggatgtcaaggaagaggctttgtaatcacaaaatgaagggaggtatgggatttcctaacttaagggagtttaatttagcaatgttgggaaaacaaaggtggcgggtactatttaaacctgaatctttggtggctcgtgtgtttaaagctcgttactaccccacaggaacttttcttacagctactataggttccaatccaagttttgtgtggtggagtgttcttgaggctcaaaatcttgtggctagtggagttggttggagagttggggatggcaaaacaatcaatgtaataggtgactcgtggttacttgataaaggcaatcccttggttacatctttgcatccgagtcttgcaaatgctaaagttgccaatctaatgacttcaggtggtcgccaatgggatgtggaggtattgaatgatttattcgacttaagagacaaagagttgattcttcaaattcctctccacactacaccggctcatgatcaactaatttggagtggggaattatctggattatacactgttaaaagtgcgtataaactcattcaggatcttaaaagtggcgtggacttggatgagtctttggttaaaaaatttggaaaaaatcctggactctcaagctgccccctaagatgaagaatcttgtttggagagcgggtatctattgtcttcctaccatgtttcagcttcggactaaacatgcggtggcaaactctctctgtccggtgtgttctcttgatgatgaaaccatcctacatgttttaattatctgtccagtggctaagctttgttgggacagagtgggaataggcacgggtgtgcaacaaaacatggattttttggcctggtgcgtggagaatttttcaggccctggattgtaacgccctaatgctaaggcacgctac

SEQ ID NO: 294681 - DNA, 14077 bp, Cannabis indica
caatattcaaactaattggtcaatattttgcttcctatatatgcccacaattcacaacttctgcgttttgtgggagacctgatcaaacctgtttgtgatcattataattgatcatttaaaatgctaaaattaaaaaccatcttcataagatagaaaaatatttatttatgtacgtgaaccaattaaattatagttttcagtcttggcttgtcatattttatttttcaacgtaacgaatttaagaaaattggtgtattacgtaatagtgaattaaataaccacttggggctagctcaagtggccataggtgggtgtgtgagtgttggaggtcctgggttcgagtcccagtaaaaacatgttgtaatatataaacgcttaaataaaaaaaaaaaaaaaaagtaccaacactataagcctggactggggtgtctgcaattgactagatcaaccaaaacttaatgaaattaattatgaagaaaaaagaaaacaccacacacacatgaccccattttattaacaattccttctctaaacaattttcagtaaccaagctaaaatttcaaattaactatgtaacttacttttaatatatatgttaaaacttttagctcatctttcctcaaattcaatcttccaaacatgacactaccaaaaaaactaatatataataaataaataaatcacatgcagcttatgctttttattgtactactacttatagtgactttaatattttccaagaataattcttaatattttacaatattgagtttaagtaatgtcacttttttaatacatgtgtgagaaattattaatcaacttttgatgtataactacaaatgaatctcatcatagataaaattgggaataaaacaatcaaactgtgcataaacatacctatgggtctgttctgtaattattattcaaaataaggattttttttttaaaaaaaaaaaacatattttgtaaatttatctttatgaaaattaaaattttgaacattttaaaaagaagttactttcaaaatatatatttacatatcttttttaattataatataatttgtattctttttaatcaatattttagacgtcttacttaattgaattccgaccccatgtcgaaccctaaaccccagctcgaatccaaccttcggctccaggactgaactacagccctcgacctcatatcagacctcaactctcgaatccaatctcttgcctttatctccaaacctggaccacaaccccttaccatgactccctaccccaactcctgcccctaatttggatctcggcttcgacctacttcacctcacattcttagtggtcacttaaatgaaagaaacaaaaaatacaaatacaaatttatgtaatatatttttgcatttcaaaaataaaaagttaaaattttactttttatttttgtgatttaaattttttttaaaataacttattataggatctatattactaccacttaaactttatgtggaaagatagtgtaaactttgtactgttgggcatatgaatgggacaacctgttttttgagtattatatgtttaaatttaaattaatatttcattaaaaataatgtatcacgtcctaaaatattggacaccctatataggattcctttccttatggtaatgctttaataataatagtctggcttaggtgaatgttttgcaagacacaacatacaacacactttgcacttctaattttccagtttttctcttatgttttaactttcacaataaaattgaatatttactgaagttactagctattgtattcacataaaaaaagtctctcatcattgtcacttcaaacacccaattctagtaaattcaaatatcaatatcaatgaacttaaaatattcaaagagaacaagaacaagtatcaaattagcaaaatttgttccatcaacaacaatataaatggcatacaccaataatagaaaacaagaacaaaaataaatccagaaaagttaccatatctttgatcacttaagctcagcagcatcacctttaagggcccctttacacttcttgtcacactgtttgtcatcgtcgttgtcaaccaatcctacacaagcaccaccctcaatgtagctactgaagtccccatttcacacccgcgagtgacacccttgccttacaccagcatcatgccaccttctcaactgtcgctctggtctgatctgtcctgacgccgcaccttctgttggaactactgccaacttctttgatcagttgagtcaaggattcaggcaggaccctttaagtttctctaaacttttgctgcatttcttgaactcgtttcaaggatgttctaatttctacaatttctctctcatcagctctactttcttcataaaagattcatctctgactcaccgttcttcttctctgccataggaagatctaaactctaataccaacatataaaagctaacctttagaaggcgtaacattgagtctatatccctcaacgaatgatcaactgctgcgctgctcaatttccaaggatgtatgatgtatttgcagaggatttccaaccataaaatacctcaaatgatgccgttttgggagccattttcgtctaactcttgtgctctaatcctgttggccatatcaacttcagagttcagaatatagctctgaataaaaaatcaaacgactccaaaagcggtaagtaacaaataaagaaaatttgtttctacaattttctaaatgtatttcctatatcctgatgataaaccatatcaagcactcttaaagctaaagaaaaatacaagaaaattatctcaaagggactaacccaaccttaagtgtgagaatttcattgcaaaatccctttaaaaccatctcctttttggatgttaatgcatcacattcaagcactaaccaaagcgtaagttacctccatagctttcactgacagatgcctagagaatatagaacaaagaaattgaaaaaaagtgagtcacaatataaagcaaaatgaaaaagaagagaaaggtaaaaccatttaaaattgtacgtggcctgatctcctaaacctagagatgcacatgtggacttaggccaacccccatcttgttacagtgccaagatggatcacccctggcgtgacactgtagtagggctgattggaccgacctaacccacacacataatgcaaggtgggatatgcatttatgtgatagcacatagggcagacggctcagcccatgtaaaggtagaatggccttggtacataattataattgctaccagtggtagcaaacacgaggcacaacttataaatgaaaacatgaagctcaccctaatggtacaatctaaaccatgacatgttgcatagaaagatgattaacataaaagagaaaagaatcgcctcatgcgcctcggtacacatcgcctcatcagtgtgaggtgtatgcctcaatgacagcagatgaggcatagcctcggatacgttttttaaaaaatcgccttgccttaaggtgtgcctcaagcgtacacctagaccaatttttaaatctattggcccaccacataccatgtaaataatgggtagtgtcgagtcatcctaatcagctacccattgtgggctgccgagaacgggccaaacatcacaaagatacctacgcataatataaaaaataaccaaacaccatttattaacttacctgaagatatggaaacacagagtcataaacatgtaagagaaactttgacttcgacatgaacctgaaaacaaattaataatatagatctgtaaggaaaataaaagtaaattattaataatttgtacgggaagctggatttaatattctttttagtattaatgattgtcaattaaagtgccattagattcaaacgaaaaattcaaaattgatttttcctacaatgggggagaatttctcttgtaaatgtaagaagatacaacattactgaactgaactgcaatatcaaaagaaaaagaacttcataaatctgtcaatacaatcaaatggctctgtcctgcagcttgatattaaactagcaaaccattcatacctttgtatcagacggaaacaaatatagatctcttcgatatccagctcaatctttaatttgacatactgcttgacaacctccgaaaatttgtttatagcttcctgccaacctacatacccaggggcatctagaataccctgacattccaaagtgatacatcgtagaactgaagataaactttgatttgaccctgacttgtaatacatctccgcaagtgtattcaatattacacaattattcacgctgaattcatcaacccacttgggaggacttccgacccagaggtcgcagtttgacatagaatcagttgattcaagattattttcaacctcatcgatatttaatgatttttgtggatatggatgttctgaattagggctcaaggaagaacttaaaggaagtcctggtaacctatgtgcaggaagctgctcgagtatatcgactctcagttcttgaggcaattgttgtaacaccgatgcatctacttgactcaaagatgaaggcattagatcagtattctcaagatctggtctgagaaaatcatgagatcctcccgtagaaggctttaagtgtggctgttttacctaacagaagatacaaattaagttaattatctcatcatttttaaaagcaaaactactggcctaccatgcatgcaatcaaggaaatataaaacatatcactcagacaacagtatttggcggaaaaatttctgatgcatagtacaaacatatatatgcattcaaaattacaaacaaggagcataaatattggcatacactgacatttttttcatcattcccaatgacacttgctcactacatattacaccccttctgacacaccctcctaaaaagggtagcatttcctttcctctgcctctagaagaggcttcaacaaaaacaaaaatcaaggagccctagtttagggggaaaaggattctttctgatatggtgcttttctgctgctacctgagtttgtaagatttatcctaattttttttagggtaaatgcacttgaggtccttaacaatatacacttagatccccaaccttgtttttatttttagtgtttagttccttaaccattattttttggttcaatttagtcccaaaggtttacattcaaaatctgttaaaaaaaatgtcacgactacagctgaaaccgagatgaaaaagacagactctcaccagagagtacaacaacgacattgacgagttggctgtgggtgggtaggtcctcaacaagccatttttgttttggaagtggtcgaagaagcctttggaatgacataattcatgggtttttaatagatttcggatggaatatagcatttgggactaaagtgagccaaaaagtaaagattgagtacctagacactacataaaaaaaacaaagtttggagcctaagtgatatacatggaaaagattgaagaccccaggtgctattaaccctttgttttactattatttacataaaaattgatcagattttcaaactatcttcttttctataactattcacaagcagaaaatttaaaaaacagaaaattttctgtgtttactttctgcctaggatatggccaagcaacaacctagatacattaagtcaaatcaaggaagaaagaatgaaaggggaaaagtttacctcatctttacttgatatttggcttgatgcaccagattgtgaagggaaaaaaggaagaaagaatcaaagtagaaaaatttacctcatctttacttgataatttgtcttgaagcaccagattgtgatggggaagcctttctccctcgttcatttttcctgaataaatatgagaacaaaaacatgaagcatcacaactgaaaaaggtaaataataatgaagaaaaattgagcttctgtaaggctggtacctttccctttgcttttacttttagcaacaaaatcaactaacttccctccataaatttcatttagttctgaaaaaatatctggaggaagattctcaataactccaaaatcaagatgagaaaaaggtggaggtgcggaatttgagttcaagctagattccccattagagggcttattatccactgagttcgtaacaagtgtatcttcatataactgtccacgaactccatcagatctcagtccctcacaatctgtaacatgggcatcattcagtaaattgatcaagaacaaaattcctttgtaccaatactgcctataatatataggtaagcaacgataaaatcacgagacacaagacaataatacctactgccgtcttcttccctggtacataatcacatttttctgaacatacggaggaagatttcaaccatgacttcaaagagtttttctcggatcctttcaaacagtaaagataatgcccagtttagtgatcagatagaaattagtaactaccaatatataaaaaagatataaaccctttttagtctaattgagcgccacaagaaaaaaacttgagtgtaaaatgagtaagttcatatgatttgtaacttgtaactacactgagcataggtatgttaacaacaattataattcagcaacgtaccctgcctaaatgaatctgcattttcaagcttggaaacttgcaagccaacacccctaatctccttaacatctgggtataaaataatagaacaggtcaacgtaaaggcatggaagcaaagcaaaataataataataataataataataataataattcattttgccttcttaataatcaaaggtagaaaaacacagtaattaattcccaaaactacaggaagatcaataaagataattattttgcttctttgctagggagagctcaataaagttgcttcatttaaagggagagctcaacaatggtggaccggaagttttgacaagacatgagcccatagacacagaaaatctggacatgggctagactcaacatgataccgtagatcgtgcaaggcttagatgtcaagcacaaatgaacaacacaacacaacagtgaacacatcaataagcactaacaaactgactcgaaagcttgaaaaacctaaattaagctccataatttgacattaatagtgataatacaatatttaattgtaaattatattttaagttaaaatgacaacaaaagtgataataattatttgttgtgacaacaaaataaaaaccattttaaattatttgtttataaggtttgtgagttacatattagttggtatacaaattctaataattatgatatatattaatataaatttatgtaaagtattggcacaacaaataaaattaactaaatgtattgtttgaacaaaaatgtacatttaatttagggattaacaaaaatattaagtagaagaatatgattttcattttctgaaaacttataaactgattttttaagaacattaagtagaaaaactctagtgctctaacattcagcaactttaacaatgcacctcatgctgcagttaaaatattacctatgttgaacatcccaaatagctgctttgttattctcttaagcacttcaacatcatcagtagcaactggaacctataaaagcctttattgatgttagatttttagccccaacagttgaaacataataataaagaaaccagaattatgagcatacactgtaacccacatatttgcatattttctaaatagaaaataattcctgtaatgataacatcttacagtaagagaatggctcaaattttcacaatctccacaacccaaatactttgcaggctcctctgcatccttccgcctctttttaatctgatatagtgaatgtcagtttatccgtgcaccaaaaacagagaaataacaactctcataaatttaaagaacataagtcttcctagtcaacatcttaatagccttcagtaactaatcattagaataagtaagaaatttgagaaaaagcaaatactttaaggatgaatgtgcgcccctgcagtccacatccttgcaagcgcaatgagacctccttgcaaaggctccagaggaagttttgactctggaaaaacaagtgtcaaaacttttcaaaaaaacagtaaacctaaagtgagatagtaaactaacatcttttggatcattaaatctcacaccccaattcacttcagctcctatggacttgctttcctgcatattgcaaattaatttagcaaagatgaaacttattagacatatcaaaagatcgaagctaaattgataatcagctgttcttctaggtgtggtttgaaaaacagaatggtactgcacagataaacatgcaatttcaacttgtcaatttctcagttatgtgaaaggcaacaaaatggaaggatggccacattaaaatatggaggactctacagaaaattaagaaggcaaaccagatatgttaatgcagatatatgtagtcagtcgaaatcatgttctaatctaacctgaatgatcccaacaagtctagtatctattcccctactataattccataacatctcccctgtttttgctccaaagtccttttgaagacattcctgagaaagtagaaacccaagcagcaaatcctttattaataatcacagaaattagaatgatctcaaattgtggagcagatctcctgaaaactaactagaaaagaatacctttgagattaaacatagctgtccacaggtatgaacattttgcttcttcaacttctcttgtagaacatgtcctattcctggtagttctttgattggtagttggcgcaagtaatcatccacctaaataccaaagtttaaccatgaaggtatttacataatattctgcaacatactaatcattggaaataacatgcactaaataaagcatccattaccaattacaagatgatgaaatgagagaataaaatgtgtgagaaagatgaactaatcatccattactctatcatgacataaattacatttgtgacatagaggctgcagcatatactaaaccactcgttaatcaagccattgaagtccgatatcaagatatattgagtaccttctctggaggaatataacactgcccatctggtttggcatttctggtggcaaggcgagatataagcatattcccacctataccagcacttgcagtgcatccagttgtctcaaaaatttcctttcttatagttgaagctaaaatctcaggatcttttccttctaaccctgtaacatctaagaatgcttcatcacagctgactgcctacatttagaattaactattatgttaataaaggactagtaagaagtaaactatgagttgcatgtagaggatgtgttacagaagctgacctgtactttcttgcaatgcttgtgcaatatgttatagaactggtcagcgacctgcagattttatcaatgcataaaataatgaaaataaatcacaaatgaatgaatgaatcatataaatactgaccaagcgaaatagggaaaaaaataagaggaaaaagtgcacacacattcctacataattcagatttgtaaatgataacatatgattaattttcgaaagtaatgtagtataagaaagtcaaatgaatagccacctcttcatatgcttcaaagttatagggacaaatgactaagtgaggacaaagagccttggcatctctaacaaacattccagctcttactcctgaaaaatagaagtaaaattttgatatagaatatgaggtccagaatatattgcacaagtaactttaactaagatgacttggtaaaaaccctaccataaacacgagcaggataattggcagatgaaatttcagcagttcctttgggactgtccgaatggcatacagccacaggtttatccttcaatttatgatcattcctgatgacaaccgagacaaaaaaacagtcctgcaacatcaaataaggattattatactctctaaaatacccaaaataccttggcaacttctaatatttggatttccaaaattgcaccaaacccaaattttctagctgctttagagcatcaccagtgagtgaagtgctatagaagtgggggatgctataaaagtggtgcatatgaactttttagcatatctttataaaattgaactccaatggtagtgtataaggtgggccaaatttggcacataataaaagttgtgccaaatatagcacaaaatatagcataagtcaaatttgtaccacaacaaatataacttttttatttactcttttgccattcactactataatttataactttttatattttatttatatacttaataagggtttttatataccgtcaataaaaattccaattttttgttgactttctaagctaattttacacctaatgcattggagtgcagttgtgaaatttgggacaaatatattcttgactcgttttcgaggcaatttcagcacaaattttacagtcctattcttttatagtattttatgtttgatcatgaaaatcttgttcaactttttcaagaactatgaataaaaagtaagtcaaaactactctgaaaaatcttcagaacagtaagtacaacgaagtcattttgccaccctcataattaaaaacaatataaaaatgaatatggttcaactttaatattaccatgtcaatgtggataatagctgtcctgagcgaatcagcagaagaatgattggaattggtattcttgaatccttttgactggcagggaaaacgcctacgatacctatttctccaggtccctataaagtgcagccttgagctctgcagcaaattcaaacaggtaattgtgtgttgcaaaagctacatgaacactatacttggggatccaacataatgctttttttaatggaatatgtctaaaaacttctgaattccagataatccaacaagtaacaacatcagaattcagaaagtacttcgtacctaataggcttatacagctatgcagtaagataaacaataggggtgttccaccccctctcaccgtgcgagatgaaggaggaggagggagggagattaatatagctttttaaataaatgagcgggggttgaagctaataatcagcagacattgtttaaaacaagctgaccagtaccttgaaataattttccacaaaatttggatcagtgagagttgaatgacgcccataatacctaacagctggtgaacttggtgaggctttggaatcttgattattgttgaatgaggcagagggctgagaaggactcctagaaacagaatgtttcacacagctatcatcttctgcgtcaagattatatgtatgcagtattttcgtttccaaagacttttcacttccaatagttggttcctcaattagtgcttgactcttttgatgtgcagtatcatcagactctcctctattttggttcatgtattcagtttcttcaccaacttcagattcctcctctgttagactttctctattatatgtatagtcgttgtcataattaacaagacgagaatcctctgaaacggaactgagtttagtagcaaagaaatctgacagccttggctggttgtcagaaagttgaaccagttgataagggatccctggaatcataaaaatgaactacccagtgagctaaaagcacataacacacacacatgaagctctcaaggcacaacagcaataatttggactcatacatgagaagttcatactcttaagtatcactaccaaaaacatacttcaaattaagccactgtatgtgataaatacataatatcttaatagcaaatctaatttgttgatataaaagctcaatggaataaaaaagaatcatgtcaaaatgaatctaaactagaagttataaacaaaaatacaataatgggcctacaactcaagagtttattggctgcaacagaatctacaacccaattaggtttcaccactgggagccctccactgaaagacctggcggaatcaaaaacttaaaaatcagataaagagaaggtctaaggttcatatatctcgagatttgaagaacgtaaagaacgtattgatatataccggaggttttttagtttactgctgggaagattgctacatataatatgggtgacacgacgccttgaaaagtagttttcaaatcttccaccatactttaacatgtatccccgcagttcctgaaatgtttactttacaattacaaagagaagaaatccatctttctacatttaacaaatccatctttcttaccaaaatttatcaaagaaaatcaagagcggaagctgaagctccactagagcaaatttaaatattctaaaccagccacaactcccgttcatctatatatacatataccaaaaactcctttttcaactttgacccatcaacaacatcagcatcactagcacatcttacttactctagctactactacttcacatcatatatcctactccactactctacaacataaacattaattctccatacacacctatttctcttctatttcgaaaatcaaactaatacaaatactaatgcctcaaattcataaaccaccattatcacttctcagcattttagagaaaaaatgaaaaagtaatcagaaagcaatcaaacctgattggacggaactgtaaacccatcaacaaatatagaaactcctgtaaatattgaatgctcagaactggagccactatttaaagaatttgaagccactccattgaactgattatgaagtttcttattcttttctgccatatagctgcatcaaattttatgagtgggcattcaccaacgccaatcaaattccagtacagtggataaaacaaataaatacatttttaaaaaatcaacataaaataatttaaaattcccaggaaaaaaaaaaggaaatagctttcactacgaaattaataggaacacacaattttcaaacccattcctcattttgtttcatgtcacagaaaacccaaactcacaaaaatgtcaaattgttttccaacaatctatataaaaagcagagcagatatatctaggtcccataagaaattgaaccaagcccactatacagagtaacttttaaaatcatttcccgtttcgggatcatgaattctcaattcacggcctaacaatttctcgaattggcaccagttctaggttaaggaatacgaatgaaatcataaaacgaaattaataaagagaaatgacctgccaaaatcggagaaaggggatttacggaatgaagaacgagaggaagatagagaagttgagccccaagcagcgcctagggttttctggttcttctctttcttctgcttcttggagagatcggaacgggaggaattcagacttcgcttagagttttggccggaagagcccgccgagcgagcggagtcgaaactcatgcttagagtgctgaggaagactcgttggttggtcggtgggtttaatttaagacattattcaaatgaagcggtaaatatgaatatcctaactatatatattggaaagtttaggcgggtattatttgtttgtacccacaaaaattttaggctataaaattataaataaacataaaaaaaaatatttatgaaaattctctttttttatgggtactagtacaaatttacactctaaaaaatgatattattaattttttgaatttatttataaaatatatttaaatatttatgatattataataaatttttttaaaaaaaaaaatagtaatatcattagaggtaatatttttttttgaaaagattagaggtgatatttaagagagaatctaaaaattacttttcggagcaacaaaagttgctctaataatacttttagagtagctccaatgctcgttgctcatgaaacttttgtcagtctaaaaaaagcaatcttgattgcttcactactaaagaaaattgtgtgggctactacaattactactgtcaagcaatggtaggtgaattaatttttattttttttataatttttctatcaaaaaggtgtattaatataatattaagaatattaaaagtaatttaataatatattaaata

SEQ ID NO: 294682 - DNA, 4762 bp, Cannabis indica
taataataataatataataatctattattttctgtgatataccatgtaaaaatgccatttcctccacgtgttactaattttctggcacgttgttgactttaatcgcttagattttgcagttcaatacttcaaccaagattccagaaattcagcaacaaaagaaaaaaaaaaattctctctactgaaaaggtattgaaccaaaaacaaattagaacaaaaagagttgtgaccccaacatggatgaataaatggaaggtataatcttcacaatcataacgaatatgaatcaggttttttttttttttttttaaattctacacttatctctactattaaggtattgaaccaaatcagaataaccaacaagaatgtggcaactggagcaaacataacccttcattgccttaactaatattagcctaaaaatagtaaaaatgaacaaaaagaaaaaaaaaagaagctttacaatttggtcaccaacacaacgtgggtatttcttacaaataaatgggaacaattaattgacaacatccaaacagcccttcaaacataaaaccatcaaaatacaaggacttggctccatcgccttcgtataattatgctaatagaggggttggtaaggtagagttgaacttacattattgtgcaattgcatttcgattccagttttggaggcttcatggtatccaccttattaggaggctcgacactgcgctttaacggttcaacagcgttctcgtcgttctctatcacgctaggaggtttgacacctatctccaccttccttttcctggtgttcttttgaaatttcgaagggcgatggccgacaattctgccatgtggtagatcgtttttgtcatgattggattttcccaatattgtaactgttggctgcgagctttctaatggatgatctgaactttccttgtccagtgctattgttgcagccttgtaggccagatcgtgaacaatagagctgcagaaaagtattgtatctgttgcctcgtcgagagttaggcttcttccctttcttccgttttgacactctaccattatcgttgattcttgttctaataaatatacaaagtatgttagttaccggtcgaaacgaaagcccagaggaagttagaatgaactggtaatttgtcataatttcaatatgcagcattttattatcttgatatgattacatgttacattagcactgattcgaaataggcattattatttcatttttctacgtgtctgtgtttagaaagctgtactaatagagtaatgtgatctatttaaaaacatattaagacaggaatattcgataagattagacatttgaactactagaggtaagagaatgaaaataacaaaaaaattacaatcgaagaaagatcatacctaggatgtcatgtgcctgatcagagtttgtggactctgtagcagaagctgtcatatccttgtcagaagggttaaatggtgaaggctcttcctctgaggtgctcttagatgcaagcgagacattatcactcaatgaaccaggattactgtggtggccattttcagtttcaatttcagacactataaccatggaactatgagttccaacatctctatccatttcatcaccatcaagattagaatgttcctccttacatgaagatcctggagtcatatctcgtggatctagttcggtcgtaccagtggcatatttgggcgactgtacatctggtaaaccacatgcctcgtaatttgtatgcgatgctaccaatttttcttctaaaccaataccaactacaggagtatgaagttcagaggtagagacatcaacaattctgctgtccttgtgttcgtaatcatcttcttcgacaacaaatgattgtgttgaaggtatgtcggtaacatctgctttagtttgctctgaagctaccgaatgttcttgagataatacaaatgtctcctttgaaagattgtattccacagtgcccatggaaacttgagaattatcttcatgtgtgtttgttgaaagagatgacgcttgacgagataggtttccaactccagaaaaagaagggccatggttttgaggtcttgtgttcttgtcatttctgtagtgctccgtgtctgatttccttccactacttaactgccgttgcacccggctatctgtttgtcgggtaccaaaatcaacagaggatgaagtggagaaactgccatgcccgattgagcttctcatgctgcttacactatctttagcatatgacagatcatcatacggtatgctagcggctgaaaaatttctgcctcgaacaacggtccccttgttactgcttgttctcttcagcaatactgaaattcctgcaccctctgaaacctcaaatctcaaatttggatagtcagtgacatgatgcagtttttgacccccagtgtcattactgggcaaaccctgaccaacagctaacgggccatcctctagctgcttggcaaacctaacctctcctccttcctcctctgaccttgcaagagaattttcttgcaagtaactatgattttgctcattgtaagaacttttgccatcttcgacattctcctcatcctgaaaactctttggccccctctcatcagtattttgtgacagctcaggcacagccatagatgtcaaatcatcataatgcctctcttcggtaatgtgtgtagatgacactgggaaggtatcaacaactacagctgtctctagagtagttatcctcaaaagtttatctttcatagtacattctcgacatagtccattgaacctctcctctgtctcagaagcatgatatctgcaaccacatctagaacaaactgccatattttcaatactgtccacttctgaaaaatcatcattaacaaaagatgtttctgaagttggaccaacttctgtgacaatactgtggtgatggaattctccagggtcagcaacaacgaactcagttttagggcctctatcaaattcgacattatttattgacccgtcatcaatttcatgtccaatgacttcatttacgacatccatcttatcaaaggcaaacacttcctcaggaacatcagaaaatggtaccctctcatattcaatagccacatcatcttggttgtgatcattcccttcagtatcaggtgctgcacaagcaccttgatcggaacttgcattgctacttgttgtgactgatgaatttctagaggttaaagaacgatgtgcagaacttgtttttcccacataaaaggtggtacttgggacactggataaaaggggtcgaaacatattctgaggacttttccgatgatcctgcaaagacagtgaagcacattagatgttaacagaatctaggtaacttcataatgagaaggtgtgacttaaacatacatgtcaaatgaacagcgcagaatcacaaagaacgttgaaatttgaagcaaaataaaccaccacaaaactagcccagagagagagagagagcaaggggaaaaaaaccctacaagaatcatgaaagcacttctcaaaggtttaattggatccaaaagattcggcacttctagtcagcacgtgctatactagtagtacagaagcattaagattcacaaaatgttggcaagcggtccatgtagagtaaacaaaaacaaaccctaaaatgacttgatcactcactcaaaatgacctcaaacaatgaatttatcactgataaaaattgataaatgagttcaaatgattttgacagattgcaaatgtatatgtaaaaaagaatgttgtcgatttaaacagagctaaccaacatcaaaactatcaaacattaaatttgacatttcccctcaatctgcaacaaagcccataaatagcattcaatagcttctatcactataataaataagcccaacataacaaacatcctccagctaaagaaataacaaggaaacacataatcaaaagaacagacacataaacttaaaagtgtcaactttttaagaattaccatttgtcgaagagcagaatcaaaagatcttttaggagcagacgatggagatgctattttggttggctttttggcaagggaaggacctctattattcgagaaattagcaactcttcttgttgttgatcgatctaaactacccacatgcatggactgtatagagtcaacatcatcatcaccagaagaagcaatagaacctctactttgagagctaaatggatcccgctcatgactatgagaggagctaacacttctagtcgcagttggtgacattgattgccttctgtaattagaggaagagtcccttccatttcttgttgctggtgaggaaccccttacataacttgcaggtcgatcagcaagagaagtacgtaggtttggaggtgcatcagaggagaacccaggaatattggtttgccatgctcttattttaggagatgcagagttcccccgactgctctttacaggggagactcctctcacccctgatgagggcacgctaccagaaccagtgctcattctacgaggagttggggttaaagatcttgggacaggagtcgagggtttacttgggggagtagatggtcttcgtgatggagtagcatgtcgtaaactcggagatggactggtttgacgagctgatgatggactagattgacgagctgatgacggactagattgacgggctgatgatggactagattgacgaactgatgatggactagattgacgaactgatgatggactggatggtgtgctgatgatgg

SEQ ID NO: 294683 - DNA, 2034 bp, Cannabis indica
aatttaactataaatattaatgtaatgtaaacaaatttagcttatgtggagaagactcgaaataacgaaaatatatttgtagcatgcaagattatgacatgttagttatcataaactcaaaatgatgatgaagaagtctatgttgaagggtcttcctcaatttgaggtctaaacagagaccctatgtgcttgtaacacgactgctttaattgtgtagttctgttacacagtatgcactaatacgtcactttggctatgttctggaatgatgactgaccatgcaaactaacatgagtctttccagtgtactttgtcctcattcacacacttcctgggaaaatttcccaagagctcacccatcctaagattgctctaggtcaagtacacttaattttggagttcttaagtgatggactatcgaaataaagatgcatcttgttagcataggtagtactgtcaatcaatttaagtcctcttcaattatatagtctgttacctacgaatcatcacacttgacattcccaatgggatgtaggactgcacagcttactcggtcttctcctttattgatcacaggactttgactgtaactatcacccccttatggagtctgatgttctcatcgaccacatttccagctaggtcgaagctttgatgccatttgtaatgcccccacttccactgtgtagttccatacctacacaatatacacatgtgcgtcgctttggctacttcttagaatgacaaattgtcctacaaaccaacatgagtctttttagcgtgttttatcttcactcgcgcgtttcttagaaaaactttgtaggaggtcacccatcctaagattcctctaggtaactttggaattcttaagtgatgatcaagtaaagtgttcaagtcttggtatagttacttttgtagtaaaaaagtaattatgtttttacgtattgtggtgttcaatatgatccacttaatctatcgccacttgagtggttacaaatcaaggccaaccagattcaaatgagaactctatgcacaccgactccaaaagtcaccatttttaaaaaaaattccatcgttattcgaaattgacacaacaattagctagtgcaccattattgatgtgtagaacaaagctatacatatgtgccaaccaacccggatagactcatttatttcaaaaggcttgttttaaacataaatgtccatcctactctatgtaaaaatatgtgtcgtgttggtgttgactgattttttagccaactgacgcagagtcgtaataaataagatttaaactaaaaataaataataaatatatataaatgacaccagaatttaaagaggttcaactctgagtgttggtaatagtctactcctattgtgttttatgaatttgggttgcaaaacaagaacaaacttttgagtgcaagaagtaaaatgacagagtttctgctagtaaaaatgaatttcaaatcccttcccaaagtcaagtttgaccctttatataaagaagggattggtgtgtctctcttcaagagacacgacctaagggtctgctgaacccgaaccatctgagcaaatatctcaaccgtttcattttttttctcataattggtttaggtctgattgttttggtgatatcctgttatttttacaggtcttcaactacttttgagctttgagcggagcagaatgtcgtgtgcttgcttatcatgtatcaagcaacacgaccccatgggcaatccctatagtatgtggctaggccacatactccatggggtgaaagtatggggcctagtcttcatccccatgggataggtgacctcgctccacacatagatcctaaagtgaacccatgttagaatttgatgcgtgtcaagtgttgatgtgtgttaggtagagacagctaggcatgcaaacccatagtgtgcggcctggccacatactcccatgggtgagaatatgcggtcgggtaccgtaccaatgtggcagggattttcgcccctatatctgttgggaattattttaccaggatct

SEQ ID NO: 294684 - DNA, 4790 bp, Cannabis indica
tctaattggattggatcgaatgatatttttcaaatctaattactaattagattgaatcggatgaagaaaaaaatattggattggatcggatatccacccctaactctatatataaatgctaaaatgttgttgttccaagtttcaacccttgaccaccactttgcccaaagttttggttatttatatgaacttaaaaaacgtaaaaagacaaattaattcagaataatgaactataaaaataggtattttgtttagtgttaatttacatattgaagtttcaaactcaattggggatgtagctcagatggtagagcgctcgcttagcatgcgagaggtacggggatcgataccccgcatctccataattgttttacaattttgccttgaattttaaataataggatttggaaaaaaaaaaaaaagtccattaccatgatggattaaattttaaattaatctaatctgtacaaaatacctttttttcatttcttttcactacacttgcaaatgcaatcattgttctataatttcttcttcctctttttacatactacaagataaaataaaaagaatgataaagctagtattatttctctactccgaaaagctcaaacaccttactcgcgtcccattcttagctgcaaagctaaatctggcagttggtgtggaccaacctgagcaactaaactcgatgaacttggcacgccaaaaccaaaatttggctcagttggaaatggatgagaattctgattgtggtgccttgttaacccctggaaagatgcatatcttgcaaaccccatttcagctgatctaaaattggcttcatttgaattggtaccagttataaacacaggactgatagcagtgttgctagctgaggcaccaccaatataagaagcttctgaaatttttgccggagttaaattcaacattgcagtggggggtcttaccatccctgtttggggagtgtacgagatggccctgttatttggaccgttgatgcaaaattgacttgaggaattttgctcaatttggaaatgtgtggttgctggactcatcctgccacagtttgaattcagtgaagtcaattcactttgggtgtttatagtcaaatcatcttgtggaaaccacccttttgcaacaattgaatttgagccagacatactttgaggtagaggaggcctacttgcaaggtcaccatctgcatggtttaccaaccacttcttacaaaataaatatctttcgttatctgatgccgtgttccatccaggactgaacttgacttcaagaggaatgatagcttcaaattttctttaaaacaatcttccaaacaacaggcccaagatccgctgcaaattgagctatgcttcttgcataactacgctctaagtaagcatcctctacctattaatattttaggattaaaaaaagagtaaaatgtcacactgtagacataccataattttttctatttcaagtaacaatgacacccaacctttatacaaagtaataaaccaccatttcaccatgagttgttgacaaaaaaagcaaagacatttagcctaaagactaagaaatttcaatcatttctatatcgttccttctctcagcccaacattaaattaagttgtttaccattccaacggtagacaattggaagaaatgtggaagtttagccatttacgtacctcaactaattgcttttgttctccttcaagagcagccaaggcaaacgtcccgcaagcagaagtcaaaggaaaagtataagtatctcgcttattctcatcaatagaaaaatgtttctttccatactttgccacacttctcaataccgaagctgaaaatcaagataaaacaatgcactgtgaatagaagaatagaactaaccaattacaatgtaaaacttagcagaagatatggaataagaacacaaagctattgcaaaagttacctggaaattcgttctcccagtcatacaccaagctattaccggtctcaccactcaaagacgcgtggaaaacctcagcagaatataatttgttgaaatgtgggcctttccttagattgtaagcactgaaaccattgctattctctcctactgaaggatttgttgaatctaaaatcaatttgggaccaacattttcaacagaaatgtcgattgactttttaagttttttgcccggtggcctgcctctccttgcaatttttggctgtggttcagtttcatcgctatcttgcttcagattctcaaagtcctttcgtgcaagctcttggatggatcttgcctggaaaaacaaaaagaaaaagtagaagaaaaaggtccaccttcaggtatatgatcaaataccccaaataagaatcaaaacataagatgaaccaggagaaaacctgtcgaaagtatattgtatcggatgaattatactccattgcatttgaacatattagaaagacgtctttctgcaaaaatttaaatggtaaacctttcaaatttcagtcacgcagcctaaacatatctagttgtacataaagaaccaacacagacctatactaattttgtttttgtttttcattgatattactaacgtgatgagcaaaatcaaatgagcccatacttagattgcagttcattctgtttcttgccccgctttctttccatacacattcaattagtactccaaacattagagagaaggagagaaacaaaacgagctaccaagattattagtgttctagtccattctattatctagtgatgaaatattgttaccatgttctacaccaaaaaaagaaaaaagtgatatagaaattgagtgaattgcaaacacttcactacagaagctaaacaaataatatttgatagaggcaatagaaaaagacagtttgatggaatccaatcagatcagataatttgatagaaataccaataaaagacagattatgccaacaaacaataaccaaatggttaccaacctcaaatagttccaaattagcataaagtccagcatcaagtttctgcctcacagttgcaaagtccattgggttatcaattatttcatgataatcaggaagctgtacaatagataatatagcgatcacgtcaaccaaaaattcaggacaatttttatgatacacaaatacaaagattgaactaaaagcacctcttccggatccacaggctcagagaataccccatgagtgtcctttctgcataacaattcaactaagcaatcaaaattcaaaccccagttaaattcttatatcaaaagatagaaaagagttggaacttaaaaaaacacacttttgaagcctgtcaaggatgaacaccaacaactttttgtctggcaacggtgtcgtgggaccggtctccacctgcaaccctgtccatgtccacatataattgcaattccttatacaaaaaattccccacgagattggttaatagtgaaaattcaatatatacataaataaatatatatatatatatataccatgtatgctattgtctgtcgctttcaaaacatcatcactctgcaaaattaagattaaatcaatatcagtgaagaaaaaagagcactttacaaatataatcaaacataaatactgttgtttatggccaagagaagaaatttataattaaaaaaacactaattcaaagtggaaacaggaaaagtaaccagtaaaagagccaccagacgcagaggaggaagtacatacatgtttaaattaaaaaaaaaaaaaaagaaggggaacagagaaataattaaagaaaagacaaactgaaacttttcagaccccaaacctaaaaaggtctggtattcaataaagactataagataagagaatatatatataatatttatatattgaaagaattaaaatagggagtatatagtatgtgtatatataaatttatatataaaaaactggaaagaagctcaaggtttgaatttaagatttgtataaatttaaatattgttatccaaacatgacctagtcaagtacacacatgtccacacacacactcacaatccaacaaataccacagaataatcaataatttcaggttacgcgcgaaatcccaaaaatctaaaaccctttcagcaaaataaaaacattctctggaaaacgacgaatctttgaggcttaatctttctgaaggttttaattaataaataaatacacaaccaataagcactagcaccggttcggagtttttgatctgttttaaattctgaaaacgcaaagggaaattactcttgtggggaaaaaacaaagaaagtgagcagatatcaccattagattagatctacgcttcttggaatcaacattgaaatcttcttcatcatccacattcgactttaacggcaggttatagcaatcggaattcgagttaaggccaagtagaagcttatgcttcttctccttacgctcgtcgtcatcgtcgtcagcggcaataaattccggtgagtcaatgttagatgtccagtgagaagatcctgggttagagtgagggttttctatctgtcgttgtagctcttcttctctttgttgttgttgttgttgtctaataaagcgtttttggagatctatgagggaaggacggccctttttcttcttcttgtccaccttcgtcatcgtcgccgccgtcgtcatctccggtggatgatgcctcctcctcctcctccttctcagccctttgttctagtatctactttttctctattctctaaagtctagtggcactctattttattttattcatttttttttggctttttctaaaaaaataa

SEQ ID NO: 294685 - DNA, 8501 bp, Cannabis indica
atgaaataaagaaagaaagtgaaattttacttttttttatttttttataataacaatctcagggagttccatatcttcacgcacacgataaaagcagagggattataataaatatgtgtatattataatatcgctattgtaattgtgaagtgtatagctagtgtgcagtgcagacaccttaaaagattccggcggcgggtgattttcggtcaccgtcatggattcaggcggcgcaactcaggtcaccaccgccggcggggttcagatccggcaaactagaaggttgccggattttctacagagcgtgaatctcaagtacgtgaaattagggtaccattatctaatctcgaatctgttgactctgtgtttcattcctttgatttttgtaaccctaattgaggcttcgcaaatggatctgggtgatttgcggcatctgtggcttcaccttcagtataatctggtcagcgtcattatatgctctgctttcatggtttttggtttcactgtctatattatgtctcgtcccagaccgatttatctcgttgactattcctgttatcgtgcacctgatcatctcaaggctccctataaccggttcttggaacattcacgtctcaccggagactttgacgaatcgtctcttgagtttcagcgcaagattttggagcgttcaggcctaggggaggagacttatgtccctgaagcgatgcacttcattccgccaaggccttccatggccgcagctagagaggaggccgaacaggtcatgtatggtgccttggataatctctttgccaataccaatgttaagcctaagaatattggcattcttgttgtaaactgtagcttgtttaatcccacgccttctctttccgctatgattgtgaacaagtacaagttgaggggtaatataagaagttttaaccttggaggaatgggctgtagtgctggggttatagctattgatcttgccaaggacttgttgcaggttcataggaatacttatgccgttgttgtgagtactgaaaatattactcagaactggtattttgggaacaagaaatcaatgttgatacccaattgcttgtttcgagtagggggttcagcggttttgctttctaacaagtctgtcgataggaggcgagctaagtacaggcttgttcatgttgtcaggacccatcggggtgcagacgataaggctttccgatgtgtttatcaggaacaggatgatgctgggaagaccggggtttccctgtccaaagatttgatggcaatagctggaggagctcttaagacaaacattaccactttaggccctcttgtgctccccattagtgagcagcttcttttctttgtgacccttctggttaagaagttactaaactcgagtatgaagccatacattcctgatttcaagttggcatttgaccatttctgtattcatgctggaggaagggctgtgattgatgagctagagaagaacttgcagcttttgtcaatacatgtagaggcttctaggatggctcttcaccgatttggaaacacttcatcaagctccatttggtatgagttggcctatatagaagctaagggaagaatgcgaaagggcaatcgggtgtggcagattgcatttgggagtggtttcaaatgtaatagtgcggtctgggaagcgcttcagagagtgaagccttctcgaaatggtccgtgggaagattgcattgacaagtatcctgtgaagacggagttatgattttggttaattccattcaggttaccactcgtcactactatcttttgctatgttagccctttgatgttgggtttttaatttgatactaaatgtgattcatgttttttcacccttagattctccctacgtataatatcataatacccacattatcatttcagggtgctatgatgtttagaactgttgatttcgtactgagatcatgttgcctagttgtcatttgctactttcttttcttttgtttcttcttctgtgtaatatgtcaatgataaactggtatcagaagtccttagccttctcttttgtacgactttagtattttttttacatttgatcacgcttgatatgaactcaaaactattttgttgagcttacacctgtgaattgtgatgaacttctgttagattctagggatattctttttttattacgaaaaggtagagtgaaatttctgctgtatatctgccaggaaagaaaattaactggcagtatatgcaacaaattacatatacatagtggacctcctttttctgtttctaccttcgttggctttatctgttatgacctatacaaaatgtcctcgcagaccaacttttaaaacttgtggtgagcattattatttgttttctcaaatcctttcatcacacaattattgtttttgtattgtgctgcgattcagtcttattaaaaaagttggtttggaaagttagttcccttttcatctgtttgtgtttaaaatgtcaaaaatctcccaaggaaagcaagtatttatttaccaaggcgtaatcatgaatgatgttttcactggcattagttctccctgttagtgttgtaaattcatgtgtgacgtgatagtcccccttatattttttggtatagaaaaatatgatgccaacatttaaaggataggccccctatgattcggtattttcgtgttgtacttttctatatttttttacaattattaataagctaattactaaattatatgtatttcttaaaatttcaattatttttatataattttacagaatgataaaaaaaattattagaactattaaaattttaatatttaaatattaattctcaaagttttaaaattctacaaataaaataatataagttttaattttacatttttttaataattttaattataaaattataatattcagttatattaagatttattattattttaattcatttataattgacattattattatagggctttttaatgtgttgtacatgcctttccaaacttgtcatgtcctgcctttcgagtttgtcgtgttgtatcgtgttttgaccgtgtttgtgctgatttcgtacatgtcaaaaaatctgacccgcatttagagcactactccctctgtaaaagagtatccatttgatgcctaccggtctatttttatgaagctacctaactctttcttttattatgtaattgtagtcacctaccaaactctttctttcccctcgttttactagtgttttttttatcagaattatttttggtttttgcaaccaaaaagaaaaaggaattattttggtggaactaaagaaaacacgtgtaatttgacgtgattctatctttaaagttgtgttaagcataaccgtctactgcattttaaaatagtagatcagtactatgaacatgcataccactaccctcaaaacatgcgtaccacctccagaccaaccattccaatttaagatttagctgtttgacctctgtattgtgaccgctgtttggccttttcttttgatcttatttgtgtagatgaatgaataaaaatgctttgaacaagattgaattaatggacagtatcttttttcacacattattattataaccggaacaataataaatacggaccaacccgttggtgactgaagaagacgccggtagaatgactggcttctctccaaatcaggaagagaaggaaaagggaaggaatcctcctctatctaaaggaagactgaatctcttccaaagttcttccttttgtctcagggaccaatttcgccacaaatatcacagtgaaagcactcactatcatgtaaatggtaaaggttcctgttgaagccagcaacatctttttaacgtattgaacacaaaaatgggcagatacaatgagacactataacgcggacaagaatggtgttccacgcagtagtcaaattcagatataaatatatataaataaatattcgtatagagtgacacacctccactactccagttcaggagcaaatttgcagtcatggtgaccacccaggcagtgaaccagttggcaagagttgctacacttccagctagactttttatattgactggaagaatctgtgttgcccaaaaaaatgaagcccattaatagctgcaataacttgcaagattatgttcttatagctaggaacagttgtcaaaagttttacaataacacagggagaaaaagtgaccaggaatttatacctcagacattataatccatggaattgctccaacacccaacgagaaggcaactaccattgcctgaaacacaaatgaaagtgccattgtaaagacattttgaaaagacccaaataagaaatgctccctaaattgtgataaaatatatacataccacgaccccaaccacagataggatgctcattgtgctatacaaaccagaatcgctcgatacagcatcctgtaaacagttaaatggaaaaacaaaaatttagatacacaagttaactgtccgaacaaatatttcaagaaacaattaggttacctttagatagaatgctactgctacgacaaggaggctaagtgtcattccagcagaggaaacctgtaataagaagtttaaaacttgtcatttgcacttcccaaaatagatacaaacaaatgattacattatgcagaactccaactcacaataaggagaagcctacggcctgccttgtccaccaaccatgtagtcacaagagtagccaatacctaattgtgcatacaaaatcctagttatgattgtgcaagtgcaacaattgcatggagcgaaacactcagattactctctagttttacctgaatagccccaagaccaaatgttgctgcattacctgatttcacccctgttcaaataatggtgcctataagaaccattttgaagtaaaaatctaagttcacaacaatacaagggatgcatatcccaaaatgggcatattttttcaaagtatggatgtaaggatttaagctcaccagcagcttcaaaaatggtacttgaatagaatagaacaccgttgattccactaatctgctgaagcacaagtaatccaattccaatctgagagatgcataaaagaagttaggttcaaatgaatgaacttgtatcgtatgaaaattcaggtcacaacacgagcacatagaaaaatcaatcttctggaaaagagttaaaaccgtgagaggcatatagtatcgtctttgcttgagttctgcaaaattaattgttgaccttttgcttgatgatgctacagatctctacacaaatatgaaaccaacagttgatttcaggttagatgaaatgcaagcattataatgcataatgctgagcttcctcaaggaaattgaatgtatgaaagggttgcaaccttgatgtcatttacttcagctgaaatatcagcatcaaaaccgcgaagaacttgcaaagagacctcgaaatcatctgtcttgcccatttttgcctggatttaggtccaaaagaatgcacagttaaaacaaaatcaacatatctaatcatgattgactgaaaagccataattcaatgcaacttacaagccaccgaggagattctggaataaagaacagtccaggaatcagtattatgcaaggcagtgctcctgcaaaaagagaaattgttgaacagttccctcaactttgaaaagccttttgtttgtttgtttggtttttttactaaaaggcacttattttatgacttaaaaggcttcatcaaaagttgatcactaaaatcttttcttttgattatactgaagttgattaagttgtttagattatagtgaattttagcagcgagccttccctcttaatataattttcaataaatgattgtttctttgatttaaggattacccaaaactgccagtattctccacggaacaaaaagtcccaacaaataagccagcattatgcccgcagtgacagatagctatattaagaggggaagggaagaagaacaaaaaactcagtaatgatacatcataaaactataagactaaaaaattatgaaatacacaagtaagagtaagatcattgaacctggtttactgaacccagactgcctcttaagttttgaggtgatatctcagctatatatacaggtacctgcaaaagccaaagttattgagaagatagtgttatttacaagcacaaatccaaattgccaaagacaccaacttgttgaagcaaaaacctaccacgtacgagattatccccacaccaaacccttccaacaaccttcccatgtagagaaatgaagaatcctacaaaaagcaatgaacacaaataaaaatataaacgttcctaaccacattttgcatttgtatgcagttggtgcaaaaaaaaaaaaaagggatagcttttcaaacccactttggcaaatgatatggcaagccatccgataatgttaggaatcgcagcgatcatcaaagactgagattcaaacacgagagagttaaaaatgagtaatcaaattccgcaaaggcgaaatatttatttgaatttgcttcaaagagaaggataaattgaccaatgaccataccccttttcgaccaatatattcagatatttgaccgcttgctatggccccaaccatggcaccaacattggacaaagagccaaacagagaaaactgaccccaaggatctgttagagactaaaacagtagaaggccatgtattcatgtaaattctaaagcaaatgagatccaaacctctgacactgagagtccaagatccttggtgattgcagcttgggtaggagaagaaaaaccagactgaagaatttaaaaatataaataaacagcaaagaaaatggaaaattaaattagtgtgagcaaaatcaatctgaaaaattatggttaccgtgaatccaaattggataggacccaaagctacaataagaacacaggcgacgacggagatggagctgtcccgaatggcttgagttgagcccatcatactggattgccttgagcccatacgataccagctgccagtatggagaaagggctttctaagatcccttccatcgtcactatcatccctgaaactcattctgtagtcccgcttttgagatcaacgagaaagtgtttgagaagagagagttttgaagaagaattattatatgtttaaatagggagaaagcagcgtcttttcatgtttcgtcgtcggtaaatatatatatatataaatacatgtctgtaaatgtaaaattattgtccaacgcatgcgaagcgaagcagagcagagccgttttgttagtgtttgttttgtttaactcctcacctgaattcttaccttacctggctgcctctcaccagtcacgaccttaccgtgaccgtcaccgtcacccttagttggccctctgccacttgtaccatctaacaaacggctacaataacacaccaacccaaatatatcttcatcttcttctttctttctttcttttttttttttttggatttttttttaaagataaaccaaatctaccatttaggaaaattcattggttggagcataatttttacttctattattgcttagtattttttttttagtataattaagtatcaagtctcatgtaatttaagaaaataatttgtagagaatattattaactaatcttagagtgtcatctataaaaaatgttgggcaccactatactaaataacaatgctctaaaaatataactatatagaaaaattgtaatcaataaaaatcccgttaataaaagttatttttagcctcttaaaacaaaacacataagcaagatgttattttttgttaaattttgcgaagcacctaattattatcgataattatattttaagaagtcctatcgataaaaacttttttcgcccattgaatagacagtacgtgtgttgattatttgaataattaatttatttaatgattttatgtttgttttcttactctaggacgtaatttattttttttttatttagaaatattaacagtaaaactacttaaattatacatttatggttcgtttgatacgctgtattacaccgtattatattgtatagtattatactaaattatattttatgcaataattttatgtaaaattatatgtggtattaagttttatggatacctaaatatatgatattttagtataaattaaagtttaacacagtattatataaaaatatgacatataatccaattcaatataatacaatacaatacaatacgatctaatacgacgttccaaacaagcccttagtgtactaaatatacacgtgccatattttagtagtccacatctttccatacttgtatttttttaatgcctaagtaatatgttaacatcatttagtcaattcttagttttggtgaagtcaatcacaagttctcggagatgttgattttctacaaaattgggtagattcgaaacttctcgatttgcggctaatttgttgatattccacttcgctaaaaa

SEQ ID NO: 294686 - DNA, 2363 bp, Cannabis indica
gtattcccaacgactttttaccaacgaaatatcctcattgactcgcgcaatactgacgaaaacaggggtttttaccaacgaaatttgtcctcattaatgctcatttttcttgtagtgacatgctttgaagatatgagatgctaatgaatcaggtcttgtagtaagttaaaaaaaaaaaaaaaaactaaatgattatgtgttacgttgtttagttttatagtatatggataaataaaaatttcatttatagttataagaattgtgttttgaaatgatatctgaacaaaaggtgaatttgatgaaatcatcagttttcttcggcattaatattaatgatactttgaaagaatctttgccacatgttacaaaaatacaactgaccaatgataacaatttgtactttggacttccaagcactataggaagaaataaaaaagtagttatagaatatttaaaagagcgtgttcgcaaaagagtaaggtaaatttcttttgaaagctggtaaggagattcctgttaagattgttgctcgatctttgcccagttaggctatgagcgtctttcttctatctcttgatattagtagagatattgagagcttgatgtcaaaattatgatggcagtcctctaataattcacgtcgtagtattcactagatgtcttgaaatcgtttatgtaagcataaaagtatccgcgacatggatttttgtaacttaaaaggttccaacattgctttacttggtaaacaaggttgtcgtttcctcactcgccctacttctttggcttctcgcatttttaaggcaagctatttttccaatgagagtttcctagatgcttagcttagcaacaatcccaattttatttggcgtagcatttgagaggctcaacatgtggtccaaactggggtaagtcggtaaggtggttaattggagatggaaattctattaatgttcttggtgaaccttggctgcctgagaacatttaaaaatagcatataatctcctccaaaactttatggaatgtggaatgaagatatggtcatttgctttttgaaaaggtttgtggaagttaaaaataacttccaaaagttaagaatttaatttgaaggactggtatgagttgtcttaccaacaatgctttagcttcgtactaaaagagtggatgtgaattctttgtgcacaagatgtcaattggaggaagaatcaatttcccataatcttgtaacttgtactgagattcaacaatgttagaaccatgtggggattggtaccatcttagctcctgatgctggtcttttggacttgtgcatggaaattaccattgattgaaagtatcaaagtcacttatgctgctttgtttgaggaaggtcaaagcattggttttggaatgattgtcagggactcaaatggcttactaattgaaggttgtatgaatttttttatgaaatggtagaacttaaattggctgagacaattggtgctcgtaaggtgctcaactggatcaaaagtaaataatgctagcaggtgatattggaaacgaattgtttggggggttttgcaagctttaaaaagttcttcaagtatagtttcagtctttggatatgttgttgaaggctgtaaacttttgttctatgttttaagaaatatttttgcttaatatgttaaataatcaactaatatggtaagtcataagtttgctaaaacttctatattatatcttggttgtgcgtcaagtttcaagaataagttgatgattaataaatttagttttttattatatatattatttatttgaacatatatattactataaaatatatagtacgtgtgaaacattattatatacgaagttgaaattatataaaaaagaatatcactaacatagatgttctaaaaatagtgctataaatacgggtcaaattttttgacacggcacgaaatcagtacgaacttaaggcatgagcacgactaggcacgaaaaaatatggacttggacaggacacaatgctacaaattagcacaacacaacacgaacaatgagattgagcttgacacggcatgagaaatatgggctttaacgcgacacaacacgacaagtccaaaaagcatgacatgtaagcacaaataacctattcagaaagtgagacatgttcaaaaccttatatttgataagagtaatttgcagtataaatacgtaaatttaactccagttgtaaataaatacttaaatttaatttttgacggtaataatacctaacctatatttctaaaattttgtaagtatctgacattaaatgttaagtcattatccacgtgttattttttattggtacatttaaactatttttttccaaaaaaaaaaaa

SEQ ID NO: 294687 - DNA, 7631 bp, Cannabis indica
ttttttttttttttttggaatagatgggcggggcaaatggaggaagcggcggagagaaccccaaatcaatcggaggctgaagcaggaagacgaggaggaggacgaagacgacgccgttccagatgagaatcttgaacaacaacaggatcgtgaggatgattcagaggatggtgtccaacctaaccctcaatctggctcttccgcacccgatccctcttcttcctctcaagagagtgaggtctctcccgacggtgtggttcgttgctctgattttccacctgtcatgaggcgcatcttgaatcgccctcacccttccgttatggccattgttgctttggagcgagctaatgagtttggggaaagcaagggtcaaggtcagggaagctctttaatgtttttggagaatgtctcgcacgggcagcttcaggctttatcggctgtgcctcctgattgccctagtttggatcaggataggtccgatgggggaaattcggcttatgtggtcactccgcctccgattatggaaggccgcggcgttgtgaagcgttttgggactcggtctcatgtcgttccaatgcattcgggtttgttacttttactcttgtctttctgtttagatgggaatttggaagatgtgatttctagtgaacaaaactttctgttatcactcgtggagactcatcactcatttaaccttttcatattcattaggaaagagtttaatttcatttcactagttgtgttcatcttacacttagtgcgtttaattcatgacagaattgtaatatttatatccttaaaaaaatgagcttaattagtaataataggcttgtttattctttttttttttgtgtgtgtagacatacatgtaatgaatgtgttttcttttggggttttttgtggcagattggttttcacctgctacagtgcatagactagagagacaagtggtgccacattttttctcaggaaaatcaccagaccatactcctgagaaatacatggaatgtaggaactatgttgttgccaaatacatggagaatccagaaaaacggttcactgtgtctgatttcgtgggagtgatacctggtcttgaaactgaagatttaagccgaatagttcggtttcttgatcactggggaataatcaattattgtgctgctgtatcaagtcatgagccatggaatagcagttcctacttaaaggaggagtcaaatggtgagattcacgtgccatctgctgcattaaagtccattgatagcttaatcaagtttgaaaagcccaaatgcaagctcaaggcagctgatgtttattcatccctttcaagtcatgacaacaatgtctctgatttggacaacagaattcgtgagcatttatctgaaaatcgttgcaatagttgttctcgatctctacccactgtatgctatcagtcacacaaggaggtaatcttgattttaactgttatttgaattaaaatgataaaaactgtattttttgttgggtatactatcagtcaaacaaggaggtaatcttgattttaaccgttatttgaattagaacagttaagttttaaagctgttttttaaattaaaatgataaaagctttctggctagtaagacaaataatatgggtgttgcaaccttctttttgttgaaatagtattttttattgggtaaccattgcatgttgcatcttatatgtttgaattgtataccaattgccatgatatgctgctaccagaagaacgtttttagtaaacaaaatcgtttagaataatgaatttttcccagatgtagtgaagtaaaaacccagataactgcattttcacctgtatatttgaatgggtaattttgacaagtgcttaattttgatagtttataagccattcattaacaaggtactaaaccttaaaaattatgtggtgaaggaggattcatttatttactgagattggcaatggatggcgctttcatttattacaggcttatttgtatcttatgtatcaggtggatataatgctatgctctgattgcttccatgatggaaggtatgtgattggtcactcaagcttagattttatgaggatggattcaacaaaagattatggcgatccagatggggaaagttggacagatcaagaaacgttgttgctacttgaggcagtggaaatgtacaatgagaactggaatgaaattgcagagcatgttggaactaagtctaaagcccaatgcattcttcatttccttcgcctgcctgtggaagatggccttctggaaaatattgaagttcctgggaatcctatatcatccagtatgtcaaatggagctgttcatggacaaataattgcaaatggggattcagcaggtcttcttatttagttatggttcttagctaatcgactaaagggaatgtgtttttgacattgtatgtctttcatcttctctaggatcatgccaacaagatgctgattttgaaagcagattcccttttgccaattctgggaatccggtcatgtccctggtaggtgccaatgttcacgtccacagttatagcgcaagctgataaatggaaacaatagtagaattgaagacaaaatgacataaatataggataaattgtcacttggcagtcctttatgtagacttgtaggttaaaagaatagggttaatctgatttattaatagatgatactgcagaatatggcgacaactggatattttgctagactttgcttattttcctgccaagcgctgcttaatgccaggaacattttgtaggttgcctttctggcttcttcggttggcccaagagtcgctgcagcatgtgcacatgcatccttggcagcattgtcggaggaaagtagtttatctgcatcggagaacctgttacataaggaaggaccaggacagagtaataggtaagtgtcttctattttattgttttacagctaaagcgttaacacctttgttgtgttcgtcttttagacttgtttccttggcattttggctgttcaattcttggaagtaaaactgtttgcagttctttctttttcaatgttgctatttatgcagagttgattcctaatgctatacaatgaaaaagtggtttcctattctcctagttatcaagcatcaactagttgtctttaactgcttgttaaaatgaactgtaaaggaacatcccttggagtggaggaattagtgaaactagttatcaagcattaactagttgtctttaactgcttgttaaaataaactgtaaaggaacatcccttggagtggaggaattagtgaaacaattcacttgcatattattgtttctgtctgcatcacgcttattggcaaacttgattcagcacataatttaagttacttttcatgtatgaaggatgaactcagagattattcatggtagagatggtggccctcagggagagattgcaaattcagctcaccataaaggtacattacgagattttcatcccctcttcagaccagtgcccttcttttccctctcaactcatttccataattttatgggttatataatatgaaagagaactcgacagctgttgcttcaaggggtcaaaatgaaggggctactccattatcagcagaaaaggttaaagctgctgctaaagttggcttggctgctgcagcaacaaaggccaaattgtttgctgatcatgaagaacgagaaatccagagactctctgccaatattataaatcatcaggtattacaatctgtaaatagaagtttattttttccttcccttattcactcccttgttcacttcctagtttttttttccttctctaaataattaatattctaataaatgtattaaccatgtacatgtacacgtatgaaatttatttttaaccaaattttatctcgtaattcacttatttcctctgcatttcatgtattaatttccctatgttgttttcctttctctaaatgaagatggtaataagatatgtgcacacacagaaatgtgcaggtggtaaatttgttctttcctcatttcatttaataattgcttattttgtttcctttctcttaatgaagacattggcaattgatatgcatgcatgaagtataaaatactgcttgtgcctgtcgatgtttgatgtgttgccattttagatcaataagtgtggtccaattatttgattttcactgggaatcgaaacacggtagatgtcaatgctcccatcaggactgttttctcttttgtggttgttttatacctgctgtagtttcttctcagcaacggtcttactagttttgcatcttaattatcatcatgatacctcacatgtcactgctgattgggttatatctttatgatgcaccaatcttttaaagggaattaaaactttgtaccatctctttgctgtgaaacctattattacagctgaagcgattagagctgaagttaaagcaatttgctgaagtggaaacattcctaatgaaagaatgtgaacaagtggagaggacaagacagagacttttggctgagcgatctcgttttatggcagcacaaatgggagctagcgggatcacttctatgactctaccaggagcacctggtccttccatggttaacaactcaggtaacaatagacaacaacttatgtcagccgcaccttcacaaccgagcatatcaggatacaacaacaatcaccaaccacaacaggttcatccccacatgccattcaggcctcggcagcaaatgtttgctatggggccaaggatgccgcttggtgccatacagtcaccatcatctgctccaaatgtcatgtacaatgcctcagggaatccccaacctagtatgaatcatccgatgttaaggccagtacctggtactagctctggtttggggtgaaaggaaattccatgtaaatttgattagcatttctagttattccttttttggctgcttgcattctgcgacgaaaccaaaaggattatggactgttcgttcatgattcatctgcctctcatcgatctaaacttaaggggcagcagtttgtagggttttttttattcggcttacaattagctagaatttagcttaggtccgttcaaagatgaacactgttagtaaaaataaagtctgatattgagtccatctctatctctttccccttttatcatatttttgctttgtttagtgttctgttcccttcatttatatgagtattgattctagaactgctttttagagtgatctttcaaaaattcatgtaatttgtatgttgaatttgttatcatgtattagtatgcagtaatgtttaaaattgatatggactatgaaaaattaacatttgttttaataaattatctaatgtaattatcatttgattagatgttaaaagcaaaatgctccagttttgtgtaacactacgtgaacaggaacttctagcaatgtcatttgttgtcgtaataggaatgtcgtcactgtctatggcgataatatatcgttgtacaatggactttgtaaggatgatttgtagttacaaaccttgtaatttatgttttattaagggtgtctagtaaataattcaatctgaacaaccgaattcaattcaatctgcaaagcgctaatatttgcactagtgtgtttattgcgaattggatgcgttttttcccctccaacataaaaaatcttttgcgctttctttgatgacgatacaggtgcaaaagtactcttctcactcggatactcttcttgaaaaaattctttttttctttgatatccttggtgtaacttaattcatatcgaaaaggctgcaattctgtaacttcctaaatttatataaatatgtatatatatttattcaactaacccaacaaaaatttgggtgagttcttatttttctccagttggtatactatagttgtctcttattcttaaagtaataatgttcaaggaacaaccaaacagaaagaaacaataacttggtcagacccattccattccctttaattaactttcattgaagtgatcttatcgttccatatatgtatatgaactatacacagatgtaagttttagtttaatttataatcatattgcacgaaatatcgaaatatatgttatggatatatacatgtcttcgcttacccttaattatcactcaccctctattgcaaaatgcgaatagggacaaaacatagtattaggagcgacgaatattattcttaaaaacttttatattagtccctaaagtatattaggagcgactacatgttgcctctaatacttggattaggcgtcactggttggctgactgaaattgttataggctcgaaattacctctattgtttaggatgaaattgtctaagtcgattggttggttattttgtggtgggataaaatttctgtctcaattctccctcctccaatttaaatcatttcaaaggtcattttcgagcttgggtcccattctttagaagattgaatctgcttgggtcttctatctagattttcgccggttgacatttctgaccttggaggattttcgtcattgtgtacattattctagttatcattgctattgttgggcgaattgtcttggcgattacctcgctttcgctaactatttccatcacgggccaactctcgacctcgtcatcagtcctattagaatacgtttgcccactttcttccttttgggatcatgttcggccttgatgggttgttggtcattatgcctattttgctcgtacacttggactctttcatcaagatggtattggataacatgcccgtgagatcctcctgcttgcctagtaggtgtatcttccctccttccttccagcttgggtcaaaaattgtcctagttgtctctttcgatgtagtgaccaggtaatacttgttcgccaatgagatggtcaagattctactccatgagaattgagctggtggatccgtccctcctgggtagttgcaagttattggttagatgctcctctggtctatgcacgtgccctgtttgggatttacaacccttttcctctgttcttattctgcctgggtgattgaatctcaatcctctgcccccaatctgttgggtttgattttttttttttttgctaggctcgcatctcccgggtgttgcaatccatccattcttgaaactcttgtcgcttctggtcgaatgcttagttcaccatcgcacgggtctcctcccggttgtggtcgagggtgttagtgtgattctaaacctaccctagaacttttctaaggttctccaactcagagttgtctcctaggtccacgcgaggttctccttcaaatggttggcatgtcccagctctagtttcttcagtgtatagttgcatggtggtccttgactcctagacgccaaaggtgaaccttgccaattcggtggtaatccagtggtagtgcttatcgtgctcttaacacttgtagaaattagggctgaacatcgggtgggtttaccgggtttcgggttggcgggtttcgggttcacgggtttcgggttcaaaaaattgaaaccgaacccggacccgaatagggcacgggttggcgggttggcgggttggcgggtcacgggttggcgggtttcggttggtcgggtttagcgggttggcg

SEQ ID NO: 294688 - DNA, 1269 bp, Cannabis indica
aaaaaaaaaaaaaacctattatctaaaaggaaagtagggggaaaaaatttactaattgatcataaaagaggtagttaaaaattaaaaatagtgttttttttagttctttcttttctgactatcccaacaagataaaagaagagaacaaaaaaaaaaaaggagtaaaccaatccaagtaaaaaaagaaaaggaaagaaagaagaaagagaagacgggtaccatcaaatcgctcttcaaaaaagatttccgcaagtgaagactgaaagagagagaagagcagtgagagagttaatgccaaatattgcatattacaaaagcggtccgccattggcagagagcaatggaatggtgctaaagagtaaagagtgaagactataaagaaaggttcctaattatagaaatgggatcaagagaaagcccgtacttctttggcttaattgcagtattgcccttcgtggaatatatagctacgtgttgttgattatccaagtcaagtagtcaacttggatttgtaatgactaatgatgaagactacattcccttagtgccattaaaagtgtttaagccaatgaaagaaatacatttttgtctccctctatgtttggaccaatcaggaaccactgaaacgtttcattggccaatcatattgcttcttacaataacacaaaagtgaccctattttcatttcatataaaagaaaaactagtctttaaaatggtgtgtgtactgtgtatttcatagtcttcgccctttacaatacgcaaaaataaaggtggtagacatgtaagtttgttgggcaaaatgggtattttgcaagaagacttgggtcttctaccggtagttgacccaactatgtttggaaactttcaaagtctctccctttagaagcttgaaaagtattagagcataaaactaggaagatggctgtgccataattattcatgtcccaaaaaaatgagtgtattgtagagtttgaaattgagctccatttgtttattttggcattctagacagctgcatagaattaatcttgtttgttttgactttttggaaattttcacttcatcatagaaaatgacaacatcaacaacaaaaaattgtctaaggtacttttctttttaataacaaggactttaatattttgaaggctaattagaaattttatccctcgaactttaatatgtattaaatcatgttttttaaacttttaaagtcgttaaaaatatccccgaactattgatattgttaaatttaaggacttttgtctaa

SEQ ID NO: 294689 - DNA, 2774 bp, Cannabis indica
acgcctaaattagttagggtgttacattgaatgtggcagtgattattgttacaacagtgcactgctcgattgtcatagtgagcatggcagactacttctcatttatcttaaatggtagcatgatttctacgctagaggaaagttgttgtgcgagaataaaaatgttctcgaagctcatcttggtgaagttttgaatgtcacaaaggcctccactctcccttaagcctacaaagtctccaatctatctgcgattgtaagctcttgttttatttaaattgaaagcatagaatatacaatattttataacaatattacaaaagtataataaggataaagaaaaaacaaagaaacaaagaaacaaatccctttccacctttcttatttatataaatccttaaatctcagatctcttactctgaatctcaatctaattgatatcaatctttctattttgtatgtggcggtggctatgttatagtagtggattgctcgattgtcatagtgaacatggaagattgtttctccttcatttcaaatagtagcacagcagctacactaggaaatttattgtgcgagagtgaagaatgctcttaaatttgatcctaattgcctttgtcaagcctttaagaccagcacccaacttggcgaagttttgaatgtcactaaggccttcactctctccctcaagcatgcagagtctccgctcaatctttctccatctgcgattgtaagcacttgtttgatataaattttaagcacaaaatagacaatatttttgaataattttataacaatattataaaatataatgaagacaaaaaaaaaaataagaaatcgctttcctcatttctcatttatataaatccctatattgcaaatatctcattttgagtttcaatctaatcggtatgggactttttattttgtgtatgacagtggttgtggttacgacaataaattaatcgactgtcataggtaaatatggcgagttgtttctcttttatttcaaatgatagcacgatggctatgctagagggaagttgttgtatgggagtgaagaatgttctcgaaactgactatgattacctctgcaaagctttcaagactagcgcccaacttggtgtagttttgaatgtcattaggcctccactctcccctaaagtctacaaaatcttttgttttataaaaattttaagcacaaaatatataatattttttgttattcgtgtttccgggaagagacaaatagattctgaatagaaacttaaggcccgttagtaggcccaaataatgtaaactaggccaagctcaagattcaatttgccattcgagagaatatcaattcaactcgcccatgcaaggttccgtcaaccctagttagcatccagaaagactatctttatgtatttagaagaagtccttagcatgtatctaaaagtctaataaattttgtatttgttattagatcccacaaaatcagaaattatttcctataattgttttcatttaaaacttcaaaaaattttatataaagactcataataattgtgaacaagaaaaatgagagggagagagatcattttaaacacattgggatctttacaaagtgaaataaaaacaattacaaattaatgaaagccatttcataaattggtaagaatagggatgtagaacaatacatattccaaaccaataatagtgataaaaatatagaagaaatatagtgagtgtggtttcttagagatccgacatgttgatgatctatatatataaaattcaaaagtgtaataaataatggttccaaaaagattacaaggcaaagcaataagttaaatagtgaagaaagaaagaaagaaaacactgaattctatgcaacaatcataccctttctatcaattcctaaagagtcttccaaatctcatcatgatagtatttgttgctgggtccatttttgtctccaaaccccttatcatcactttccctactataatatatactactatgatatatattctcataaaaaaaaattatatatttatatgacatatatttgaaatttgaataaggtgaaactcaactatcctcaccaactataaaatttgttgtacatgtgataacatatatgtcatgacatgtaacttttccctcccacaactatagaactctccttttcattgttctctacaaaaggggaaagagatcatgtacttttgttaggtttaataaattcaatcctaaaacatcaatattgtactataatatttatcaatcataaatgtgaatatgtaacatggcaatagttctatctcactctttctaattattttattaaatcaatactattaaaagttcataaaaattaatatcgttattttttttcttcatggtttttagttcctagaaaatttgttgaggtactataaaccatatatataatttgggttgctttcatggttggattagatttgggaaattcaactcaaattaaaattgtgttttacctggagttggtcttatatatcaaaattgtgtgcttattctttttgtttatcaaaatgtcttatgttccaattccctaaatttcattgatgaaaaatatattaatatttttcctacattgattgattgtgctttagagtgtgccaatttaatcctaacttttccaaataaaccgagctaaaatagacccagataaacaaagaattatttaaagagaaacgaattacatggaaagtcatttccaaaaaaaaaaaaagaagaagaagaattacatg

SEQ ID NO: 294690 - DNA, 3891 bp, Cannabis indica
agcttaataaaaaaaattatgagagtgagctaatattctcacatgaagtcactatcacacacataagaaaaatcttggttcaaagtcttgttgaaaattccttgtttattctctttctcaaaatgtgtgtgaatatgtggattgcatgaagttgtctcatccactactaccataaaggggcttcagtgacccttaatgagggactctaaaactttttagtaacccatcaatgcacgtaactaatatgagtgactggaaatatgaagtatttagtgaccctttagtgtgtatcactgaatcctttcactactacaaatcatgtggtattttctcacaaagtctctgtcaaattggacgacaacaactttctcctctggcgtcctcaagttctctctccaattcgaggacatcgactttaagactacatcttagattcgtttcatcctctaccaaaatttcgcactcaagaagatgaagctcttggtcaaatcaatcctcgtttcacttagtgggaagttcaagaccagctcctgtactcttggctcctttcatccatatcagatgcgattctcaccaggattgttggcactgaaacttctgctcagatctggaaaactctagaggtatatttaattactcaaacttctgctaaaattgatctttacacctctaaattccagaacttcaagaaagtttctctatccataaacgaatatctcctccgtatagaaactcttgtggatcgtctttgatccgttggtcaccaagtttcagtaaaagagcacattgatgcaattttcaaaggtttaccctccctctatgatacattggtcatctttgtcaacttaagacacgatgattactctgttgctgaaatagaaacgctcttattgtctcaagagcaccgaatggagaatcaccacaaagatcttgactctgtcaatctagccactaatcgtggttttcgactcaaatctcaacccacctcctccaacaatactgagtctaaactggcctcttctcctaatccctcttttcccaaccaggcacgtgtagcctggaatccctatgccatttcatcaagatctgctccaccaggtttttctcaaaccaattagacctcctctatagatcgtggttcctcccctactcgtccctgtcccaacaggaacacgacttgtgtgttaactatgctctcgagttggtcatttggcttctcgatgttatcaaaggttcaacatggactttcctggtgtaggagctgctaatgtgaacactcaatttgtcaatgtttccattgctgctactgtttctgatgaagcttagtggccgattccggtgccactacgcactgcactcccaatcctactaacttcactcagaaacagccttacactggctcagaacaagtgcatacacgtgatggtgctgaccttcaaatataaaatattggtaattctctttttcactctactcatcactccaaacctttcattttaaataatatgttacatgttccatgtctcaccaaaaacttgatctttgtctctcagtttgcacatgataataatgccttttttgaattctatcctaatcagtgttatgttaaatatcatgcttcaaaggagactctgcttgagggacaactcaaacatggtctctatatcatcgacccttctcaaatgcatctgtcaaattctgccgataattttcccaccactgttatgcatagccttcatcatgctagtgtctcccaattccttttatttgtggcataagaaattagctcacccttctgccaaagttgtaacagttgtaatgagcaaatgtaatataccaaatagaaataaaggtgtcactgatttttgcaatgcttgttgtttgggaaaaattcacaggtttcctttttcacatgatactgtgtacacttagcccttacagctgatacacacacacacgtttggggtccctctcccatgttgtcttccttttgctataggtattatgttcactttatagatgctttttctagatacactagggtttttcttttaaaagccaagtctgaagctctcccaaccttcattaattttagaactcaagtggaaaaggaatttaataaacctatcatatctgctcaatccgattagggggtgaatttcaggctcttgaaccttatcttctcaccaatggtatcattcatcatgtttcctgtccaactactcatcaggaaaatagtgtagctgaaaggaaacacagacaccttgttgagtttgctctcactttacttgctcaagcctcaatgcccctcttttattgggatgaggctgttcgagcatcctgttatataattaacaggcttccaactcgtgtgcttaacaatgacactcccctccataaacttttcaacaaacaacctgattacaatactttaaaggtctttggttgcacttattttcccaacactagaccttacagcaaaaataagctagaatttaggtctgtcaaatgcacatttcttggttatagtttgaaatagaaagggtataaatgccttgctagttctaggagaatctatatttcaagggatgttttatttgatgaatttagttttccatttgctactgtttctactaaccaatttgtgccttctcattctcactctgttggcccttcatctcttattcctactccttgccatgctattcatcacgctactgctgctgatatttctgaggcattaaagacttccagcagcataccagcaactgcatcagatattgcacctactgatgctaccaatgctccatctaacagcacatttgctgctacctctgactctctaaatccaaccctacagcagccttctgcttctgacacaccatcttaatccagagacaccattacaacaacagctaccacaaatgttgttccacctcaagctccagttaacaaccacccaatggtcactagagctaaggttggtacttacaaaccaaaggtattcatggtttctaaggaatcactaaatcttgttcctgctttcaaatatcctcaatggaatagtgcaatgaatggtgagatcattgcactcaaaaatatggcacttatgttcttgtgcctcttcctgctagtagaaaactgatagggtgcaaatgggtttatagagtcaaagaggacaaggatggatctgtcattaaatacaaagcaaggcttgttgctaaaggtttcctacaagaatatggttataattttactgaaacctttagccttgtcctcatgccaacaacaataagaataatcttgacaatttctttaacaaacaaatgacaaattagacaattggatgtcaacaatgcctttctaaatggagacttaacagaggaagtttacatgactcaacctcctagtttggtggacaaagatcaccctacctatgtttttcaattaaaaaaggtattgtatggtcgtctcagacaggcccccagggcctggttttacaaattaagggctgctcttaccaagtttgggtttgtctctgccaaatctgaccaatctctcttcctaaggattacatcatctcatacaacatttatcttggtttatgtagatcaaacatcattattactggcagctctcccactgaagactctcttcttatttccaacttgaatgccttgtttgctcttaaagatcttggcccattagattattttcttggcatacaagtgcaatacttggatgatggccttcatctctgccaaagaaaatacatcacggatcttttgtgtagagcaaaaatggatctggctaacttacttctgaaccctatgactggaggagaaaaactattaagtcattacaagaaatgtcactttacctagcacagtt

SEQ ID NO: 294691 - DNA, 6646 bp, Cannabis indica
atccaaaagcacataaaggttacccattggctttctcttggttttgcggatcgtccatgtcgaagactgtatctgcaagaccaccagtctttctaaccacaggaacctgaaaatcattcaataaacaaaaacagaaccttcatatcaatattcataacaaaataaattatcaaatgagcattgttaatagtcactgtaatgctcaacactactatgatgtgacgctctataaacagttaacggttttctataattatattaaatcagtggaatctgatattaaaatgcacaaattttatagtacttgacattttaaggtgccccttaacatttcccgtagtagtatttggcaccgaaaggcttaggctgatttaaaggacagtggaacatggccatcggcacaagttttgtactacataactaaaagaataaacataaaaatgggagttcttcattcggaaaacaaaattacataccgccccataacgcatgccaatcatttgtgcaagtccacatggttcatacatggaaggaacaaacaccatgtctgctgcagcataaagcatatgagacagctcctcacttcataacaaacgaaacaaaaacccgaatcaacatgttgttaacgaagcgtaagtcaaattcttattttgaatttgaaggaagatctctagcaaaggttatgaagtataaagttgtatattctgcagtgtatacaaagactagttacctatacatcaataagattcgaatgctaggaccttcattatgctgcaacatggggagaaaaagtatgaatggccatcagttcggctgaaacataaaactgagaacaatgctaagactacttgggtttcttgcagggattcatgtatctcatatgaacttcagtatcatcttttcttattctttaaaaaaacttttgttgggtgtgcaaccaaagccccacattagctagaaatgagaatgatcgtgagtatataagttcgaacaatatctctattggtatgaggccttttgggaaggtgctcaaaaacaaatccgtgttttaggccaaaagcagataatatcataccaatgttaaaaacccatttcatatgtttctatggaaatatataaatacaacacacaattatgtatgatgtaatagagagttataaaacagaaaatttgagacttaaagatgagaatctttcgggttctttaaaaaagcaaaagaaaagaacttaaacatgttctataaatctgaattgttagagaggatatgcaaggatttgttatggatgttctgataaaatgcctctttttgctccctttctcaacacaaagtaattttatattttttttgttagcaattctatgaaattaccttatattacactaatcttgttccactaacattgctacttcaacatttaacatcagcagtagatgcaacatatcaaaaagatgaaatctgttaccaaatttgcaagaataaatctgttaccaaaagagaggaagatgaaatctgttaccaaattggcaagtccttcaaattctctttgaacgttaccatctggagcttttcccagtataatcatttgtccaccctagaaatgactcaacaattaagaaaaatatcaaactagtcagaatcttatgctgaaactcgctcgtcaagtatgcttaagaaatagaaagtccatgcttttagtgcaaaaatgttagattaggtaggtacacattcaacattgtcagttgatagacttacaagttgttcaacacgcttcattgcgtgaataattaaatgaagacccttctgagcgacgagtcgtgtaatacaaacaaccaatggcaccttggtttgcatatccaatgcactatcactagaggccaaaccaaggcctctctggacaaagtacttgcataaccttttcccctcaagattctcagctgcaatatgtaccgaatcaattcaagatatttcacactattaagtacaaaatgttaatccacagctaattttcaagtgttcatgataatatcagatttttaatttaataaaagaagcataaattcaccatggaattttgcaggcaagaaaacatccaaggcagggttccatattgctgtgtcgatcccatttaatataccgaagtacctaaaatacatgataaaaaacgattattgaattgaaaagcaatataaaagcttgtgcatatataatcacaaaatcatatgttagcttaaattagtagagttcacttctctttatctcttacttgatgggatagatttaagaagagagtgcttcagatgtaagattatgaacattggactctactactttgtttcgagaataattgcatggctgtcttcattgtgcaatgaaatcaaagttgttgaatattttaacaaaaagggaatagaaggaattttgtgatgaatgcaatccgagaaaagaatatcatttggagtaatgttggctctggtttaggtgttaaaaagtgttccccgggattatgactgatgtgtttccttgatgaaacaaatccaaggagcataactatgttccattatctttcgtttgttttcttgattgaatacattaccgaatattgtaaatacttaaagagaatgtttacatgacatggttggtggagaaagaaaacacccttttataaaggtccaaaaaatcatataaaccaagtacaaaaacataaatatagagagaaagaaagcaacttgtaacttacttatgtcgattgctcactaaagtgcttgaaagccatcctgagcacatagtttctttaagatatgttggggagactgtgctgaaaatgaattaaaagaaagaaaaaatcggttgttgataatgcaatgcatggtaatgaaacagcgtaaatgtacccgtcaacaggttgacgaagtttccatgtcttcctaatccaggtagagtcttatggaggactcaaattcaagctatcaacagactttcaataatctaagaagtatttaataagcaataatgcataatctaagaactatgagtattcaaatcaataattcaatgttttaataaacatataagtctatatctttaattcttatgttgaaacagcaatctttaatttcttcttgaaaaaaacatttgaagagctaagacagatgtacctatactcatcctgtttctgttagtaatccttaaccgacaacatacttattgatactaatcacagtaatttttcaaatttattcatgagatgagtttcagatattaattgctaaagtgtttttagatattccaaagaatcatataggcagaaattaaatatgcacaatgctgcaacttacacaactgcattgctgtagacgattccacctttcaataagctcaatctttcgggattatggccaatagttcgttcatcaactgcctgccatgttgagaagagaaacactttgatttagcaaaagataagcttttcctctaatactagctgtacttcttgtcaatagataaaagctctcaccttgtcaatagttgcatatagagaaccatcaagaccagacttgctaagttgttgttcactgccaatataagataacatgcatgaaaaggacttaaatggacattaatgaactcatagaatagttcaacaaatgatttgtctttaaataattaatctaatctgcatagatatacagaagacttgcatacatcaatctgttacgcctttatattagtctcaatataggattttagatgcttagtagtcaaatttgcataaatctgttatcctacaaaatcaacttaagggaaggctgatcaattataagaggaggaaaatttgttttgttaccaaactgtctcgaaaagtttgtaaccatgtgatttttttccctttgatatcaataaaatacttattctctaattctttcaagatttggatagaaactattgtgtattaaaaatctacaatttcatacataatgaaggattttctaaccaaactttcatgtataatgatcataaaaggcaagcataatcccaatatctataagagtattgctataaggtactagtggtacctgatagtatttaaaggtgacgtcttgcgattggttaccgatattctagaaaaattattatattaaactatataaaatctgaacttaattacacctacactagtgatatgacatgttagagggtgctaggttacaaccactgtgtgccttttttagtatttctctaactataatcatcatacatgtacttacctacactctccaaaatgctccatgttatggattgataggactattcttggtttctacaaagcagaaagtgaataagaatatgtcttttattttttttttcaaaaaagataactttttccaaacaaaacaagagtaataaatataaagtgaatacctttagagaaagattatgatacatatcccaataaagcaaaggcaaaactgatgtctgccactcatgaacatgaataatatctggttgggttccagttacctgtgattgaataaattaaagcttaaaagagtaagcaagcctatgcatattgggttgtgaccaaatatcaaaaagaagaagaagaaagacctgcatccattcaagacaagcacggctaaagaagacataagcatcaagctcgttataagagccaccatacacatgtttccccttaaagaaatggtttgagggttgaatgaaaataacagggatagaagaaaccaatcctctataggcttcagttgggatccaaacaccatcatggtatgagttaaaggtggtgattaaagccaagtcagtgatttgatgccttgggatacactcataaaaagggagcattatatcaacggtgtggccacaagataaagaggcacgagcaagtccagtgacaacatcaccaagaccacccactttagctatgggtgccatttcagctgtgacatgagtgatgtgcatgagctgatgatgatcatggttgctgaccacatcagcatcagcatcatattcaacacccatgtgatcagaacaaggaaactccttgttccaaaatggaatctcatctgtgggagagggccaaacgagttgaggtttattgggtttgtaggaatttaggattagagtggaggtggagcaaaaagattcaatctttttgtgtttaagattgaataaaaaccttggctttggcttgggaatgaatacagagtgtatctgtaattgcattctgaaaaagcctccttcttttgccatttccaacccaacaataaacaaatttgataaaagagagagtggagtagtacagtagtggattatactctcctttaagagaatttcatgtctaaccctttttccatcagatttgtctttttcttattgtacaatttgtaagccctagaagaaggaagaagcacacacacacacacacagtaatgatattgaattttgaagtgaagtcactttttttttaataatttttctcaaattttctatgttgcttagctctctagtttagtaatcttttcttctttcatttgaaatcattgaatgattgaaaaagtatgagtgtcactttcctcataattgaattgaatattgcctgtttggtgtttttttactaacataagacataagatggcactcatgagtgatgacatataatttgtggctattaacccaactaaattaattctaaccaaaccaaccaaatttgtagtcgattggtttgatttgattcaaattatttaattagtctagtttaattctaaagctttacaaaattacaatactaatttggttcaaaaaaaacagtctttaagcatatgaatagtattagatatccgaaccaaatcaatctataaacaatcttactctataagaacaaaaaagttctatcccgagttctgtgaacgaggctggtcgagattgctgcaaagtagctttgcagcactttcgaccaatgctaccacttgactcgggattagaattcgagaatagcagcagtggccataagactaggactataggagtgtcatgctcactcaccacccagcccccaatagattttggtaaagtcagaacatttcatttccaaattattaacacacaacaaaacagatacatgcatccatgccctagtatttgagcaattatatctattgtatacttagctgtataaaaattagacatattatattatattatatatatatatatgtttagtctttcccccctaaaagaaaaagaaaaaaaaaaatacaacaattgcgtgcttgacatatatttggtgggatggagaacccaacatcttgcgttatgtcaatacaacagaactaaacaagggaggtgttaatacatagcaaagagacaacagaaaccccaaaacaagaactaaacaaggatatatatgtatatgtatatgtatatacacacacacaaatatcctattttactaactcagcagcagcaaccgaatctattaataacagaagaaggaagaacccccaaaaccaaatattcctttcatcactttccttttttttctatcttaaccaaagataataattaacctgataaatacacaaaagctacaacaatataatgaccttctcttgcctctctctctctctctct

SEQ ID NO: 294692 - DNA, 5454 bp, Cannabis indica
tgaaagtaaattcattaatgtctaagaaaatcttataataaaataaacaaatttgtattatataattcattgcatgaatatctattaacgaataatatttttttttgagaagatttccttttaacaatcatgcaaatcactaaaggaaggattaacaaagggtcttagtcgtgtctcaatgttgttggtttttaaatttatggtcattttgatcattttgcgcaaaaggttaattatgtaaatatatttttagggtgtagttataattttatggggtgtaaaggtaaacataataaattttgaaagagagaataaaaattaaaagcatcgaattaaaagattaaaagaggtatatgatgtaattttctccatacattttttttattatttaaatgtttatatattacacaatgtataacttgaggctcgaactcagaacctccgacacacgcgtaccctttaatagccacttgagttatcctccagtggtttaatttcctccatattcagtgagcattttagtgcaagcaatcacaagcccaaggaactagtatgcttaattggtgtagatgaattgtctaaatttgtatttgatagcttaaatgttaaatatttgtaaccttatgttatgtgtaccatattgtacaattacaaaaaataaaaataaataaaaacattttgtaaaacttatgaaaggagaatttatatattacattaaagtagccaactgattataaaattcaatataatatatatattttttacagtgttctctgataagagattcagagtacatttttattcagaaagaaacaattttctcaattaataagtcaatatttttggtaaagaaaaaaaaatatatgaaaagcttatattacaaaggataagtatatttaaacaaagccctcttctttcttatccatataatatatattaattgaaatagtagtatgttcttaatcttttattttactatagttgctgctgttgttgttgttgaatgtttatcaacttataataaggtccatttgtgttatctataagagttgaatgagttccttgctcaatgattttcccatcttgaatgacagaaatttggtcagcatttttgattgtagacaacctatgagcaaccatgattgttgtcctgttcttcattaatctgtctagagcttgttgaacaacgcgttcagattcaacatcaagcgcgcttgttgcttcgtcgagtaaaaggatttcggggttttttagtacagctcttgcaatggctactctttgtctttggccacctgagagttgaacacctctttcgcctacttttgttgagtagccttcgggtaaggcgcttatgaaactgtgagcattggctagtttggctgcttcgatcacttctgattctgatgctccttcttttccatataggatgttttcatagattgatgtagcaaaaagtgctggctcttgttgcactagaccaatgtgttttctaagtgattttagctttagtttcttcatgtctttccctgcaaacataacattgttaactatcaacatgtgtaatgttattaaataggaacttaaagtggtttttttgttgttttgataaatttaaaatcactcaacataatatttacccaattactaaaatctaatctagaggttaagacttagtagctattgagtatagtagaaaagacaaaacatacacaaatttcgttttttaaataaatttaagtacaccaaacacaacatttaacacaattaccaaaattctatcatgagttaatacataatttactcaattaccaaaattctattataagattaagactgaaaagacaaaacacaaacacaaattttgtattttataataaatttaagtacacgaaacacaacatttaacacaattaccaaaatcctattatagggttaatacataatttacttaagagcattagcactttctcgacatgtcgcgttgcgattggttagcgatactccataaaagctattatattaaattatatgagacccaatacttaattagaccaatagcaatattgacacataaaagggtgctaggcaccactgatgctctttagcatttctctttactcaattaccaaaattctattataaggttaatacataatttactcaattaccaaaattctattataagattaatacataatttactcaattaccaaaattctattatagggttaagaccgaaaagacaaaacacacacacaagttttgttttttccaactccctatttttaataaatttaattacactaaacctaatatttacttaattaccaaaattctattaagagatagggatttagtaattgctaagagtaatataaagatcacaaataactcatacctaagcaatgtgggacaaaacacacaccaatcacttattattgataaatttaatcactagtgagaaaacacttaccatcaataagcaccttccctgatgtaggatcatagaacctgagaatgattgaaataactgagctttttcctgatccactttgtcctactaaagccatactctttcctgaacgaacttttagattaaagtccttaaatataacaacatcaggtctcgaagggtagctaaaatggatgtcccttagctcaattgtaccatcaactgatgctaattcttcacccgaatccccgcttacttctgtttttcggtccaacacctcgaacacagacgcaaccatttgattccctttcaaaagatcaggagccaatgccaatgtctctcccattgctaatgcagtaactatcaaaaccatgaatgatttcatcacagatttaaagctactcagctcttttcccatcaaaacagaaccatacctgagcaatgacaacactttagtttagacttttagtgttaacttgtcatgaattgatctaagtttaatcaacttaccataaggcaaggccatatgatgagaagatgaaaaactgtgaaatcccataaaagattccagcaatctggccacgagtgaacgagcgcttggacggttcaacaagctcgcgagcataaaggtcaagcaccttttgctcagcacaaaatgcagcaacagttctgatattgctcacagcttcacctgccaacatgttggcttttagatatgctttgctcaagttgccaccatagccttgcatgaagagtttctgccaaatttcgaagagttagcaaaacatatcagattgtgatttgaaattaagaactattagtgatgagattaaacctcactgatgtgaccactaatgaccaaaggataagttgccaagacaacaagtgtgatcctccaattcaagaggaaagctatgatgaatgaggccacaaccaaaccaacattttgtaacagaattgtggagcgatcaacaacgattgttcgtaacagagttgcatcgctttctaatcgcgacgagagcattgaactggtgttgtttgtgtcatcaaaccatgctatctcattcctcaacatggctaaaaaaacacacacaaaaacaaaggttagtggaaactgttttggtggtaaaacgtggttattttacagaacactttattgcaaacatacccgaaaacattctttccctcacacgaagagtaaggcgttctcccatggtaccgaaacaaagatgctcaattccatgaacaatgacagttacaacagccccacaacagaaaagtatggatatctttttgacctcatgttttgttgtgtcccaatccatgtaatatgacacaagagcatgtgaaataccaagagcaaacagaggcatttgagctccagcaataaaagcacagatagttccacacaatccataaagccaatctggtccaatcatggaatacagtcttttagctgaaacatttgttgtctttacaggctcaactgctcctccatcagcaccaactcggctaatagaatctttatcagaccgaaaactagcaccaaaactagttgttgtgcgcgataattccctcgagaacttaatgctgcattgcataacaggcaatcatagattatgacatgatcattgttaagttgagtgtaaaaatgggatagaagatggattacctcggtgggcgtcctaagctagaattgcgctgcaaaggcgcggcttcttggagttgaacaagtgatgaatagacactatttggattggaaatgagttcatcatgacaacctgtttcaactatctttccctcttgaacaacagctattatgtctgcatttctaatggtggaaaggcgatgagcaactacgatggttgttcgtcctaccatgacacggtcaagtgcctcttgaacactcttctctgactctgcatctaaggcacttgtagcttcatcaagtaaaagaattgatggattcttcactatggctcttgatatggcaattctttgcttttgtccaccagagagttgtatacctctctcaccaacctgtacaagaacaattctaagattatctccaaatatagaattcacaatagcatttgaagatgcaataagtaatcattaataaattacaagtttgctgttaggtactagtgatgctagaaatcatcacaaggtgttttcctatatatgagtagttaacaattctttagcattattattaaaagatgaaggttctgatattaaattacactcaggcccggctctgggcataggcgggctaggcctgtgcctagggcccacccagtccaggggcccaaaattttttttttcctcctttaaaattatacattttttttaccgattttgaaaaataccacatttttctaatataagggcccaaattttttttttcttcctacggcccactttgtttgagggccggccctgattacactagtaacaataaaacacgttatgttggtgtcagggtcggtcgaaatatttttaagcctcaagcaaaaatttaaaattaggccctttatgaaaaaaaaaatcgtgtgcattagatcacaattctgttaccaacttttttccttaagattcgttcaaaacttttaattataatttttttatttatgtatgcataataataataatagaaaaaaaaggagtaggcctttttttaagaaaaaaaatataagattgggccttaaaaaatgagaggacttgtgcaatgaccgaagctgctcaatgcacaggctggggtcctagttggtgttaggctctatgagtgctttttagcattttttcttagattaaatatatatatatatacaaaggattatcttatatactattttttaacttttttattaaaaatttacagtttggattgcttctgtagttgctctagtagtttttatgtgaattgttatgtgaattttggtttggatttatgttctgttagttgctaggtggatttccgtaaaaatgtgaaaaaaaaa

SEQ ID NO: 294693 - DNA, 1906 bp, Cannabis indica
attaatttcttatcaatatcatattaagtaaccaaaatgttatacttttgaaaacttaagtaaattaaaaataaaaaataaaatttgagattaatttcatttcagacatattaattttgaactaaggtatttttttaaagacgtggtaatgtattattataaatgagatttgttaaagtatttttgtaattagtttatattttaaggatactactgaaaaaattgtaaagaaaaatgaggttatctatatggtagtttgcaaaattatttagaccagattattcattatgttcagtacttttaaaagattaggataaaattattatttttagaggctattttgaaaagtatggaatgcatttgatattaaaaagtaaattattggatttaagcatatattccaaagtaaattggtagacataaaataaagcatagttttgaattaaataactacatatttgactaaaacttttattaatttatttttttttaagaaaaaagggaattgaaaaggaaaaactgaatggtatcttgttttgtagttcatatagttacaaagcttagaaagtagcgaggtcctcgttttcaaattagccccacttattaaatggagtgaatgagaagtataatattcttctttatttccacatttaatatctcaacttccaacttcactctcgtttataattgaatgaaggctaaaaacttgaaagaaggaaagtaatctaaaaaaaagcttagaaaagtgctttcttgtaccatctcatttcaattaaagcattaaatgtcacgtaaaaattaagtcaaaagagaaaataaaggtcttaattaattcttctttttccgacatcaaagataatatatattagagatgagaaaccgatttaagaaagtctttaatttgtatcaacatatagagaccaaggaaaagtactatatataacctacgaaataataatactactttatttctctatttcaattttgtattatatatagtcgactaaccctagaatccaataataactatgtacaatttttttaagcatgggttctgtgacaattacttataataatgaataattaattatggatatactatatatttagtgcctttacaaataaacttttggcatgtgcgttgttataaactcagttgtgattatataaatagtcccctaaaaaaatggtgataacaataagataaatatatatggtgaacaaatataattaacatattacatatatattcattatttaattttcaaagttcaaaaatactgcaatgacaattagtgattgtctttttatgttaggaaatttaaagtttgtgaagatttgttttattaagtaaattaagttattcattatgttgttggtgatttttaattttatttagatcaagtttttttttaaaaaaaaaatactatttttacacaacttttatctaggatctgcaaaaaaaatcatatatatgtatgtatattatgtataagacaaattgtatgatgcccatttgattgaagcggaaatattaattagtttattatatatagatagaattgtgagttattatgctcccgactagtccttatattgattccattgtcaacagtcaaacaagaataattaagctttgatttgaacaaaccctaatagaacaaatatttgtcaccattaattaatgactacattccatcgttcattgcaccggttttaagacaagatcaggatacgataactaactattattgatttcattttggacatgagcaatgattgatgggaactaaaaaaaattaataaggtaataatctaataatcttttatggcaagtttctaacaattatttttttaaaaaaaatttatatttattttttataaaattaaaaataataattacaac

SEQ ID NO: 294694 - DNA, 1989 bp, Cannabis indica
aaaaaattaatcctaatttaaattaattataaaaaataacttttaaattataattagtcatgtattaaaaattacatctttatataataataagtatattttattaaaatatatataatatataaatttatttatgtcaaattaataattatattttaaaaaaatacgcgtataaataatgattgtttattgttattgttattacattaatattttttagttattttttttttctataatgttaattagaatataatttatttagtctcaattatatgtttacaaagagatttgactgtaattctattgtattgtattctcttctaatcgatacgttaatacaaagactcttacgcccttttattttattactctctttaacaagtttgttaatcatttcatgggatcttaacacattagtctctaaacttgctcaaattgattcatatgagaaacatgccaaagctttctctatatttagcaaaaaaaaactaaattgaaacaaatgacaacttaatcaacaaacacttttatttttcaaatcaaaagcctttcatcataagcatatatatactataacaacaaaggtgacatgacaagatctaattgcacaatcaaacccttgaatagttgtgagagaaatattaaactcaaaataaggattggatcaagtatgtcatgaacacaatgaaaagaaatgtatctacctcagcagtaaacgtgagcatacatgttgccttttaaatgacagaaaaagcttacttttacactctcctcaacttccttaattcaatataacaacaaaaacggaataaaaaagacaagaggtgccatatcgttgttattggtacactttattatcggatctcagatattttgattaagtaaataatatgataaattgtaaccactcgtaacatgtcacatcggtatggtgttttggagaatgtcttatgaggtagaaagcttaagtggaaaaatataagaatactatacggattaaagaatgttactcttaaaatttatattgatgccacacaatgatattgatgctatactttttttaaaaaaaataaaaattgaaagtgtaatatatataatagtttaataaagaaaaagaattatatatacatataataatatgtaaaatcataattataacattgttgaaagatgctatagtgtttttagaagtaaggatgctaaaaataatgtaaaagaaagataaaataaattattatatctttaaataatatagagatatttaacacttttaaaaaatactactattagaggtgctctaaaaacatctcagagtgaagaaatatagtttgcactattggtcccacccgacacttttattgttttagctaattacaatttttgttttgtttttttaattaaaaatttaaaaggacatcaatgcctattttagaaactttttattatctcgcaagaattggtatccactttaacgagtaatggagcaggatcggacgtaattttatatatctaaagcgagtttggatcaaggtcgaaggtgatactacctatctcatattcaatccagatatatagtttctaaactttccatatagttttctaattattacgtattaacttgctgtgtaattaataaagctttttaataagtaaaatatttatttattttatagtcaatatcttattttttattttcattttcattttcattttaaattacattatattatttgattcttcttcttataatttcaattttaatgggtacctaataaatcccttaatccaaactcattaggaattaagcgtagcccaaatccattggagattaagtgaggcttaaaccgattaaggattaggcgggatgagggccgaaacagtgatggataacagtaaggttggaaaatgtgttacccaattattaccgaggaaagtatacttttatacccactttttattttttattttaatttttacctttaattt

SEQ ID NO: 294695 - DNA, 1904 bp, Cannabis indica
aaaaaaaaaaaaaccaagaaattaaaagttagcaattaaagaatcggacacaacatcagacctcagtcggacccgtatcggaaaaaaaaaaagcattcacaatcacacatcggaccactattgtcccaccatcggaccactatcgtcccaccattagacccaatacaataaacaaaatcaaaaaaacagtatattcacaatatcacacatatatcgggcacaatcgaacaccatcaaaaaaataaataataaactaaaaaaccacaatcggacacatatatcgggccatcatcagaccatatatcggacacaattggacaacaaacaaaaaatacactaaaagcacaattagacacatatatcgggccatcatcaaaccatatatcagacacaattggacaacaaacaaaaaatacactaaaagcacaatcagacacatatatcgggccatcatcgaaccgtgtatcagaccacattggacaacaacaaataatgcagagaaaaaggacaattggacacatatatcgggctccgtcggactatgtatcagaccacatcggacaacaacaaataaatgcatagaaaaaagacaatcagacacaaatcgaaccacctattagacccatcctacgtcttctacttcaaattctttcaaattcattgaatgcatcggacctacatcggatgtgcatcgggcgtgcatcgaacctggcttaaaggctaggttcttacccaaatcacagatccaacattctaaacatccctaaatctaacaaaatttaggtttcacaaacaaaatcaatctttaatggtaaaatcacaaacaaaatcaataaaaaactagaaatcaaaacatgaactcaccttcgacattgtccccgatggcgtgggtatgtcgtgcaccatcggtcgtgggttcggtctcactttggttgtacgtgcactgagggtcgtggataggatcgattggggtctactgtgggtcgattggggtgcgtcgtgggtatatcgtgggtcgagtgggtgcgtcgcgggtatgatcaagaggggaagagagaagggagccttgatttattttttgaaatgtgaggggtattatatgagaatgttggcatagatggccaattttaatacatgtaggtttagggaaattatccaaaaaataaaaatgtttgaagcacataaagttgtctctagatgttaaagaagtaactcttaactaaaatgaatatgacctttatctcatctgttggattgagtttttgacttcttttttcaaaaattttaaagatttagctatttaagagtaactattgggactgctcctacaatcatataatacatggccatatacatgaagagagatcatatttttaaacgaagttaaattattgaccaaagtaaggtaggcctattcaatgacaacactaggccatgccagcccttgtcctttgtctaacttaaagtttctttgaaaccaattgcttcgagcgagcatagctggctacacctttcccatttaacacctggcttaactctggagccaccatttcaaagccatattgtcccctaatctccttcaaagatagcaccatcaacaggaacttttattgtagaaaaatctgctggtagggtccaatgcgcacttctcctcctttaactcctctgccacagcaactttggccaatcaccaccaaaccatggcactgccagcctccaacttctcttccaaactccaaaacaactgaacatcttccttaaaccaagcatcattcaattatattcagacactatatatatagccgaaagcagtaataattatatctactgagcttaatcattacctatgatactataaatatagaaatatgattttgtcccgtgatgtaatttcacggaatgta

SEQ ID NO: 294696 - DNA, 1140 bp, Cannabis indica
aataataccttgaatgtttttttttttcaaaataaaagtcaataataactcaatttagagttgttatgacaaaacttgatatattttctgtatttgttcatgctagaaactgtcttcaagttggttattgttaactaaaaaattataagaagtaaaatgtttctataaatagcaaacggaaaggtgaatagcacaagattctccatacacaccagaaaggacaaaatgcggccccacctcttttatttttgaatcctctttagtcacatcgatttatctcttggaaacatccacgcccgcagaccccgcgccctcaccctgctcgcgcccacgaccactcgctcacgcggccgctcgccaaacgcccgcgcaccgcgcctgctcgcccggtcaccctacacctacgtctgcttgccagcgcccgcgcacctcacccgtgcagcccgtgcccgctcgcctcacccgcgcagtgcgtgcccgctcacctcacctgcgcagccttcaccctttcgcagcgccagtgcccgttgcatcaacactccgcttattctcctttccttcttaacaccagcaggtctaataagaagatgccaggagggataacgatggcacaatacgcttacataatgggaacaaacttcagtttgtctgaggtacaaaatgaaagaggcctttttagtgtaatttaagattctaaatatgtcaggtcacttaggatacagtcttatgataattgaaagtgacttgacgtagagtgtattaggatatggagggtactaggagaggggggctgactataaataggacctcaagtccattgtaaaggaggattttttttgaattttcagagagcaataaaatagtaatatttggaaagatttatgagatccttattctaaatactctaaatattctaaaatcttctttttttttggagttaagttgtcttttaagcttattatcaagtgttagctaaaaaaatctacttatatcgttaatgagttcggaccgttaacaatttggggccgtctgtgggaagtgacacttaaatgcaacgtcctttccttacaacaagtcattgagaagatgttgaggcattctcgtcgccgttaagagctggaggttgttggaaattatttt

SEQ ID NO: 294697 - DNA, 3765 bp, Cannabis indica
tttggacaggtgatcttgattcgtggttgatagcttgatatgtaatgtcacatataaattgacatgttatatgtgttgtagactttaaggaaccttacattaatcttatttgtggggatgttcatctagctcatatagtgttttgttatgacaattttgtgttttggactgcaggtagaatttgatagtgatggaaaagcaattggagtgacctcagagggagaaacagctaaatgcaacaaagttgtgtgtgatccatcatatttaccagataaggtataaattatttgactttttttttagagtattgaccaatatcattaaaaacccaataatttcatacatgttaaaggcctatacatgtgaaagcaaaaatagaaagttatatagtgaaacaagttgttcatccatttaaaaagcatgcacaactaattcatgtatatgtatcaaagataccaatggaaatttagataactacattttctaactatgatcctaaatcactagaaaaagaatgtcccctaataaaaacagacataacaggttgtgtttgaattatttgccttgcctattaatcatatgtgtataacaggttgtaaaggttggaaaagttgctcgtgctgtatgtataatgagccatcctattccaaataccatggattctcactctgcccaggttattctgcctcagaagcaacttggtcgtaaatctgatgtgtaagttaactatatatctttctctaacactggataatgcagtaattaataacctttccttcagtttaaatactactaaatagttacatacatgttttctgaactgaacccttataatttgacatacatatatatatataggtacctattttgttgttcttatgctcacaatgtggctgcaaaagggaaatatattgcttttgtttcaacagaagcagagactgagaatccagaactagaattgaagcctggagttgatctacttggaccagtagatgagatattttattacacctatgatagattcaaacccactaacgatcctcaactcgacaactgtttcatatcaactgtaagtaataattatatgttatttaccttcttctcttcttaacttttattttaaaaaagaaaggaatcgattttcattgaatttacactgtgcgactattatggttccataatttaaattatggtcactataatagtccttttatgtttgtgtaagatggttattttgctaataaatttttttaagaagttattttgctattaaaaaatttctttaaagtattagaatggctttcatattattttggttgtcaattccttccaaaaataagaagaaaaaaaaagagttattctacatttaatcttatttcagctcgtattcatattcttctacttttattatttcaagactcggccctgagtataaacgggatagacatatgcttaaagctcacttaacctggtggttcaaaaaaaaatttgttcccttttaaaattacaattttttttttactgattttaaaaaatattatattttttttaaataaaggccaaaaaaatattttttttatatgacttactgaatttcaagaccaaccttgattactccgaactaaacataacataagattttataataatttgttcttgcaaatatgatacaagatcaactatcaagcattattgtaataattatacacttgttttgtggtatttatgtgtaattaacatagactgttttaagtaaattgaatgagctaattgattgttgcagagctatgatgcaactactcactttgagtccacagtaaaagatgtccttgccctctacagcaagattactggaaaggtaataatctttttttacttttactatactactcatcaaactcatgaatatatatatttatatatataactaaataaataaattgatcattgtttcattcttgtttattttgagtttcttattagcttaattaatatttttgattgatgaatcaggagcttgatctatcagtggatttaagtgctgcaagtgctgctgctgctgctgaagaataattattggactttatttgctatgattctattaattaattaattaagaggaataaaatgatctttacatgatagaaactgagattcttcattcctaaatattttatttatttatttatttattttgatctggaggaacttcctatctattgatacaggctcattaagtttctattaagttgtgtggattcttacattcattaaataattgattttaaatcatcacaccatatatatgtctttgtatatataatccactaatgttcaatttatggcatttttagttacttggaatggaaatatcataggtatagtaacaattctattccattgttaaaataaggaatgggagaacttgtttattttcttaaagaatgtgatttaaggataatgcttttactttattttttaaaatatatctatatatatataaagcaataattttttcttttaaaatatatcttacaaaataatttttatatttttatttaaaaaggacaacttaatcagtttgatttagtttgattttcccgtttgtacaactattgtgtgtcctcaaaaaaggcttaaaacaaaaacgtaagttcaatgttgacctcacttttaaccaacaacggtaagttaaattaaagtaattaagaataattaaataacagaatataaataatataaagtaaagaaaataccaaattttataaaggttcgaccccttaatggtaatagcctactctcttttatttgtattgacttgtgagaggatgaacaataatgccttgatctctctctaaagctcttacaataatctctgagtaatttacgatcgaggtttctctcttcagtgttctatctgaataaaatttgtgtccctgaatagtgagatgaattcactatttacaggaattaattatatcaaattagttttccaaaacaaataagaaataaaacgggaaactaatttaatttcaataattataataagcaaagtaggaaacttaggccagttgcctttctctcttaaagatacgaattcatcccgtgaatttagggattatgtcacaacttgcatgcttgagaatacatgagatatatctttgaaattgctaactcccatcccttagttggtgcatgcgagccacctgcttgttaaaagttggtcagatgtttatgcgtaccctgcttggatgtcacaacttctgtgtgtgaccttaagaatcaactcttcttgtacgacttactgagagtataattattcacacaggttatgaaatgtactctatatgtcacttagatggatgtcacgtcacagtgtagaaatttggataacactttgtatttattcttctttctcattggacaatctattttcatgtgtctgggcttcttgcactcaaagaaaattggtagatcatctttgcttttttcttttttgagtcattttctctttgtggcttcttcccaaagttttttttttttgaatttcatgagctttttgtatttctttgagaagagtgtcaagcccttcatgttattacaccagctatcctcatcgtcttcactaatgacatggaaggaggaagacttcaatgcaatagtcttttttttcttctcaacttcctcttcttcttgggcactcatgaaaatttcatggttcatgagtgaaccaattagttcttccaaggaaagtgttgagagatc

SEQ ID NO: 294698 - DNA, 6058 bp, Cannabis indica
tattatttaaatcatttttcattgttgaaaaagagaatatttaattaattttctcagcactttcgaacttttttttttctcttaaatcaatttttttcttcctcagtttactttctctttctcacctaaaattgtacccaaactgagatttcgaaacaaggttggcttcctcaattttcatggcgccaaatcttcctagaatttgctagcaaatcttaagtgataaaatttaagaccagttcgctatgtcaaaggcttcgtcttcgttctctgtcagcaaagaacaccgcactagtttttctcacactttcaagtatttattgggtcagtttctctcactttctaatttgattatcttttctttctctatttctggttattcaaaatggggttactctaaatctgattttgtatcagctacacagtttttgtcaaggggaataccatttgtattcaattcatggatcgtgaggcaccttacgcaagaggactatgccgtaagcaatataaattttcattctttttatctatttccctcttcattgagtctttttgatataaactgacattgtgtcttatgcttggtgctgcagctttatgctgtgcagtttcatctttttgtgacctgtgtgttgtttctcagccgggagggattccggcgagcttgcatgcgtgcggacataaaatggtgattttgattcacatttacttgcttcgctgtattactgtgtttgttgacaatatttatgtggaaaatatggattagtttagtggaaagattggggctttgtttagaattgcattttctgaaattgtcttaagatgatgatcattgaattagtcatgtgggtatattgattaggtgggaaatctccatattttatctgttcataaatgtttctttgttttctttgttgttgttttttttttttccttgagaaattctgtaagtactatgtattcatggatatgacccttgtattcttaaatatcatgctgcagtgatggtactttaatggaagaaaatgtggcaaagctaatgaaagtagcatggttgacattaccaataggagtacttgttacaattgcaggatgcttttttgtcttttggtggcaagatttatcttattctgattcatatgggcaagctatcttgatcaacggtaatttgctatatctcgttgtatctggtatttcccccctttgtgttctctcttctaattaaactacccagcgcctatgattacctgactttgttgaatacaataaataggtatgtagtcacttggggctagctcaagtggttgggtgagtgggagatgcggagggggagggattcaaatccccattatatatcatataaaaacaataaataggtacatgtaaaaggatgtagttgatgaagtatttgctatttatttatttatacatgttaaaaatgtgttgataacttattcaaggaatctattggcaggatttgcatgtattttggagctattggcagaacctttgtatatcctttcccagaatttgcttcttctgaaattacgactaatggttgaaacagtagctacactactgcgttgcataactatgtatgttttcattgtcaaacaagccaatatggtgagttaatattagattgtactgtcaatcttgttgatgaactgtttttccatattcccaaatgaactgcttttccaagtatcataattatattattgtttcctcctcaagaccattcttattttatttttacaaactttgctgtatatgctaggttacttggagtgtcttaatttgttttagagctctttgttgcatttgttactgattaatttatcttcttggcctgaaatgtgttagaagtcaatgcaatttttatatcagttaattgattgcaggacaaagtgattatattttcactgtcacaaactgcatatggggcgtgcttgttcctaggctactggggctacaatctttatttgcgtccatttagaagttctaccttgtttcctctaaggtataaatttgggctccattataaaatgattaatatgcatcattttctatccatagggaccagtgtggtagggtaaatatgattaatattgcttgagtatggaaatgttgagcatgaggataaatggcaaaattatattgtagcatgcagtgacagtctgatacagttgttctgttctgctaggataggggttgttggtggaaggacaaatgttttacaaggcaaaagttaattttccaatagtttaaaattcctttcatatttagaattattcatgagggttactgcacttttttcttttataaaagttctgaagtaaatgacatggaactcttacagattaggaagtaagaacaattttgaccagcagctgtcaaacatgtgtatgttatttactttccaatcctttcggaaattgatacttcaagaaggagaaaagatggtccttgtctggttggatacaccttacaaccaagctgtatatggactagtggacaaattaggtaagtcttttaaccacacatttgcgctgtggtttacaaggctcatgtcatgtttattttagtcattttcatctggtgccattgtatcattgtttggattgatttttattgtctttcgtttggaccttataattttatcaaatttcagggagcctagtggtaaggatggtgtttcttccttttgaagaaagttcctttaccacatttgcaaggtctgcatcaggtttatttctttcctctgttagttttattgtttattgggtgtaaactgacatgatttaatctgcatctcctttcataatttcttttctagctgctttaattttcgtactcaagtaaatttaacatcattccaagctacaagctttaatgggtttagttagcctttatttgtttttttattcatacacttagttgcacctctgcctcttttggcattgctctataatttagaaggtttcattaacaatgagcccttggtgattttttaatttttatttatttatttattttttattacagaaaaccatccagataagaagaagaatttgggaaggagccttacagaggccctgaagctggttctgttaataggtctgccttcttcataattttcatacatattttggcaagtactttttaaaccttctaatttcaaactgggctaaaccagttctaaaatgatacacaaagttgcagttactgttctcagtagtcattaaaatggcgtagtgttctttcagtgtttctcttttgttagtttttcttggtctgaattcttaagtacctctcttataggtcttgtatttatggcatttggtcccagttattcctattctctgatcagattgctctatggtcaaaaatggagtgatggagaagcatctaaagcccttcagtattactgcctgtatatcattgttttggctatgaatggttagtacatctagtgatggtaaaccttctaatcttacaattacgaagtccgcggctcagtgatttgccaaataattattgccatgcctataatacgagactaaaatgtgtccttctgcctcagggacatctgaagcatttcttcacgcagttgcaaatgaaaaccaaatcaaacgctcaaatgattcattactcttattctcggttatatacgtagtaatgaatgtcctcctaatacggtcagctggtgctgttggcttaattatggcaaattcatttagtatcctttctttcttaattgttccttcactaagaaattacctaattttcattaacaggaaccaaatcatcttgtggtaaagaacccaatactatttaagatgctagtgaacttagtgtgtgtatagctcacaggtaattagtcattaataatgagtatatagcacaatttaaagttagttagcattaagcaagtgagtatttaactttgggtatccaatagaaagatagagggccagtatattcatgtcatacttgcatgaaatatagtaggcttctcgcgttagctgctgggaatgatgcttattaaaccgattcacttctatgttagtaatattgagattgtcttatttttcaacctggattgccaagcagccttgtgaggggtttcattctctatctttcatgataagatcccaatattatcaatctatggtttcttgactttcttaagatatgactttgaggattatgtactctggagtattcatcaagcgattttttcaggtatgcttcagattatttgaaacttatctgatttgttagtaatatgaatcttacagtccaatatttgtttcccctgttaacaggactcttccgcgttttccttttacaaatgcttgccttctggatggacagtcttatttttctcaggcctaattactcttgcatcagagagaatatttcttggatagagaaaacttctggcagacttttgctgtccatctttctatcgggctagcttgcttcagcacttcgttgtttatcatgtagttttctgttctttatattaaacttgctatttaatacattttggctatatcagtttatgattgaaagttacgtaacattctatttcctctacagatatcaacatgaaagacccttcatcaacaaaattattcgattccgcgatcattctgagtagaagtttcaacttcttctgcatccattgttgaaggtgaggcaatgctgtcatgatagggacaaattcagcattgttcggacaaatgtttgcactgaatttcgaaatcaaaaacctgtcacggtcgcatcatcgtaggtcacatttcgtcaactaactggaatgttatatacctgacaaaagaaagtcagaatggtttaatcattgagtatgctaagactaggttaccatcataaaaaaaattgttcttattttagggactttacagagtttttttttcttacagtacagacgagttactaattaggctacacagagtgagttttttgtcctcaatttgaacttcaatcatgctatttattttgaggccggtttggcttatatcttgcttactgagaaccaaatgaagcacacaagttcatgaatagcttttgaccatgagaaaaagaaatatggtgacaataaatttcccatataaattcaacaatgacttcatctattggttttagatttgaacaatgtgggaaaatatggggattcaagccaaagattaaggaatcaagatgttgtatttgactctcttacacctttctctcaaaagccaaaagaaaaccaaagcaaagtttaacgttcacttcttaaaatgggattttcttttttaggggaatttgcattgctgattctaatgatgatctatacatgttttgtgtttcatgcttcatcattttacttttctaaaagagattttagagtgtttatattagcatagtatccttcccacttgaaaatattagaagcttagcttagcttagtaaaagagttaggtggatagaattagagggccaaaaaaggggtaaggatgatgattcataggactcccacgggtgtatgggttgtcctccattgtcactagaaatgacctacaatggtaattataacctttgaaagctttggcaaaggggagtgggaaaaagggggaaaaactactaaaaattatgattaagttgtagactatggattggacaagtgtccaacaaacacataaattaaagtgaacttccatcttccaaaacaaaatgatggtatttttttgtgatttgtcttaagaggttgaatttcttgtcacttattgtcatgctatttattagtcttttgcttcaagttgcatgaaggtatatgcttccactatgcaaacttaagagaaatcaatttttttcttaaaaaaaaaaggtggatggtttatacactaggattccaaagccaaacaaacaggaaagactcttagccaaacaagctataaaatatgccatataatatttcctgagaattgttaaaatgtattattggcgtctagcatctttttcagtgtcatattgttattggtataattaa

SEQ ID NO: 294699 - DNA, 5887 bp, Cannabis indica
ctctgtatgatgatctatggttttagttttttttacctttctaaagacctaaactctaaaaatatataaagtacgtttagagcaaaaacgatgtttaagtactgttgtgtcatgaaatggtgaaacttaaattctaggcaaaagatttgtaatgaaggtgctatggaaacttaaatataggatatgcaaagacgatatgtttaatgataaatttataataattaattggtttgcgaaggtttacgatgaaatttgataaaaattcatgcaagacatgtctttccactcgaatattaattaatttgaggtgatttttccgttttttttttgtatttttctcttctcgaaatcttgacatttagaatatatgtagaatcttcatttggagtatacatagcaacaattttaattatggtcttgaacttcaagcttgttaactacacactttatagtttaaggttttacacattttaaacatgtaaatcttgaaaaagaaaattactataatttaaaaaagcacatctcaaactgatattctagagaaaatttacatatcacaagagtttttatcaaattttatcgcagaccattgcaaaaccatcagtaagcattgtttttgcgtcaaagatcaagtatcatagcatcatcattaagtaatattgcaaaagtatcgttaagtatcatttttgcctaaaaaataaattttcatgacatcatcgttaagcatcattaaaattataattttattcaaaatgttgatttaaaaaattttggatatatataataattaaacatagatgtgttttcaaaatattcaattaatttttttttttaaatgaaagtgagtttaagtcatggatttgattttcaattgaaacattaaaaaaaattaacaaaaaaatagcttctttagtattagtagtagtttacaaaaatatgttgtttaagttatactttttaatgattttttttttaatttaaaagctcagggatccggggtttggggtacgtggttcggctctgggtccgggtccaggtctgggttgggggttcaagctgagggttcgggtccgaggtctggatctaggtttggagtctgggtttgagtctagggttcgggtctgaggtccgggtttggggtcctggtctggggtctgggttaggggccaggtttggggtccgaatcagggtcggggtcgggggtccgggtctcaagtccaggtcctggtctgggtctgggtccgagtcggggtctgggtctatgttcggttccgtggcagggaatgggtccaagtctgggtctggttcgagtctagggtccgaggtcgggtctgagtctagggtcggggtcggggtccaaggtccaagtccagttccatagttagggtatgggtccatgtccgaggtctagggctggggtcgagagttaccctagactctttgtgaacattataatacaagctaatatatgtcatttgttatttattaattaatacgacttgcattatattaaaatttatgatcataataattaaaacaatacaatgttttattcaaacataatgatatttgttatttaatacaatacgactcttatatgacctaccaaacgagtcctttgtaacaaaatttactccaatagcgtgttaaattgtgatgcgaatttatcacataacaaaaagtgatccaaatttagatcatagtacaattattgtcttgtaataagatataggcaccacaaattgaagtgatagaatgtgatccaacaccacttcaataacaaaatcaacagtaaatctcaaccccacaattaattcattgtctcctctttatttctcagcaaaataataataataataataattcactctctttaatttgcatgatttttggaaacccaaatcaaacttttctattatgtttacaatttaaaacatactaatcagatttgttaaaaaaaaagcatactaatcagatttataaagcttatatatgaataatactaataataataaataaagaagctcctactaaaataaaaactacttctaataaaagtctttctagtcacaacataaattttttgtgactaaatataattttaggactaaaacatattatttaaatacaagttgtcactagtttaattttagtcacaacaatcattaggactaaacacatttaatcaataaattgtgatttttgtgactaatacattattaagccacagaccttttaataataacataagaataataatttataaaatcataactttttcgcttttagtcacaagttttattgtgactaaagactaaaagtaaaatttgttgtagtgcctcacaaaaagcaactgattaagcatatatcaccaatttttgtaaagtactcttaatttcttgcatatcataatttagttgtgcatacattgacaataaaattataaacccttattatttcaatgatgaatgtgttcattttttttaaatgagaatgggaagaagttcaaatgcagtaactaagtagttgctagtataggagtcatttgtccatccagatcacacacctgagacaactaccttcaatgagtaaatcaaaagctttgttgatatcttcaaacttgacctcgtgtgtcacaaactcatccagatgaagttcctgttctccaaatgcataataaaataagtgattagtagttgtaataatcggttttagactcttgggggagtgactatctcgaattagctactgttattctttgtattcttgtattgttggacttacagaaattttagtcccattatagaagtgttaagtatttgtcatcttaggttggaagaaaatgaatagaatagattagagtagaaaattcaatttctttgtgttttggttactcttcctctgtccttgcaagtaggtacatgttagaacttcaaatcccaactcaacctagaattattccaaaaaaaaaacaaagaaaaatgtatgctaaaactacagatttaacattcatgagtattattaatgctatagaagaaagttacatcaaaagtagtaaaagtattaagtgaagtcaccttgtctgtatatcgcttgagaaggataggaatatcagatttaggtttgagtccaccaaataaggctcccaataagcatttcccagtgtgtaggatatcaaatgagggaagcctcacctctgaccctggcttatccacacctaacacaactgtctttccccaaccctgaattattaatttcaacacattaaccaaccaaacagattcagttctactattgctttcctactagtaccgatttttctttttctttttatgtttgtgtttggagtaaaagcgaaaaaagacctttcggcagctagcataagcttcttgaaccaaggatgcaagtccaacacactcaaaacaataatctgcacccccatcagtcatcttcatgatcacctgcttgtccataaagaattatgcataccaagagttataatttccaagaaccaactgtattaatgcttctttatctctagtgtggaaagataagagtatatataagatctatgggctgcttctctcaattggtttgagatgagactctatgcatcttacaattctaacagaactgaagtagatagaaagcaaaagtttaaggaaagacctggctcaaagacttgtccccacagtttgctccattaacaaagtctgtcaccccaaacttctttcctgtaaaggtccaaccacagcatgttaatcaatgaaaaataaagggttcaaagttaaagatgagatttactaaccaagttcaaatttatcagggttcacatcgacaccaataattctggcagctccacacagtcttgccccctctgcaacctattgaaaaaaaacccattagcaattagcttttttccaattacaaccaaggaagatgaatcaaagcataataggaagatcatacagctaaaccaattgagcccaatccaaaaattacaacagtagaccctgcctccacctcagctgttctccaagcagcacccaccccttaaatccacatgtattttcattcaaacataacaatccaaaagaaataagaaaaagcaaagccaaaaattacaaataacaaaagttgccattgaacttttttttattagagggaattgctagactattatttgtgattacatttaacatttttaattgttttattaaaatgtgggtcgatgaatagatgattaatagttaatgagattagcatttgtgtgaagtctagttgaaatagaagtgtgaagtctagttaggtccctcccgaactctataaatacatattatctcgtcacaattttagttgatctattcatcagcttttttttagagatctaagaaggaagaattagtagattagtattgcactaccaaactctattatttctcaattaatttttatagaacatgagatatgttttctatatcattgaattattcatattgttctaaattataagcaatattgtatcctagtgtattataaattttctaacagaaaagctggaatactaacttggttgtgttcaaatcaaaataaatatatatattagtggcataaccaagaggagtcctacctgttgaaaccccacaactgaggaggcaggacctgtttggagggatttcagagctaatttttgtaagattggagatatcaaccacagtatactcactaaaacttgaaacaaacagaaaatggtacaaagggtctcctttgaggtctgtgaatctggtggactcatatctgggcatccaaggtgagaccttgaaggggaaattcgaacagaggttactcttctttgatttgcagtctaaacactccccacaatctgaaagaaatgttgggatcactctatctccttcaactacttcattcacatcttccccaacactctccacaaccctgcagcagatggtttggtccaaacataggaagccgaaaaagattaatatacaaatcctaacttcttccaaaacgacttttaaattaaaaaagtacaagttcaggtcatgattgacttaccctactgcttcgtgacccagaattcttggacatattccaggaaattccttcattagaaaacccaacaaatgaaatttgataatgtagtgctagaaaaacaaaatggaaagaaaagaaaagaaaagaaaccttcattttccaaaatgtgacatcgctttgacagagtgagctacatataatccgaatccgaacttcacgaggcatcggtggcgccacaaagatttcctcaattactaatggctgaccaggctctcgacaaatagcagctgaaaataatgcaaagctattatcagtcagtcttccatggaattgaaatttgatgaaaaagaaaaagggtacatacccttgcatcgaatgggcttccctgtagtttgagttgaaccttccatagcttagctgaggttctaggaagacacagagtgagaatgcagagcaacccaaaaaaaccctttaatggaatgattagttatagccaactaactacttcttaaactaaagcttttatttcattgataatattaaggctccactccactccacaggaccacagctcagtgacactgacagctaacccaaccaaaacaaccacttttggtttggtagttagagccgagaaacaccatcaaatcatatcgattgtttctcgggaaattttatcaatttgatgatgatgacgacgattatattcactcggttattaacgataatctcatcttattattacgagaattgctgttgggcttcagcattttttataaggattattttacaaatacacaaaaacaacaaaaaagttataaaaatacggttt

SEQ ID NO: 294700 - DNA, 1160 bp, Cannabis indica
ttcaataagttgctatttcatttaaaaagaaaaaagagggacttttacacaattaattaaaaaggcaaaaatatacttttttttacaaaaataatattgttgttttcaccttgttttatgttgcattatatttatactattatattttttatgttgctttgatagggctttataagaaaatgaaattaaaaaattcataagaaagttaattcattttttttattatttttttttgaaaagtaatagaaactttattaatcaaataactttaattatttcaataaaaagaagttagccaacaacgatattcttactaaacccacgaattgaatagaaacaagagtcacgagcaacataatgagtgattttacttacagaatgcttaacaaagtgaatttttacaaactttaaatcagctaataaaagcttataatcttgtatcaataacccaaaagaaaacggcatatgaaccgagctttgtaatacttggaccgttactaaaactatccgagttgaacattgtctcaatctcaactttttttttaaatccaacttaatgcctccttaatttcaaaggcttttgctattacaacatccacacaccctgatttgctagtagaaaaagcttctaaaagtctccctgagctatccaaagccacatcgctagccctaaaccattcttcagacataaatattgcacgcaccatcaatatttatcttaatcttgttcgatcaaagctgatttagagcaatgctcacaaccatcatccattccaaaagaaataaataaagacccatgttttttttgagcaacttgttattgattaaggacctcttactgatagaactactttcgctgcaaaagagcttctttccttccaaaccaactcattcctagttatccaaatagcccacccaccatattttttggttttatctattgggctcagttcacaatatattacaaaactattactttttttttttttttcttataatttcaaatgtgtataatatttttgggtcttgggtttgggtgggccctaaatacagacttagcctgctttagttcaggatcgggcctgctcccaccagactggttcctacaggccttcacaaaaggacagttaactagcaggtgaacaatagattcttcctct

SEQ ID NO: 294701 - DNA, 4445 bp, Cannabis indica
ccattggttatttaggagggaaatatcaataaaatcccttattttctctagattagcctcgatatcccttacatttactatgaaacaaagaaaatttctagagaaaactccaaaacaataattctttaggttcaatttaatgttatacttcctcaaaattgaaaaacattcttcaagttcaataacatgatccttaattttgattgatttgacaagcatattgtccacgtatacctccatgttttgacatatttgatgtcaaacatgtcatttatgaggcattaatacgtggcttttgcattttttaaaccaaaaggaatgaccttgtaacaatataatctcatatttgtcataaagcttgtatgatcttccttaactacaatcatctttatctggttctatcttgagtaagcatccataaaggacaagagttcatgcccagcagtggggtcaacatgctgatcaatcctaggtaatgggaaacaatccttttggcaagctttatttaggtcaaagaagtcaatacaagttctctaggtcccgtttggtttttgtaccaacactggatttgatatccaatttgtgtagaatgcttcttgtatgaagtcatgggttaacaatttatcaacctcttctttcagtgcatttttcctctcaaagctgagaatatgcctttttgttgctttggaggataatgagagtcgatgttgaggtgatgacttatgaaattagggtcaatcccagtcatgtctgaatggctccaagaaaattgatcctaattttccacgaggaagtgtattagttgctatttcaattcttctcctaaccctttgccaattttgataaattttgcagggttatttggatcgagcaatacttcttcaaattcctcaactgggccaatataagattgttcttaacctagtctcaggtctagatcctactcttttttcttaatttctttggttattgcaaccatcaattgaagagagttagcccttctttgtaaatctatattgtagcattctcgagctaataatcaggcaccgttgacagttcttacccattcaaggttgggaattttagtgacaagggttttattgagctaattgtcgttggtcttgtcagtgctgaccagtatctgattatacactgaggggaggtcaactactaagaactcttgcattaaagtcattgacaagggcaagtcttccattgttatggggagcttgaccattcccaaacttgcaacgctatctcctgtgaatttgcataaatttatcatgcatggttttagagttatcccctctaacgccattttttaaggtttctttatacagaatgtttactaagctcatgttatccactaagattctcttcactctcttcgttgcaagataaatactcattaccaatggatctatgttgggaactcttccttggatcgcgtcgtcatcagtgaaagttattgaggctccccagtcttagctctttttacctattttggaggaaaagctgaagtttgatttttaacttggtttatgtatcttttttgtgcaatgttacttgttcctccaaattaaggtcccctagaaattaccaaaattccctcaccttcaacgagtggcagttggacaatttgattttaattttggttatggctatgagcttgctctatacccctactcttcacttattgtctaaagtaacctctggagattaggctttcaatctcatatttcagttgtcgatactcctcagtggtgtgccctatatctttttgaaagcgacaatacttactctggttcttcttattccttgcattcctcataggttaaggttttcaaaatgcaaccatattctaatttgtgaggaatatattttcccgtgtttttatcatctcagtgtacacggtataaatcgggacatacttttcgaatttcttttgtttttcttgtcttttgacgagtctttagactcatatttcctttttccatgtagctcatggctcttgctcatgttagccatatttaccttggcattacttgagttgaaattgcctcccaaaaaatccttaaatatttttcaattaaatcggagcttttcttttctgacataaacgagagccctttcattgaactcgtttattaatttaactgagatcaatgcaaatcatcccaatgtttgccaccatctctagacaaaccagtggttatccaagcctagagtgttgtcaactgaatgctatcattaaagtatttgacctttgctactgttgtagtaaagtgacttagaaattcttttagagattctccaggctgttattttatgtttgtcaggatgaagcttctagtcccctatcccttgctacttgaaattgtttctttcattctttagacagttgttcccttgaggttatacaatggttacttaatttatcaagccaactactcactgctcctgtcagcaacgtgggaaacagtatacaacatatgttatttgagacattactttcttgcattattgtattaaagttattcaagtgagcaactaggttcgaggttctgtcatattaggggatataaggatttttatatccttttgggaattgtgaattcagaatattagggtgaaaaggtttttggtcttcattcttgtcgttatttctcatcaaataaataagggaaaagaatcctattgaaaatcttcctaacccatcaaccgcttccttcatagaacctgaaagttttccataatcacaatcctaatatttcttgaattaatcctccaattgaattatcccttgttgacttgttcatctactcgctgtgcatttttgttcaatatttcccttaaactgggagcttttctatttatctgctcgcacagaccagggcgtcatcgtttatatgatcgtgaaaatttggttgatctcgcatgttttagcattgataaggtctgtcgtcataattgctcacagaacaacttggggagatactttttgattggtaactttggaagttactcatattttcatgtttgcctcgatactcaaattaaggtgttctctctcgacatggtgggttttcccatttatcggaccttaaagattacccctgccctcgattctctgggttgtattagcctaggatccttgtggtaattcttgagtggccttcgcctttcaaataaattggttaactttcctctacacatatacatgtacatagtgtctcttccttctaacctgtttccgtgtggtgtacgtgaagggcaactagacaggccatgtggttgatcattttcattttcatcatttttttggaacacttattgtcccctcgtccgcatttattgcgaggttctagcaccctgattttgggggcctcgcccatcaatagaatgtcccttgtgtcccttggttattgttcctgggggtgagtgggattatttgatctatattcttcagtgttaggttattgtgcccttctagtttgtgaattacagggcctccctcccagacgacgtgaaggttgttcctcctgtaaagggggagcatcattttgagtcactctagccgcagcaattgcttgttcaaactattgattcctttggttggattctacgagcctttgacaaagttgttgattctctaactcactaatagggatgtattttgtggggtcatatgcatttgactccctccttttggaaatttcttcctcagggttgtttctctcaaaattccttttagtaggacctcttcccgtgttggtttgagtctgtgccccttgggctcttttcttggtcaccttgttgtttcctcttccatagcaggctcatcataatgagttttcttcgtaatgtggtgaaaccataaaaagggagatgtgtttcaagttttatttttactaaggctctcaagtaccaaattgttacttcgtaatttcattaacaataaatgaggccatgaaaactaaagaattaatattaatactaatatttaataaatgtaaatacaactttcttcaacacaaaagaattttacatggttttgtagttaaatctgcatactcaatgagtcattcttatttttgaatctttttgggaaaatgctttgattacagaggaattgaatgttcactcagtctcacaagatctctccttccaaataatgtttgatccctttatccttaggttatgcccctatttatagtaggtttagcaatgatagttattcccttttgatcttatctaagtaaccgttcatgaaatgtggacaatccccatgtttcatatttacaacatgtggataaaatgaattaaccataggtaactatcttttgttcttatcttgatgcagttttcctttactaagatgatacattgttggattttgttttacgaggatctagatttactaacaagtatgtttcattaacatc

SEQ ID NO: 294702 - DNA, 5003 bp, Cannabis indica
gtaaaacagagggtccaaaataaaatggtatttacccttaatttaattatatatatatataataatgcagacagattaataaaaattattagagtgaaagtaatgaatacacataacatgtgatgatttcacgtataccttgaccgcagataatgagagtttggaaaaagatgatttttttcatttcaattaaactctaattaataattaacattataataatgtatatttaaccgtgttaaatgtatgatgtatccataactagattgatagatatattgacccaacttatatggattttataaatgagttatattggtgattgtgttgtgttaggtcgtggattttgagttcgagctttcgattaattaaacaaataaactgatgtgtttaacattttgttgtaatacgtgagccaaactcaacatgcacccctacgtacgaagaccttgagtaaaaaacaaaggtgaattctctatagtgaggttttttcttccttaaaaaaaatgaagaatacttggaaaaattacaagaaattgtccattcgaaatataggcagcagattaaattaataaaaagaatacgataaatgcattttgactctgagtgattttgtgttttatcttcttaaaactaaagtatatatattggaatagacacagaaattctgatatatagaagtttttcttttacttttaccatatttgtttcttgggcttattaattataagtatatatagtctaaagaggtaaaaggcatattaagtaattaggtccaaattacaaacaaagtatgcttataataaattaacttttgcaacaatatatggttgctatccatgatcacagttcacaaccataaaaaagtctttgttcccaaatgaaatttgagctataacctttttttatatatatatgtaaggcatgcatacatacatatatattattacaagttacaaattttttattgaactttcttatcaaatatatagctgattaataatattaactcttccctggcctcagtactaataattatatctcaaattagggtaatatttgttcgtactaaaaataataataataataataatataactgatgatgatctcgaacataagcatggattttccagctggctcaccagaaacccgcatcgatgtgggattcgactcggtttcgggagcggaagcacctctactcccccctccgacaacgcaaagttgcgttagatcatcagtaccatcatcatcatcatcgtcgtcatctaaagtacccgacgagtttcgaaatttccgcttatgtttgaaatggtgcgccttagaccactccacattcgccggcaaatttatatcctacattttcttcgtgctcttcaccttcatcgtccccgccctcacggccgtctccgtcaggcagaggcagtcgacggaggaaggcagtgaagacgattccatggtcatctccttcaacacactcgtccagatacccgaatcaggcctcacaatcatcgcattcctcactctctcacggttcttcaatgtacggactccgtcaactcctcttcctcgattgcctcggcgaagactccatagacattcgtaggagatacgtcggtgaactcgaccgcgccttccggtgcctagccggaatccttctgccgtcgttcttagtggagcttgcacataagatcgttctattctcgtcggtggagatttcagctccgttcggttcatcttcgggtggaggagtgggtccgttgaactcggtggcgttcgttgcggttctggcttcgtgggtttacagaagcggggctttcttggttgtgtgtgtgatgtttaggctgacttgcgaactccaaatacttcggttcgaagggttccagaatcttctagaaggatgtgagtcgaatagtggtttgatattccgggagcacgttcgtatcagaaaacagttgtgggttaccagccatagataccgtttcttcataatcggctgccttgttaccattaccgttagccaattgggtgccttgttgctcgttttagcttccaaaactcacaagactttcctcaactccggtgatcttgtggtacgtaattaattatatatatatatataaatattatttggtacgtaattgaattaaaattaataataataatttatattttatataggtgtgttcggctatggagataagtggattcttcttgtgcttagttggggcagcgagaataacgcacagagctcaaaggatagtgtcgatagcaactagatggcacgtgcttgtcacatgcgcatcagcagctggtgggccggacccatccaaagcccattttctagaagccaattgcaaggatgatcagcagaggtgtggggagagcgactctgactcatccgatgacactacttttgttaccgtttcttctcacgactcttcctccttccaaactagacaggctttaggtaggttggttcctactttattttaaggctaattaggatttttggctgaactttgacatataccaaatcatgcctctaaacttttaaaatcgttaaaaatgtcccctgaactattgagattattggatttaaagaattttttccaattttagtaaaaaagtctaacatagatgaaagtttagagggaaaaatttagtatatgtcaaagttcgaggggcatgatttggtagatatcaaagtttgggagcataatttaatacataaacaatatttgaaatagtaaaattgaatgaaatttgacaaaagtccttaaatccaacaatttcaatagtttagggacatttttaacgatcttaaaagttcaggggcataatttagtacatgtcaaagttcagtagataaaaatcctaattagccttattttaatttattattatattattatttttcatttttcatttactttatttaattatatttatatatatatttatatatatatatgcagtggcttatttgcaacacaacaatggaggaattactctgtttggatttgctctagatcgagggatgctccacacactcttcgcattcgagttctctctggtcttatggattctcagtaaagtggtcgttttgtctcaataaaataaattaatctatccttatttttaatcagttatattattaatttatgctgtccctcagatgatcgatcttaattatgtacttattattataagccagattaaacacattattattctttctttttggatgtagttactaaacacattattaattaattactataggataccaatttattgatatatactcttacttacatctagttttcaaacaaagttttggactttatagcactaaatttttgagggaatctgaaaaaaaaaatcacttttatggggaaaaatgtgtttatttaataatatagtttgtatttgtgtaataaatatatttattatttaattttaattagttatgtttaattgtatagcatacattttgtatttagccatgttaatccaacatacgagaacaaaaaagatttattagcgatgaattcgttttttgttgctaattaatttatcaacgctaacgctagaaaggtcaccaaaatttcaacattttaattttaaattaatattcactgcaacaaattttttgtatagctgcgaatttattagcggacacaatattttcgacattaataattggataattaatatacatatatatatttgaatgaacaataggataatataattaattgataaaaatatattaattatttgtagtgtccattcagtcgctaatgtaaaaaaaaatattatgaaaattttttcgattatttttttttgaaattgctactattaacggtgagattatttgcgcaaatacttcttattgctaatacttcataaatgtttcataatgtttattaacgacataatactttattattaggtgcaatacatttagcctctaataattttatatactccaaatttggagtcgacttaattgtttctttcatttgggacacgactgaaaaaaaatctcaacactccatttttgtccctctaatttcgtccttcttcagtctctcttcgagtcgtccttgtctctctatcattgattccatctctctttattttttttcgtcgggtgcgcatgagtttcctctctttttgtttaaaattaatatttataattatttttttagtaactgagtaatatttattaagaagtattttgtatatattttatgttataattagttattaatattttttttttttgttgaaaatagagatcgtggtggtggtccaatgatgaatgcggtggtaattcaatgatgatggcgagcgacataggtatttatttttcattattttttaaagtatgtgtaaattatttatgtgtttacattagcatgtgtctttttccaaattttattatttttttatatgtacagttagtaaataataatgtaaataatatgtttatatgattatatgattacatgtgtaggtattgtttgtgcatatcaatttatctatatgtatattatattgttaatgttaaataaaacgagctgcctttaaagtatccaaattttaataaaataattatagtacaaaaaattattagtttataccaaaatacaaatactaataattaaaaaaaactcttgattgagagagagagaaacagagtgaatctgaagtgtattctcattattgaattaaatagcaataactcaatatatacaagatcttaataatataaggttaataagttattgaacaattgataaaaatacagttatgtagattgttatacagttaacataattctaactaacaccctccctgcccgcgcgcaaactgagcttggacatattaccggaggaagtccaccgctaataactattaccagcgaatcctattattaccagcggaccttcgcccttaatagttatatatatatatatatatcagtatccttat

SEQ ID NO: 294703 - DNA, 4772 bp, Cannabis indica
aagaaaaaagtaaaaaaaaaaaaattaatttaaatttttttttctgattttttatttatttttaaatatctataattattttttaaaattaatattacgtggaccactaaaaatttgtcacgtgtacaaatgcgtacacgtggacagtttatcgtggcatttaactgtgatttttggacggaggtgtgcacagcaaaaccggaacgtttaggtagttcagctaccaaaatttcaatttttgtggttaagtgttacaaacggtaaaatttaggtaatttaaccgccaatatcaaaaataaataaataaataaataaaaaataaagattataaaagttaaaacaataccactaggttattgatatattaattgattaactgattttcaaattcataaaattgaatgaatccgggatttgataccaaggaagccctatgaaaaggaaaaagaaagaaaggaaaatagtaaaactgaaacctatctctttctctctctctttctctgcttgcggcggaaggagcaccgtcgaccctcccctctcacctcaggtggaccgccgttcctttttctcgaaaccccgagcccagcttccctttctccctgtcggtgctctcgttaccacggcgtcaccaccaccgccacttgaagcgacgcaacctgagaactcacggaactcgaaggttccttccccctcgcgaatcccgacgttgtttctcgacaaataaagcagtaagttaaagttgtggctattatttggaaaacagtaaaattttgattatttagctctgaaaatctcaacttgttgggtgagttgttcttcttatactgcgtgtataatgttgagttattattctggataatgaaaattatattgaagtgtttgttaagcttctcctattttgtggtcttcttagtgtcctttattattggaaagatgggttttttatattttaagatcaatcgactcagtataagtattcataaccaaatttttatatctccaatttgacatatgtaagttgttttaattaattagacagtatatcatcaaccagcagtacaacttattttacaagctcaagatttttgtttatcaattcttttaaaagttggattagtgagttctgatatggctctttacttgcatgtcgtctttttgttgctttaattgatttgagtgaattacatggagtattattatgtactctattattttgtgtgtacatggatagaaaattaatgggcttgtgatctgactgaaacacaaacacagccataattaatgtctttcatttttgttgcttaactatccaattagtgtttgaatggggatcttgttatactttacgatcaggagtatagtaaatatgtatgataaaattgaatctattgaatttgacatatttaagcttcaatagaggatagatggagtgttgaaagttgtgtagaggcttatgggttataaaattaaattattcattagagaattgattgcttctctttgcctacttcagttgaaattcttcgtaaatattcattttccaggttttaaacttgtgattttaaattttgtaaatgatttaatgatgtcttcaacctctatcaacgttgttttctacttacaaaacattcttcgccttttatatattttgttttatatatattttactaactcttcatttgtttcatcttttaggagctatttcatttttgttagggccatcatcacatttgaatttgatatgtcaaagtgtaaacttaggtgtttattgattaaatgatcttgcctgttcatatatgttttcttactacaattttacatatttctagattgtattctaagactcaaaatagtgcacttgcaacgcaagtgcctctcccaaccttttggaaagaagtgcttatatatctttatcattatcaatttattcaactattttttaattaaatttaaataatatatttacagagaaaaagagagagaataaaccctaaaaattccctcattatctgagtctcaaagaacctcttcggttcccctgcaagtttaacagctccgactcaagctccaatttcacaaggttttccctttctttgtaactgtgatttagagaaatttgttttgaaatcgagatgaagaatcccaataaccaattttctaagttaaagaaagtagagtttcccgatagtgaagaggacatcgaatcaccattgtcatcctcttcctctgaacatgtgagtaaccattgactctgaaaaagctcttttttttttcttaacaatattgatgagttagtttggataaaaaaaaagtattattttatcttctgggttgataataggaggaggaggagatagagcgggaactagcagatgtgacattcgaggagttgcagaaggcacgctctaatgggtcacattcagtgtctagaaaggacaacaaagagaagaaggttggtcgtgccaataagaacaggtaattctagtttgaatatgtatacgcaagacgcacacattggtggttatgtggctgatgaggttgctaatttatgtgtatttgtgtttgaagaccaatggaagttagttgtaagaagccagttggtcgatttagagatgttgttcaagctcctaaaaaggttagttttgttgataattgtaggtttttaagttatatcatgtttaaaattggtatatgagtatatgggatttgattgttttgttggtctcgtgatgttcaatttttacattgttttggtagtttgcttaaactgtttttgaatgagattactaaggtggctgcttctggactatgataagagaaacatgaccactactttgttcttaaggaatcctaacttcctgattcatcatttgtttattacacattgtaaaacactaaaactgattgagtttcttgtgtgtattagctccttatgttgtagagctttattatttaacagatcttattcttaatgtttttttaggtcctacgagacccacggtttgagtctttatgtggtacacttgataatgatgggtaagcattcagtctcttgaagatgtcattcttaatactaatatttaccaacctggaaatgtgtatctatacatatatgaataataataagaagaaaaaaaaacagaaacaaaagactgtcatttaaaggtcacagtttgagtttatgcttttgtcatgactcgcaagttggttatttgattttatgttttgacattatatactttttctaaataacaaaaaaatgttttgacatatatatgattgtgtgggatcttcagctttaaaaaaagatataattttcttttcgaggaggagcttcctgctgaaaaggaggtgagtttcttgactagttgtgttttctacttcaatctcgattttcctatttgttgagttttgacttggattttgcaggaactacgcaagcaattgaagaaatcgagtgatccagaagtcgttgaagagctaaagaaccaactatcttggatcgtaagtgctttgctcatgctattcatttacttgaacaccttcctttagattttgtataaaatttttgtaaaatatttatggtttttctgttaattattgcagaacaaacagctgaagcctgattcaacaaagcatagagaaaatgctattttggctgaacataagagaaaagaaagagaagcagtaaagcaggggaaaaaacccttttatcttaagaaatgtacttctttctctccctctctcatgatttctctttctcgatataggtaatctgtataataagatgtatacatgatccaatttgactccttcttgcatttctaattgcagctgatgtccgaaaacaacgactccttgaaaaatatgaacagcttcaggtatgtagagaacacgggacatgtattataaaatcactttcgcagcaagtctggatactaaattactaatgaactattctcatatgagcagggatctggcaagcttgaagcctatattgagaaaagaaggaaaaagaatgctgcaaaggatcaacgatacatgccttatcgcaagcctatggagaatcagtaacaacaaagttaatgagctgatttcgtctttaaatgtagcatataaatcttccatcttttatgttatggtggtggagacattccctgctcttaggttgagactcccacaaggccatatagatgttacttgaactaaacacagtggtagaaggaaggaaaacaatccatttttgtgaattttggttcaccaacttaaggcatgctgttgatggttttggttttccattgcatcttaatttgatcccatcaaatcagttttgggatgttgatacttgatggtaatattattatttttaaccaaaaaatgtattttttttaagaaataatatttacatattgttttatctgttatgattgttttggatacattagttgagttatcttacttgtaatattggagaaaaaaatacaaagtttccaatcaaacggtgaccactgttgtcctaatgtagagtgccccatggtacagcctgccttttctattatttatttttcggttacaagaaaagagtatcacttggtgccacccacccatttgatcttagataattttggggactagattttatttagtgtgatatggaataaaaatagggattgtacagaattttaaatatttttgtgattttatttacagaaaatgcggtttttttatgttatacatttattaatttgttgttgaatttttgttatatgtat

SEQ ID NO: 294704 - DNA, 4810 bp, Cannabis indica
tttttttttcttttttgaaggttacacttacatgagctttcttccctaatacttttatttcatgttggaagaaagagcagagcacaatgataaagttgctcaagccatatttttgcatcttattctttactcattattatcaaatttcatatacatgtacaaagacagttactgaataaaattcttcctattctatttggtttaagataaacattttcctttctgttttacaaataattagcattcttaagttgtcaaaatactaatgttgtaacaaatattaaatactaaatatataattcttgaaagtggtgtatttggtgtaatcttgtactttatcatagaaatcatttaaatgagagtatccataaataatggttaacaatccaatcaatcagttatatacagtttcagtgtacgtttagaaaaactgatattgcaaagagctaagaataatgtatttacaaattatttcgacgaattatcttgacctcccttattgctgacatggtcaagaggtcaaagaaagacaaaactacaaacacttgtcccaaaatttggtgagcccacgtatctgttgttttctcttccatctatccatgaacccaatggggcatcagaaaagtaaacgagaaagcccaagaggcagttttcttttggtggctgaatgtgtatacaacacagatataaaactctgatgaatcagcttaactactactactactaatcttgactgattctgaacttgacctctcaatctcatgggaaaaattaacaaagctaaaggtttaaggtcccttccaacaggcttctgagattgttaagtccttcagcagatatgcttcttctgactcttggcctttctaccaccacttgaggaggtggatccaagtgaaaactcaccattacaactgttaaattgtcatccgctcctcgttttattgcctcctctactatagccttgcaacatagtttcacatcattgtgttcctgaagtttctttctggcaatgtctacagcgttttggttgctgaagacttcccatataccgtcactaccaataatcaagaactcatcatctttagtcaatgtgaacagtctgagttctggttcagcactcaagggacctcctatgtcccccatctccttcattccttcaaggtgccaatcgcctaaagctcgggtgacacctaactgaccattcaaataaccatcatcgacaaaaccacctaaagactcgacccgtgtcttttctttgatgcagcagggcctgtgatcccttgataattcgatagctcgtgcacatcgtgacaatactgcccggcaatcaccagcgtttgccacaagcaaagatctgttcaaaatatcatcacaattgtatagtaaaaacaatcaggatcaattacagccatcattacagaaggatttctaccagcctgtgttttcagtctcaaattcaatcaaagtttgtagctgttacttaattaggtttttgcataaaatcaataatgttattctcttaagccagcttgttctgctaatgtcacttccaagagaattcaatctgatgatcatagctcctactctttgtaggataacagataatatcaaaatggacagattatctaagatgaaaccgaaacaaagaatatgcttaccttccaaatatcattgcagtaagtgcagttgtgccagaagaaagggatgattcaatagagcatgattttgcaaatgcagcatcagtctccatgaaagaccttgttactaccttctcaagctgtaaaggaaagtcagcatcctcgacaataattcttggcaaatggtcacgaacaaattgtgctgcagcctttcctccatgtccatcaaacacctaatcattcaaatcaaatttgcattaaatttatgaggatacttcattgaaattatttatcattcgacactaccaggtaacaaaacatatatccaacaatcattcatgcccatccgactttttattttctttatttgttggtgaaatttacactcccaggccatagacttatgcctgctcaacattaagactgcaaggctaattatcaactaaaattgaaatttagataatttggtaatgaaaagaccaagaatgatgaaacagtattcccaaaatttctttatcaaagacagaaagcaaccatgaaacgatgaccagctaaaataaaggggtaagagtacttacaccatagaaggagatagcttctttgttgagtagattaaagccatatttctcagccaggttactaatgcagacatgagtatcctccatgtaaggacgactcccgatatccgaccactctccagatcgaagagcagggacaaagttaaactggttttgtttgtctacaattaccctatcctcagaaatgctctctagctacaaaatatcacaaatggtaaattggtaatgcaactatcagaatccaatatagaaaaggatgaccaaagtaataaaaaaaatataatgcaagagaagttgtctccttcatcaatactgtattgaaatctctgcattaaataagtcattgattatacgaaatcaagttaagataacaaaaacacgaaagaattgacacacaaaaccaaaaaaaaactcactgtaccttcaataacagccaacatattacatagcataatgaaagccaagtccaattatggaaagaggtatgcaccgacaggtagaccaagtacgaaacttgattattagattctaaaaatagtctaatttactctgttgattcctacttttactactaaatgtcacaagggttaccctcacaatatcagaataacaggaagttgagcctaaattagtagtatctagaatgaatcttgaacaatgccttagaattctttaaataagtcttaagcatcaataaatattataggtttcaatgaaagaatgaggggtaaatataaaagcataaacagaaagaaaatatagaccaacaaattaatcaatcaaagcatttataaatttttttaaaaaaaataaaaataaaaaatcaaatcaaaatcaaccctcccaacccaagaacacagtttttgaccgttcagatactgatcgcttccagccaatagcaaaaaaggcagtgtttgaattcacaaattagaacaaaaacaaattccataatacctaagctgaaataagcaaaaaaagaaaaatccaatccatccaagaaaaaataaataaaagaaagataataacccagaacttcataaattaagcaaatgggtctctgaaagttaaaaaattggagatgacccaacaaagctaaagggcaaagaatcacaaaattcttacaggaagtgaatttgggatgaagctcaacacaggagattcgtcattgaaattctccatctgggtatgctgcaaaggcttctgcttgtcgttattgtcaccgctactgctgctgctgttgtcaagatcttctcccactgtttcttcttcaacttgctctaagtctttgacacacatgacgattttgctgctggtgatggtgatgagatgagattgagatgagagtgtgtttgtttggtttttcttttcctctctttcctttctaaccaactctgtagtttggtctgtgttaccagcaaaggaaagaaaatgatgaaatagagaaaagtatatatgagaaaagattctcagaatatgtgaaaaaattaaaaaagaaataaaataataaaataaattggtctgtttcttagtaagagagagaaacagtgatttattatagaatcacatcacccattcaaaatgagtatatggatccatttcttttcatatttacatagttttaatcttgaatattttatatgtgcttaaaatatgaaatttttagaggactgttattgaaaattagtagagattaatatttctatatgtaccatcttatattagtgatattggctaaaaattatttattaaattatatggaacttgatacttaattacacgaataattaagagggtgcttagcaccaatagtattttttagcatttttttttatttgtgcatttcctatattctgtaaatttctcttaaagttttaataacattgaaaatttctcagaaaaaaaaatattttgtaaatttataagaaattcacaatcatttaatatattaaaaataaaatttaaataattatttacatgtatctttttttatagtaaaataaaattaattaattaaatcctatattttgtatataaattatcttaaacaataatatatattattatttaaaataattaaaatgataattactcagatattaaaatatatactaaaatatttttttatgattaggttcgttatagttacaatatttttataaatttttttaaaaaaaattaaatttacattatcaaaaattaatttaaagtttttcaaaaattattagaatttttttaaaaaaaaaacttataaatataatattataattataattaaaagattataattaaccctcccctattaaaaatataaaaaataatacatcaatgcacactttattatatttttatcaaaaagcgttgctgaaaattagttggtcgtgtttataataataaaatatagttttcatatgtttgggtcacagaactcggtttggtgatatcttattcattcatatttatttggctaaaatttctttgagttatataaattatagtagatacagatttttttttctttttttgaaaggtgtagatacagattttttttaaggttaattaggatttttaccttttaaattttgatatataccaaat

SEQ ID NO: 294705 - DNA, 3910 bp, Cannabis indica
tactttcttgcaagaactataacgtagaatttttttattgctcaagttcattactaagttagctacacaattatccatcatcatcattttcgcctttgttcaattttttttccctctaattgtatattgaaataattgcaggtgatgaaaaagactcattattatatagttgatacaagtgttgtcactcctggtgctgctgtttcagacttgcaattcaagatcatagatgaagatccattcactgttcaagggttaaaggtcagacttcaaattttctgccttaattatattatcttatgaagtatgttcatttttaaaaaataaaataaataaacctttatcttaaaaaaaactgctcttataaattttgtgaattccaaaaaacaaaattgtagatagtgaatattcttatggagagcaaaggaaagtttgagagaacaaagagaagccaaaacttaaaatataaaaatgtacaggaattcagtaaatccttccagtgttgttgccttggtggaactgatttacaattctactacattttttctattcggtttatcagctgtctggccagctttggttatttctagttcaatttgcatgcgttctatattctcagacatcaataacagcttatttttcatttaaatcttctgtttcagtttacccctttgcctgtgtggcatggtcgtggttaccgctccctcggttttcgttttggtaatatttgttacattaggtaatgcttcattgtgccacacaaatctataatataattacaatccttgcacttggatttctttgaaattgattaggattcccgagctaatgcgattcacttgtgcagcgatgttagtgaaatacctgaagaaacttatccactcctcaaggattgtgaaatcctgattatggtgcctccctattctttcatctaactattctgtttaactcaaaacttttatgaacaattacactcttcaaaaaataagtatattaattcaaaaatagttcaaaagcataataataacaataaattttgggccttgctgatgtttcaaatcatttccttaggatgccttaaggccggaccggtcatcatcaacacattttggacttccaaaggtaaaatccaattcatccctacaataaaactgtcttagtgagaatcttaatttcaatttgatctcttccaggctttggaggaagtgcggaaaattcaaccgaaaaaaactctgttcactggtatgttttaacttcttttcttggttactggttttatttattagttacaagaaaatttagtttcttttgatctacacctttaatttactttcacaagtcaatcaattttaactcagttataaaattatgtgagatcagggagacaataaggttattgtaattattgaaaatttaataaattatatatttttttcttcttgatttttgcacttgtaaaggtatgatgcatctaatggaccatgagaaggtaaataagtatcttatgaagttgatggagacagagggccttgatgtacaactgagctatgatgggcttcgggtacctataattctctagacttaaaatcaatctcataattaaggaaattgtcttttgaaccacatttgtcaactgatctttcctggactatattggtcttcaaaataagaaagaagaagaagaaaagaaatatttttagcactttttggtgcatcatccaatttcatcacttgactattgatttttcctggtaaataagatacgtgctttcaataaaatatacccaagaatctttctttcattacatttccatttatatatattttttcacacaaaatcagaacaacagtggaggatacaaggcaatcactgtttaactgaaccttgacagaaattcttctcaagataagtttttatttttatgtttttttttcctataaaaaagtaaaatccaaaaaatatataatttttgtaaaagacaagtttcttttggccttgtccccatcaatgatttttgagttgaaactgaatgtgaaatcatcaaaggactgttcttttgaaatttgagaagattccttcaaaccaaaaggaaaataaaaactacaacttttgggttttcaagaggtcagtattgtctcaagagtgggatttggtagcagcatagcatgggcatgaaagaaagaaaataataagagtgtgagcctcgttcttctgcttttgggaacaaaaaaaaattccacaatatgggtttatgttattataaaaattcatcaacaaattacacattaacaattgacttaactatcattccatcataggaggtggaaggaataataatatgttagttgattggactaacaaaacaaagcttgatattttaggttgagtttattatatggtaatgtgagagtgaagagtcattgtttaattgcgtagatgagatcacagagttaggattatgagggcgagcaaggcaagaagaagtagaaattgggggcatgcaaaccaaatatgttgtgtctgtgtgtgtgtcaattgttaatgtgatttctcaattatttaatgtgggactgaatgctttttcacaaaccttcgccgtgacctctctgtgacacagtgtataataataataattattattattttattaatatatatattatatttatgtatatatactagtgtgatacgtagttacgtacttaaaactagtgaaactgacatacaggcggaagatggtgggagtgggcaaaaagaaattgttcatcaaccgaaagtgtcgcttataagcaaaatcatttaactcctatagacttggacgaagaataagcaagattatctcacgtgtcaacaagcccccaccaattcggagtagagaccgtccaggtgtgtgtacatagatttcgtatacaacatacctacaaactcaattaattagttcatttttttttaataaataaaacacaccccgaaaataataatacacacccaaatgaggaagctaagtctgatttgggtccttgacccttttgtgtggagaaatttggacctcaaattgttgtctggtcaagattcaatcaccttcaaaatcacccctcacctctcccccacattcccctccaccttactcgccccaaaacgccttattttctccctatcgaattccaaccttttttccttcctttactttgaatctttgactacaaaccccaaaaaaattcatttttttttttggatacccacctctagattctttatttccattggcgggtagcttttattttattgagctgtgccttaagcagttggtgatttcgaacatcgttttggctgaggaatttcatcaaacagtttgtcttcgacattgaacaatataattttttggggaggagggaatggttggggctttagccttagtgggttcatcggtggtggactcgcatacttgtccgtgcttgtgcgttgatgctctgccttcgacgaacatgaactttaaaagtgttggagatttgggaaggaagcataccgttaaggcagctgctgggtcttcttcttccttggatttgagcagctcgttcatcgattctggccatgaaaggcggcgtttgtcggcgatgaaatcgattccggcgggaattgttattagtcgaagttacaggaaccagaagaagagtaatcggcggcggaaggtggttgttagtgaattgggtggccaatatgaagattcttttgaggacgttaaagtggtaagttgatcttgtctgctttatattcttaattaaaaaagtatataataaactgttgttttgacaaagttatgaaaggagtaaataataatatggtctatttcaaaaaaaaaaaaaaagagcaatttgcggcgaaacccccttatgttttgatttttataca

SEQ ID NO: 294706 - DNA, 4221 bp, Cannabis indica
taaacgttagcaagagaaaacaatatagtgaatataaatataacacgtccaagctaagagaattgggttctagcttttgataatttattgagttatatgatcaggagagcatgaagggtgtacacgagccccgtgcaagctcttcttgtgctgcttgcaagttcttgaagcgaagatgccatccccacatgcatcttcgctaccttagttttaggtccgacgaagcctaaaaagttcgccaaagtacacaaagtatttggcgctagcaatgtaagcaagatcttgatcgaggtgcccgaggaacagcgcgaggacaccgtcaattctctagcttatgaggccgaagcaaggctacgagaccccgtttatggttgcattggtgccatagctttgctccaaagaaagatggccgagctgcaacatgatctagcctttgctagagctcgtctagctcgctgtgcagccaattcttcttcttcttcattttcttctaattatggtgttgctttggatggcagcaggcttattagcgaggctagtactggttttagtggtcttcctgctgctaattgggctactcatgatcatcatcaagctttaattacccaaagttcgtttgaattttgtcagaataattcatcagttaattatcatcatgattttagctttgtcccgtatatattataatgatcagtttgtgatatatatatatctatataataatatgaatcatgatatatgatctgctctttaatcatctattttgtggatgaaattaatattggtgttttagaatttatcccttttccagtcagaatttaacgaaaccagttaaatttcaagttccccaacattaacagtaacttgattaatatttctatattattttgaataatctcttccctttgatgctttctgatcataacaagttgggtaggaagaacaaaaacaatttgggttgccattatttacttattaagtttttactgctttcaagtacaacagaagtttgtgggagccaaccaattgaagccattattcgaggtaaggaagaaaaacactagccatgatttcagaagccccacaattaataataataataataggcctttctttttttaactttatttgctgcagtgagaatccaaagatttatttgcttctcatcaaaactagagagataacagttcccgtgagtgaatgcctacacaattttcagaatgttcaatgatacaatggtttgattttctatactactctttctgaggccataacatagcacagcacagctttttttttttcccaaaaatagttttgcttgacgagaagaaaaatagaattttttaccatacaaaggtcataacaacctaaacaaatgccagtccaatataactgtgtctatcaaattttgcctttttctgttcaaggctaatcggaatagccatactcaaaagtttttggataaaaaaaaacactattttgtttctccatttaaagatggaatcgtatcctgtcgagttagcatataactgctaaaacaaataaacaatttaccaacacagaggaatagcttgttttcttcaatttaaaatgacaagacactttaagaacaattatccagtgctgaatttggaaaaccgactaatttatagtggataaggtgattttgaagagatcacattatactttctctcaataattcaacggtaggtgcaagatacttgttaccaaaacaaaagaaaaactatttacataaagacataaagacactacaacaattgatttgaactttaataataagatagcctgggaaaatgtgtaatttaactacataaatccaacgtggactccacagatttccagatttagacatcctttatgaacattgatttcttcacatctcagctaattacttcttccctgttaagaagtataagcatagaaaatgggttactataagatcatagtttaaaaccaatttcaagtactatcatttagtccgcacaaaataaagcaatggcgatacaaacatgagaaaatagcagcaaaaaatagtatgttctctttctaatattttctggatatgcttatatgagagaatgccaacattattttatccaacatgttcaagaagctgatcactgaaaatagtcttgttaagccatggtatgccagtatttgatagatgattatcatttgcgggtttggcctgcaatttctactcattcttctgaaagcttacttacaactttggaagcttaatcaagtattcaaatgcagagtaaacgccaaaaaacatgcagcaagacagctccatacttaactcaaacccgggtacactcaggtagaacaatcaaaccccagcttaagcttctacccaaaatactaaacaaatcacaaacaatgcaactcctcctcaggtgtcatttagtttaatttgactatctcctgtgatcaatcctaagctgttttagttctcttaaaggcaaaaaaataaaaccgggtacatgctaaactgggaggtgagcatgagtcaactctggatccaaaactaccataggtcaaaaatgctgcatagcattgattataatttatttggacatatcaatctaaaattcaagcacctaatcaaatcttcttgcctgcacataatcctaaacctgaaatattataacaagataagtgcacttacataaacaagtatctcagaacaaaaagtaaaacttgcttccaacaagctagcaaaaggtaccaacaacttaggtaactcaatttcttgaatgttaaagcataatgtataatgtacaaaaaattctttaacaagaatcactccaagtcaatccaatttaatccaacctttcaatcaaatttactcatatcatcaaagcaattgtttcaactaccaattcaaatcaaatgcataattgttcagaatttcgaaatttacccgaaccaggggcgtacttcgctcgtttcatcttctctagctctaattgagcgtccatgaacatgttcaacctctgcgactcaaggtccatagcaaactccattctctgcttctctagctccatcatcttctgctgttttgagctctcgatcctctcgtaaatctccccgaattttaaaatcgccctagccaattccctacaagcagagccatccgataaatctagtgcctccattcgatgcttcctcaccaccactctagttccgtcaaaccctccgtcctcctcatcctcctcctcttccaggttatcatcattcaccggcaaactatccggcgatcttacagcgtagaccgggggctttggtccagccctggaactggtaggcttagcggacttgatcgttaaggtaacggtagtaggcttggtgttagagccgatgaggaaatcaagccggggatagaagacccaagccgagggaagaggcttagacttctcaagcttgtacttcttcttcaaggtgtcgactcggttcttgcactggacgtccgtcttgtacgccttaacgccgttatcacggccgttgacggcttcggcaacctccttccagtccttctgacggagattgccgcggttaagctgcaaataacggtcgccccaggcttcgattagggtctcggtggctccttcgctccaacaatcttcacggccaccgctgtggggccgagtggccgtcgttgggccgggtcggtccatggattacaattgggccgggtcgggcggtggttattacggttgatcggaatattgtagagagagagagaaatgaaagtgagggaaaatgagttagagagagaaagatgaggatggaaggtaaaggatcggattcgggacgaacgaaagagaaaatgttggccgtgcattgtgaccggcggtgacgtcatctacccgtattgtggttggacggaaccactcacacactaataatttagtccaacgaactaaaaccaagtccaatgcccttacttttgagtttccaaattagtttcacttagattttacttttttttaacaacatcattttttggggacttacacatgtactagaaaaaggcccaaagtttacatttgatattagtacggcccaaatataatatataatggaaagggctagggaattttacaaaagtactgtttttagaccaaaattttacaattatactgggacacagcaaaaacaacatttttactgccccagcccaatttcattactttt

SEQ ID NO: 294707 - DNA, 1564 bp, Cannabis indica
atatagaaaccctactgcaactagcgctgcaaccactttagaaattcaaactgtaaatttgaaaaaaaaaaacaaaataaaaaaatagtatatgaagtaattcccctttttgatataatgtaaaaaaaatatattttttgatattatttaattaagtaattaaattaagcataaaaatttaaattttagtcattaaataaaaatttaataatttaatatttttaaaattaatatttataattaaatttattcaataactattaataccattaaaaagttttttctcatatatatatatatagttatagttattttttttttgttttttgtagtaagtatacatagttatagattaaacattacaacaaagtggcctttaatgcaaaagattttgaacattaataatgatgaatagcatgtttgatcgatctttatgaagatttgttatttacaacattgtccctacactcttgaatatggatctaatttctcgaatattattaaagatttctgcattgcttttttttttttttttcaatttgaaaaacgtctttattattgacagtaatatgaagataagaagaagataattaaaatgatgattttgtttgtatagtctctctcattatcaatcttaatcatgattacttgtttggtggtatatagatatagtctctcatgtgagcaacattaattgtagtattatcattacataaccaaatcaccactttttaactgtccaatcacaaacaatacccatttctttgctcaaactggcattttttttcttcaactttttaatgtattttagttttcataaaagaattttaagatcattataactatttggatccacttgaattggataatgccaactaataagaaagctttgataccataaataagaattatagagttttatcttaaagttaatcggtaattaagaagttaagtaatgtatgtagttgttataaatggattaataatatattttcacacatttgtaataaaacaaatgaaaaaaaaaagtttattatgatagattatattcatatttctaatttgttaggaccgttttaattattttagagtcattgttttaattttaaaattaagctcctattaaaaatattgtaaataatatttttaaatattattatgcagttatatattttacaaaatattaaaaaaattctaattattttattaaaattattattgattttaataaaaaaataatagataaaaaaaatatgaaagatttacactagcccaacttacacacctatagggccgaccatggctataagatgaaagaatcgtttgtaattcaagaaaaataactgtaggaaatgagctggcatccgaaaatgcccctacacacaacacccaacgttcagatttgaggggcagaattgtctttttgatttggtgcggatccaaagggaatatgctttcccaaaaccgaatatgccccttgttaggctaaaattagtctaagtttcgggtcgtattttcggttagttttcactctttgtttctagttttagggctattttacgct

SEQ ID NO: 294708 - DNA, 3766 bp, Cannabis indica
agtaacaaagtcagaatacaagtcatcattattaaatgcatgaaaaagtaaaaagtttgtattatcaactaccatctaagggacaataatcctaggaggaggagtcatctgagctattttcactgagggctgccttgcctttgtttctagtgacaggcgatggacgagcaggcctggtggagccttcgcctctgggtcttatcaacaaggaggcatcaccagtagtagctccacgtaccaaacacaatcagagctcatgatccctcctggacatggtattggcaagtatagcaatgggaacgtcatcatctgactcaactgtaggccttcccctcggccaaagctcatttgtcatcggggtgtcatctgggcctccagaaggaccgtctactccctcagtgctacgaataggaggatacaaaacatacctttgaaagtttacctcacaagacagtctgagtatgtgcctcctctccacaggaagggataagatgtgattacctcaatccctccacatgatagactcgttgtttctagcaatagtaatcgtagactttgcgacgatctctcactgatggagttgtccaacaagtgggcaatgtgtttggcataccatcctaaacaatataactccacaaactagggaggaactgcctccagccctggttcaagtcccagatgaatcaatcgtgaaattcacaacccgtttgcttcaaatagaaatgaggctagagttcaagctttggggaaccactactgctagcctcaagatcactggagaaactactcaaaaaaccaactagatggtggtcttcaaagagaagactgagcaaatctttgtctattcgattgtaacctccctaaaagtcacgctagttcatttgcatacgaaagacaaggggaggtgagaaactagaccaagtgacaagacttagaggaaatactagtcaactaaacctaagggtactagccagacacttctattgtacaaagcggggaatcaacaaagtacgggttccaagttcaagaacttggatgaacactgattcctaagttgattacttcattaaaatagactcgccctagaagggccatacagagttcctaagggaattaagcaatgggcaagggttgaacaggcttataaggccataataaagtgcttgctagggtcaaaaaagagccaaaaggtggccattaccttgggactgaagtcatgtgtcggccagggtcctaaggaattagcacgtgccagccagggcacctgacctatgctacaaccgccaagggttctaggcttaagcctagaatcgaccagcttccctagatggtaccatgtgccggccaggatcacaaacagaccccaaaggttgaccaaggtgtcctatggattgaaaagatatatttttgaaggactcaaatgtgttctttgtgttcttcatggctcaaagactcaagaatcaaaataaagctcaaaattgaatctttttcatgaagaaatcatgtattatgcattctaaagctattatgcggatcataatggaaaaaagattacaatctaatgtgagaatcaagaatgtaaaaagcttgaaaaggcttcaacacaacaatggaaaatttaagaaataagtagaaaatgggatttgaaagcttacacactaatgaagtccactgaggatgcttgtggagagcttggatcatcgagatgaagcaaaaatcccagggattggagaccttgtgcgcatcaagtggctaagggaaatgaagagttcctttttgttttttctcaaaaagaatttgaagagagagagactaagagggaatagtaagtgtggggatgaaggatggccaaatgaaccttatataggttctctcatgctcttccctccaaaaatgtagtgggcagttacatcgctacaaaatggccatgtagaagaccaatagttccctagtgggaacatgagcaacaaaaaaaattcataatgatttgaaaaaaaaaagtcattctttgtgatgatgtgagtcagatgagagcccaagtatctaactagccataagatgccttgttaagactttaacagtcaaaactaaaattggaaagtccctatctgtacaaacgtctgcacagggacttagggggaaaatgttatcctaattttttccctacatgacgtggcatgtccacataggcaagattgatgtcacgtggagtacagcctattgtattggtgagccaagtcatcatgaactacttaccaattgacgaatggttcgaatgctcgagtagaatgaagatataataaactgaccaactaggagggtctggtcgggcaaggaaaatcatgtgtcgaccatccctagataaagggtaggttagccagcttctataatgatagccagagagaagcttatataattagtgtttttgtagactgtgccttggatggaccatgactcactctctattgtgaaaccactccgaaaacccacaaaaataggggttcaactccaaatatctacctattctttaggagcaattaagtggttattttttatattaaatataagaaaaagaggtaatatctccttattttaagggatattaatatgttttgaaatagaccttttgtaagctctcacctatataaagagcaatatgccagactaaaaacctaagttcttatcctcagttttgagttctaactctcgaaaccctagttctctctatctctaacatgccacctgtagcatataagagactaagtctatttctcatctcactcatttgagatctgcctaatattgttcccattactataatattcatagaagccacactaaaaattacaagctaaaagcctgtaatttgagtggtattatctctcgaataaatataagtaaaaggagagtatgtaattacccactaatcaaggggtgaaacctctataaaattaaaatgttattttctttacttactttaattttttacacttggtgatttcaatcataaataaggctccgctatcaattgaccaaatctgaggtaaacaaacctattgaagctgctcctcctacctaagagccttgcaaggagaagtccaaagctattggggctaatgagggatttctcattgatttttcttcgaatgagactgagaatgatgcttcgaactcaagtttggatctgttatcccaatttttgcactccgacgtggcatcacatgatggtaacacgggtaatcgactccgagtatctgctcgcaggatatagtccgaacaggatacctcatatgcatgctcgaagcaaaacaatcgtcaatctgcacagggggaccaacacttagcgaattctgctttcgcatcgtgagtcatcaaagaaatccctataacttggggatcaaattccagagatatggcaagttgtccaaaagttgtccaaatcccacgatcagtgtattctgtatttactatgcaatctttctacttatatccattgtaacgagaagggaaatacttcctctccaagctcatagccctataaatagtgatgcatgttcactgggcaaagggtcgaaagattttacttgagagatattgtctaagaattcatattcagagatattgttgtaagagctataagaaaaggaacctttctccttgctcttcagttaataaatataacgaggattaggctattaccgaactgctcgaggctgaacctctataaaattcttgtgtcttcatatttgctttattatatttcaat

SEQ ID NO: 294709 - DNA, 7116 bp, Cannabis indica
tttatgatatttaatttaatttactttttttttttagagattaatttactttattttgtataggattaaattttaaacgggaattctatcattccttcctactaaacacataatttattctctctttccaatattttccttccaaaacatcactgtaaataaaggacttcaaaagaactggaattacttttgagtgcggtttcggttttaaacaaatagaaccttccagatgttcacccgaacccactcaactccattccattgtcttctctctctcacctggccctcttttatcatattattctcctcaatccatttctgcaatattatccattataataaacaaataaatagacattttgtcacaacctatcgtttatcatatcatatcatataaatcctcaaattcttctccctccacaatccaattgtatctaatttttttaagaaaagaaagggcaaaagaaaacggaagtcatattgaagtaatcaagtaatcaaatgatcttactttacagagcccaaagagggtgggtcccaccaatcacatcacataaatcgatcataaactccacgtggcatcatacgcgtcgcttgttccctataccatacgcttctccatattttattttatttcttttttaaaaaaaagaaaaactttcttctctcctttcctgtccaaaagcagcagaagcaaactcatccatattccatatttcaatttcgtccgtctctctctctttgacggaaatctagacacacaaaccaaatcaaaccaaacccaagtttctgaactgagtccaactcaggtttgaattgattgcaacacaacaacgccttttttttttttttgtttccattcacaactatttggaagtctctggtaatctattactgctcttccgttttctaaactagaaaattcaaaagtaggtctgaagagctacttcatattttagtttgatcaaaacattttgtattggttttcgcaaactttaaaatgatttgtttaggagtcatggtttcatgcatcattctctttaatatttaactgggatcatatttaaattttatatcttttaaattttaggtaatgggacaggaatcctttcctcctttttcgtttatttaaggccataaatattggtactatatttcaatttgtctggttttcttttttattttcctaaaaagaactcgtgttgtgtcactgttctgtattttaagttaaaaatcgtttgaagagtgattggagacatgatatttgtgtaattatccgttaccaaacatggattttggttgacatatccatttctctgtaattcgacacctgggtgggtcgagttgggctgtaatgtttcttgtcgtttttcgaaatatcgaattttgttcattcttatctaattttctgtctgtattttatttttgggctggtggcagaaacgaggagccatcttattaaggcggtgagagagagtaaaggtgacacgttatagaatggtaagaaaagtggagctccaccagggtgctgctgaggacttgaacgtcagctttgagaagcttatgatgctcggtgttggtgatcgtagtggtggaaaagtgaaaatggaaggtggggttatcactgattggaaggatattcctatggagctgttgttgcaaatcgtttcgattgtggatgatcagacggtgatcatggcatctggggtgtgtcgtggttggagagatgctatttctctcggcctcacccatctctctctatcatggtattgttttgaataccttgattaatttatttgtcgtttttttatgatcttaaggggtcttttaggtgtccagtgtttgcaacctctttaattctaaaaaaatcttaaatttgtcaaattggcttttgaagagattggaaagaaattgtttaaaccacaagtgttgtcgtatcgaggtttttctaattcaggtcttttgttttggacattggacatagctctattaaagcctttttacatacctgtttataagacatagctctaataattacaaattaaagtagttcaaattcaccttagagaaacatcttcttttgcaattaatttgattcttggagctgcgtgtataatttccactttcaaaagtttttataaaatttgtaacaataagtgttaggatgagcgatgattcatattttatgagcaactaagttatctatgcttcaaaatctttatttagcatgttcgtgaatggccatctaatcatctgaagctgctatcttttttgtttaggtgtaacaagaatatgaacaacttggtcctatcacttgctcctaaattcacaaaactgcaaactctgattctgcgtcaggataaaccacaacttgaggacaatgctgttgaggctatagcaaacttctgtcatgatttgcagatccttgatctcagtaaaagcttcaagcttagtgatgcctcgctatatgctttggctcgtggttgtcaaaaccttactaaactcaatatcagtggctgccctgctttcagtgatgttgctcttgcacatcttgctagttgttgcagaaacttaaaagttttcaatctctgcggatgtgtgaaaactgcaacagacagggctctgcaggtatgataagctcttacaaatttctccatggtttgatctgagatagttcttaacaaatttctttattatgttcaggctattggacgttactgcaatcagctgcagtctttaaatcttggatggtgtgacaatgtcagtgatgttggagttatgagtttagcatatggttgccctgatcttagaaccgttgacttgtgcggatgtgtccttataactggtacaatcgtactaagatcattaactggtttcgtttaattataagatttattattttactgggtttctaactatgataataatgaccatttaagttttaaccctttccgcacttggttttttcagatgatagtgtgattgctttggcaaataggtgtgtccatctgagatcccttgggctgtactactgccagaacatcaccgacaaggcaatgtattctttggcccaaagtcgagtgaagaacaaacctgaaacatgggacgatgaggaggggcttaaaactctgaacattagccaatgcacggcgcttactcctcccgctgttcaggcagtgtgtgatacatttccttcgcttcacacttgttcaggcaggcattcactcatcatgagtggctgtttgaatttaacatctgttcattgtgcatgcgctttccaagctcagttccgcagccccaccatgttgcctccttcagctcattaaaactcactgggctatgtcaattgtctcctttagcctctccataaagaagtgtctttcccttgtagatatgtgttttatgtccaagtgttcagagactgactagctgcaagggtttttcagaacctgcagactatgtgaattactactatttaacttttgcaagatttacatttatgaaatgggaaaactgggtgtggctccaagcttctaggcccagtagtgtatgttatgtgtgagtgtggtggcgttttctcttatggttatggaaactatttatccatttcaacattaaagttataaccatatctaagatgaatattgagtaccatgcttaaagaaattgaaaacaatacatctttctttcgaatccaaacttgtttctctatagtttgatgattagcaaaatcaatacgaaaataatttcatttgcttttaaaagcagtgaagtttgcaatcagtgatgttgtgcccgaatgagatgacaatatctgtaatagtaaaacaaatacagaaaatacaaacacaaatcaagagctttctctgttataagaactcaaagtcggagtggaaaaatcctatcaatgcacactttttcttatatttatttcctgatatacacccaatgtttggtcttcagctcttagtttgtcaacggtagcagaatacaaagttaatgttgccatttcgtaaggaacagcattgcgtatagtgaatggttgccgtgtatacgaactcatttgcttttgtacacaatctcttcatcgtccacatcgaacgctgggttgcaaaggcatctaaagagtctacctatgccctgccacaaaataaaataagttgaccaagctcattgaatttatgatctataatacatgtatcattgagtgaaaaccttaagtatcactttgaagaaacggatagaagaaccaacgtacataatattttatggattacttgcctgggttagaaatggtgttcgatacgtgagtgatcttgatgagtcgtcttcgctgtcagaactgctgtcatcatcatcactatcagcttcattcttccttctggaagtcccgccatttcgagcatgtttttcctcctggtaacataatctttaaagcttagtatcaacatagctaatgtaccgttatttctatttgaatatgggaatagcattgttttgagaaaagaatattgcaagtgtttgacctgaaatatcttgcctagtaatttgagagccagagcacgaagtttaagttcttctttcttaacattattctccttaagcacctaaaagtcacatgtagagacatgcatatattataaatatatatatactacttcataatgaaagccctttggataatgaaaacaatggctctcaccaattggcaaacgtgtaaaagggttacttcaatatcaacaacattcaacttccacagagagttcataagtgtgtctttgtttaaccgtatgtgggattctaaatcgctctcttggctactcccatttccctccatcttaaaatttctacgcatgtcttcttggagttgtaataactgaaaagcacctgaattgttgtttatttgcagcattaagatcaatcaagccaagcatggtgaagcattatgaaagcaaatacaatgatatacagtagtctatccgtacacaccttttgcagcagttagctgggacttccagaaatgtcctttgttccgaacccactcagccaagaatggtactccaaggaatatggctttctttccaagctctaatgctgcttgcctcgagtatatgtagccgatggtgtttaacatttcaattccaaaagctgcatgatataataagcctctagaatgaaataacttgcattgttagctagtcatagaaaactaaaaggtgcctcaatcaaacctgcatcagaaagtcgtttggcttcagtttccgcgtgtcttatgaacccatccttgtcacctctaacatactgatttagaaaatctttcaataaccttgctagcttttcttctctttctcgctggacagcctgcattagcaaagagtatgtttatgaaaagttaaccccgaactctaattcaatccaaaatagtaatgaacctttgaagagactgatattcatgtggtcaggaaaggaatttttagttgtgtaatgattttaagagcatacttacctttaacttatcatgtagtttcccagggttttcagtatctccaactaattcggaagaagccattgatgccactgccagatgtcctacatagtcttcaaacaattcacttccaaataaaagagcaaagaccgctgtagggtcaagcatggtttcccttcaaagtaaaattacaaggagatcaaattagttttactataatcagttcagtaaagatattgattagctgatcagcaaggatctcgattgtcgagtccagtatacgtagttccgcatattaattcaattccatttggtttataaaataaagtagatattatataatatagacaagtgtaagggtcatagaaaaacgagaaaattaccttgatatgctgtactttccattacgatcgtatgaatctctttgcactggatcactcaaaacttggtaagcctcacctagcacctgtgtcaacattttacaataataaggtaaaatgataataggctgatctggatcctgattttatctacttctgttagtcacttaaagactccaataaactacaattagataaagttggcacacccttttccatatttttctttaaaaagtaggtaaatgcttgattgtttgtgttggagtgacttgcctgaaatctttcagcagcttgaggatcgttcggatttttatctggatgaacttgccttgcctatacaaacatgccatttggatcatattattttattgcaattatacaacttaagaaagataatatcaatgaacaatttggttactatatgatcaaagcaatgtataagggtatcaacaatcatgtgagtgaaaagataagacgtaattgaaaaagataaaatggcaaataatgaaccttaagataataggccttgcgaatttcttcctcagaaacagaaggagtgacaccaaggacatcatagtactcggtttcctttaccattgtggctctgttacctgagagtgagaagagattgagtatacttacacagagaaagatgggaaagaaaaaagtgataagaaagatagaaagaaaagaaagatgggtgagattgaggacaggaaggggagccccacgagcttagttgcctttccagtgctcacaccaataaactaatccttcaaactgcctttccgcgggagcatttacactattttaactgtcaccatagtggcgcttatcatacgttttgtcaattaaaaaaaggaaaaagtttgagagctgtcttgtgggcttataatgcaggccttgtatcgctccactttgagagtgtaataattgtgggccaacacattggaccttgggcatgacttgtccctttagattatggatccttactccttatagtggttcttctgatcattggggccctatgttcttcgactggacacgtagagaagcaaattttctcttacatatctcgcctaagagcatttgtactacatattctaaaatatatataaatataaatattaggtgaatgtacctgtcgagccacgtattgatagttttatttaagattttagtctttttaagattttgaatatattttatttttaaagatttcaaattttttgtttgaaaaaattaaatatt

SEQ ID NO: 294710 - DNA, 1131 bp, Cannabis indica
gaggtagaaaattgatagctatttgactcattgtagaagccttatgagctccttcttaaaatgtacttttttaaaggttcctagatcttctaacttaatttgaagcccataatttggcttaagagggcgtttagtcaaaatgtaattgatagttttgaaacatcctcaatatcatataatattgcttgcaatggccattaggcttaatttgatttcatctataaattatgtattttttgaagaaaaaaaatgaacccatcctacctcgggtcgaaccttgacttgaacctgcacctcgtcccaaatccaaacccggacccagaccccggacctggggttaggtgtgaggtcctaggctaggtttgtggtctaggtctggtccctgtccggggtatggggtctcatgtctgggttcggggtccgttgtttagggtccaggtctggggtttgggatccacgtttaggttcggtccagtgtccggtgtttggggtccggggtccatgtttgggttcagggtctgggtttgggtctagggcccaggttggggttccattctgagtttgaggttcgggatctaggtcggggttcagggttcgagtccgagtcagggtccgattctggggtctagggtctgggtccgggttgagtctagggtttgagtttgggtttggggtccaggatccgggttcaggtccgaggttcaaagaactagagaaatgattccaaacagagttcgccggaattgaagttgttacagtggcctgagtaaggactcgagtagcttctggtgctttgcgagcagtgggatcttgggtaatggactccatgatcgacagtagtccaaggtaattgatgccatgtataattttaaagtaagaaaaacaaagagaaattcgaaaaaaaaaattattaaagtttctagctgaacaaagcttacctcggatcggatgttctcacaaactagtatttatagactaggattacaaaagcttaatcaagaactaactaattaggtgccgtttggtaacacttttgttttctaattttttaatcacaaaatgaaagtaaaatttttgtttttaaaaattttgcttttgaaaaataaaaatgcgttctgtaaccacttttgt

SEQ ID NO: 294711 - DNA, 2053 bp, Cannabis indica
tttttttttttttttgtaagttactttggtgaatctgtgtttagaatggtggaattggattcgaatgtgtaattttgaggcaaaagagggttgcgatctgtgatggagtctcgtgtcgagatcctctttgtttctaccttacatttttcattgttttctttttgtattaattttagtggttcgagggctagatctttcggggtacatttatttgctgatttgttgtagttcgttttaagcaagacaaatttgctatgtgtatgtatttagtttgaattctgttcttcatttctgaaataattagggattttcttgtgttgtagtattagtatgtgcgaattagtgtgactgcgtatcgttttgatattttgtgttcgtcttgatgctcgccactagattctggtattgggttcttaatgtcgtatccacaaattattcatgtgcgttgtaccgtttataggcccacattgtcattatcctgatctgtttaccacatggtccgtcggatagtcggtaggttttggatttttatgattttttccgtgtttatcgaatcggagttcataagtttaagtaagagttaagaaatgagatttggtcattactcggccttaacaaaatcttagtctaatgtatgtgatgatatcgtagtctacttgcgatgtttgccttgtaaaggttaacttagttgaatatggatgtgatgatatcgtagtctaatgtcattttgcaaaatcttagaagagtttgtgctactgaagaaaatgataaaggtaggaggacagcctgatttagctactagaagagaacaaagacccaaaaatgtaatatgcttttggcttgaaatgaacagttagagacagtttgttgctctaagttatttagcagctttttgctaggaacacatttagaagccatgtcagttgcatattgtacttgtgcttaagtgatcatgaaacatgatatttcatcttttgttgtgaagtgggagtaatgtaacacctgctaattcaaataagttgatgttttatgaatacttgatatttgctaaggacaactgattaacactgccttgaatgctttggaacagtgtttgagcatttatttggcataattaagcaacatcatcgtcattggaactttagttggaaatgaattgttctatcggattgttgatcttggtggaaaaataatgactattatattagtctaattttggttgtttatggtgtgatttgttttgtttcagactttaactatagcagttatgtcagagaaagctctaaaagatcttaataccataccaggatctgagaggaagaatgaaaactctagtaaagtaagtatttctaagcctgtagttagcaataccaatggcaataccaatgggaaccttgaagaaggacaaaagaaaatctctgtaaatggcggtgaagttgtgaatcctgtaaatgggaaccttgaagaagcacaaaagaaaaactctgtaaatggcgatgaagttgtgaatcctgtagttgaggttgcaagtgcagaagtagaatacattgactccgagaatttaaatgatgtagaagatgttgatgcaagcttgaaggttagctttaagatttttggatggttctattgttatggtgtttgctcttagctttggatttttttttttttctcaatgatgattacatctataatttctcttcttgacatgacctatttgatttatcagatacttttgtctggattagactctaaagattgggtcttactgtgtaattcactaaacaatgtacgccggttatcactatatcacaaggaggccatgttcgatgtgttgtaagtcaaatttttctcacaaaaaaagattaagctactactgtattttgttggttttaaatattggttttcactgtttcgttttttgtaattaaatttgaatctgtatatctcatatgatgaacagggctgatgttatctcacttgttgcaaagtccttgaaaaatccaagaagtgctgtttgcaaaactgcatgcatgacatctgcagactattttag

SEQ ID NO: 294712 - DNA, 1577 bp, Cannabis indica
ctgccgtacatcacagaatacatattaaatatagagtaaatggtgtgattaaaatattaaatatatatattatggtttgccaacttttaactctaatgtgttgtaaacatttaaaatgagagagagagagattgaaaattgaggttgcatgggaaagaggcgaaatgcagtgttgtgttagtaaaggagtgagagtgtgagtgtgagtggagggaatgacaaatgaacatgggtaattacacttctctgtgttttagtggcagaaacgtccaatccctcttcagattttccctttcttacttttcttttcttttctttaaaagcaaaggacaactcgccttggctctctatatctagcctcacctataataataagggtcccacaaccccttatagtagcgcgggtctctcgggggggatattgagttttgtggggtatcccttataataataatacccatctttcttttcttttcttttctctgctgttgtcccttattaatgccaccaactcccccacttatctatttttactgacgctttttttttttctttttttcttttttctttcctttcctctttggaaatttaagataaagggtatatgtatttgaaggtaaaaaatacattaaagaaagaatgtagtgaagaagatgggtaatgtaatgtagtgcgtttaattcgccgccagctatacctcgtttggggactgtacaggcctcattcggcacccatattgtgtgcgagtttgtgttacatatatttgtctttacttctcgaactctgccccttttaattattattttttaaaaaagaaaaaaaatatatatgtgttattgttcacacgtggttttcctgccaatggtcataccaaacagtacaacatgttcagattaggcagggatcttttcagtttttattttcactgtttaccgttgaaattcgtacaatttatcttctcttcgtcttattatatatacatatagatatgtatcactctcatacggattggaaatgattgatcatagattcatataaatacatatagaacctctgaacatggaaatattcaaattaataatcaatatatggaaatattgatgtacatataagtatgtttatgttaacataaaaaattggtttttgaaccctttgttttattttattataactgttgattatttggtcgttgttttaggttatgcttaaagatgaaacaatgtacaaagatataaattaaagaattaatgcacccacaataactaaaattgtttcaagaaaaaagagggtctttgctcatgtacatattatattttaaaataggcatggaagtagtatagaagcaacaaaattgtttcctgcttgagcataattacgaatgattgcctttgaaattcataaacatgattgcccaattttcacctcatcaaaacaggaggaatttccccaccaccacgttcttcccttttttttaaatataggctaattaataattttttcccatgaactttgacatgtagtaaatcgtgtccttgaacttttttagccgttaaaaatttcccccgaactattgagat

SEQ ID NO: 294713 - DNA, 6546 bp, Cannabis indica
ttttgtaataaggtttttaagtatggtaaatgaaatttttcttatgttatatgtttaatggatagattaatttaagtcaatgcatcacatatatttaagcattggtaacccaaatttcctattgaagttaagttgggcaacattattattgtaaaaaaaatttgatgaaaacattattattgtaggtagtttacgtatatcattaaaatccctagatttttgttctttttctttttcaagattgaaaatttacatggcataagatcacctgtagcactgttctcaatgggatgtggaccaaaattttattaaggagatagtcaagcttcctacgtaacgacgacctaaagctcaaggaattaatcccaactttcacaattcacatggtccgagatccagttcaatcttttaagagaacacaataattgaatctatatggaagaaaataaatacatcgaaacgtataggaggtgtcagaactgtacaataacataagtttccaatagaagtataaagaatgcaagaaatcaccccaacccaatcaaagtcccctctgatacccaataatcacaccgtgcttgtcaaaaaaacattttgggcatttcacatgtgactgaagagtattcaaacctttatagaagcaaatttctcacccattgctccgcctttctgtttctggaactgaatgtagcgcaatgtgctgctaaagaaagggtctgaggttcgggttgtagagtcactttcaagttcatttctgattaattccaccagaccctgaattgcagtattcgtgacatggggattacctttctcaaaatagtagaggtacctgatgaagtcacatttgaatcagaattacattatttacgataatatagcaaatttatgagcatctttgtgtgtgtgtgtgtgacaggttcaattaatggcaaactcataaaactgacttgtttagtatctcaacaaacagagtgacaggtccactgctaccccgagtgacattggtcatctgttgagcagcatttgcaatcctcaaagcccgcttaaggcaaagcaagaccctgtaacgacaaaacatgtgaatatcagactgatacttgggaaagaaaaagataaatatgtatcatgtttgggcaaatatatgcccataatggttgagcataaccacaatgaaatgaagaattcaattgattaaagaaagaaaagtaaggtgccaaaaaagcgtacctttctccgtccttaatacctccttgatcatcaacccaaaatagatgtgaacatgcgtatacagctctgcactgatctggctttttcaacagctttgctgaatactgatgacaggacaattaattagtcaaggtcgaagagtaaacagctattgaaaaagcacaaaaatcaaagaagaataattaccccagttgccttgtgtgttaaagtatccctgttctcaattccaaatacattcattttctggagagccccaatcattaaatgtatggcggtcacctgggctttagagtcctagaaacaagaaagagttttgagtaatggtcactgacattaaaagatttattactacttactagtcaggagcctgtctcttaccaatcaattggacatatgcaattagaagatagttaaaattaccgcaatttcttcttcgtacagtacaaatgcctgagtgaaaaattcataagcagtggattcaagatcacagtcattagctgcctgttcattcaacaataaaaacagagattgtaggactcagctgcaatgcaatattaaacggatagggaaagaaagctttatttctctaaattacaataattcttagatattataagttccagttctaaagtttctatgttatgtgacatggttactaatgggaaattagaccatatatgcattctaataggtcatatttataaaatatgttaaccttaatgattcgaagcaaacctgatctaacaacaccaccattgaagcacccataattcttttattaatgatgttgaacccttctttgcatatttttattagttttgttcacatttatctgaaagtccatagaaatttgaataacacgatgctgcccattacaacataatttttcatatcaaaacgatgcgctgcgatactacaacgatggtcccttgaaacttgaattttgaacaagacgatgccacagcgacattcccttggcaacttgatattttaagacaaaaacaatgctccaatgaaggacaagaaacttgatttttaaaaccaaaaagtttttgtaggaccatcgtcaagaaaaccaagttttcatgaatgtattgtcgtaacatcgcaggagcatcgctttttgcctcaaaaataagctttcaacgaagcattacaggtccatcattttcaccccaggaagcatcgcaggtgtatgatacaccattttgacctcaaaaataaagttttcataggaattggggcatcgtttcattcaaaactacgttttcaaatctgaaaagaaatgagaaagaaaccaaaaaaatatattacagaaatgtgcaaaatccataaacaatgtctaaagtgaatattttttggctttaaattttggagtggatttcaatcattaaaaagaaatgaaaaccttgtagagaaattatcaaaatccataaaatagaatattgagggaatattttcttgagtttaagctttggattggattttcaatcattaaagaagaaaaaaaacacaggtgcttccataggtactttaatggtgttccaataaaaaaaatggtgatgggaggtggcggtgatcggatttgcttcaaatttgtgatgctgagaaacattggatgtttagagagagagagggtgtttgaattaaagggataacttcatccaagattgtaggagaagcatgttctaccaataatctttaaagttggcatagtttataaatgcccctattagaatgtgtatatcgtcaaatttcctttactaattcaaaatcaattccatgatacagttttaccaaaaatgtgcatggcatacctcagcacattgcaggtatagccttaatgccaattcaggaaatggaacagaagaaagaatctcgataatctgaaagtaagcagatagaattatgtatgcacacaaaacataaagacaaataaacacaatgacatatatgtacatgaatttttactggcaatgccaaatagaatgcttaagaattcaatgaagcagaagaagtagagggaggcataattatttacagtcaccgactaacagtaatttaaactaaattatcttcaaaaactgagttatatatcaggaaatatataacctacataaacaatctctataaataatttatcatcttaacatcaattaaaggaatggctatactctaatcttttagaaaaagaaaggatatacatatgcatatgcacattcacacacaacaaattattttatatgatattaggcacctgggttagaagctgaaagattttttttggtgatgtcggcaattcttcccccactacctctccatcttggccttccaattgcctaaccaactgaaagccattaacaacattatgaattgcccttctaactgaaaatcaactttaaagaaagaaaaaaagtgtaaaacatgtatctactagatttttgtaacccgatctttacattgggttaaataaaatgtaacgtaaaccgaccgacgtacacccctagtatctagcatagagaaaagacaatgataccccctctattttaacaccttaacctttcttctctcattttccctttttgctgctctttttgtaataaatgtacaacagaaagtcaggcattctgccctaattatacctaaaatctcatcttggcatgctacagggtactctatctatcaaaatttgtagtacttaaaaagccctgatttatacctagaaatctcattttggcacaaattatgatcctcattgtattataactttgtattatttaaaacaaacaaaagggacgcacacatgtggaaaagctttaaacgtagcaatttcaacatgtttcattgcaaaggtgaaagaataataattttgatttcaactaaaagaaagaaaaaaaaaacataatttattgtatattaattcgttgatttctccattaaaaaaatcgtaatttcttattacaaagaaaaaaacaaattatagatttcttttacacatggtttacattgaaagacatcagaagatttttacccaatatataattttccacatgaatgtctcatgcttcttttttcttcttcttttcaatgctcttttctacccacagttttttttagtggagtatgatgtggatattttaaagttcaagagccaacgtgagcttatagctatggcctatggggtcaaatgcgacccaaaaaatgtatatgacaaaacattagaagttcatggtcgaaaatgggaataggctaatagttaaggattacaaattacaataataatagaaatattttatttgcaactcaaagacttatatagacactcccattttattatttttattttctataaaatataaaaatacatattttcaatttatacttaacatttttttttaatttttctaccttctcactattattaaaaaatacatatataaaaaattaaatatattttacatattaacacaagaaaaaactatatgaaatcttattaggataaagaaatatgaaacaaaattaaaataattattgaatgtgaaaaagaaaattttaaaaactattaagagcacatttttaaaattatttatttatctatttattttactattggggtgtaattttgtagggtgcaaataaaataccccaaataatatgtaagaatacccgttaaaagaaaccataataattgtaccgtacatgcaagcaaaatacaaagtcagttgtaaaacaggagcatacataccctgagtgcagaaaatacgagaggaggaatagtaaaggtaggcgagtcggccctccattcagtatatgcttcttgacagtgcatatcatctatcgtcaatatatgatcaaaaaaacaatgctatgagagatcaaaactaagactgagtagtatgctgagagttaaatagaaattactttttcctttctaaggtaactacttacctttaacatctcctctgggtcatcattataaagcatgtgcatgagacgagcaacagcattttgctcatcattgaaatcctcctcatcaagctataagcatcatagtatagcaagaaaaaaaccaaaggcagacataaagaagaaaaggccagtgaacaaaattatagaaaaaatcattatacagtaattggtaaaagcaagattcaatagcagtaacaatatatattgtgcacctcttctacagaagttccgtccagatccttgatgagacctttaattaattcgaacaacacctcaacctacaaagaccatttttgtgatactttgaaggaaaaaaattaatattatagaacaaatagagaaaagcttaccttatcagcagtggagatgcaagtattgtttttcattatgctttcaatgataaccatcgccatgactttattcgttccattatcaaggtagtccataacacgaggataattggaaagtgttaaagctgtgacagtatcatcatatttttctaatggagcacttagaagtgcaacaacttgtttagttgctctattgtcatcaagcttaggttttccaatgagcttcttcacacattctccctgtgaaaggatttaataaaacaatttagcaacaaatactggtacatacaatgtttcagacagacttatttacaagtgctctaagtgtatttgtaggaaaatcttttatttattagggactattcttgtacagcttccatatcactattctaggaaagtaattataaggatgatcttattgtagtcattacttattttgtttctgatgtattatatatttttaccctaattgactttattcaaataggctattgtaacgaacataccaatacttgatcaacataatcaagacgatcgggatgcacacgaagagtaaatgtaagaagagagacgtataatgttatggctccaacaataggcatgtcaacctgtgcttctatcacctgcaattgatgggtacaatctaaattaggattaaatgaacaaaaaagaatagaattacataacaaaagaataaaaatcaaagcactcaggacaaattgtattacataagcttatcttctaggcctagaattgaattcattacaaattaaatcctttcagtgtgcattacattccttttaggtgggtctccagctcaattccattaaattcctcaagtcatattaacattgtttttttttctcagattgacactaaacattttctcaagtcacgttgacaaagaccagcaaaaaacatgtagatattgtggcagctcgcagtaggagaatttccttccacatactaaagtaaaaatacaaaaataaaaaaaaataaa

SEQ ID NO: 294714 - DNA, 6765 bp, Cannabis indica
ttctcttatcgatcaacctccatagccgcctacctggagctcagctccgatctctctctcacctacaccctccataaccgcaaacccagaaaccttccatcgccaccactccattccctacccagaccccaacctccgcccctgatttcgttgtccgcccattattacaaatggaggtttcttcttcgattttccagccttcatgctccttcttctcgcgaccttctaaagcctccatcactcaccgcacgccttccctttctctgttacgaaactccgcttcaaacgcttccttctattctataaccttcaaaggtatcgtcttcacaaattttacactcttcttcaaccatcttcagctgttttgtttacttattttcttgaaaattgataatttttaatgtatttggagcttctaatactatccattttatctaattggttttgttgctttgtgattttcaatttcttaagttgagcttgtgtggtgaatgtttttaggtttaaagctcagtttatactgtgaatgaaatctttgatgaaaaaatttcgactttcagtgaaaaaaaacgaactttatgtaaacaattgggtgttatctttagttttaagctctatgttaaaaattatgtgcaaaaaagtatagttgaatgtatttgtgtattctgtttatttgtattttcttgcaaagaataactgttgtgtaatgctaggtactcattctctagctaaatcaatcaaactaggacaacccaagtcctttcttgcttgtgctgcagctggtgacacaactcatataaccgaaacagtgtcaagtagttgtaatgaagaaaggacatcagtttctgattctttagattcctcatcaaatcaaaaaacaagaaatgatgaaaatgaacaagaaagagataatgttgggagtttggatgaccagaagatgattagagtctgtgacaagctgattgaggttttcttggttgacaaaccaactccaactgactggagaaggttgttggcttttagtaaggaatgggacagtatccggccacatttctatagaaggtgccaagagcgagcagatagtgaagatgatcccgggatgaagcataaaatacttaggctaggacggaaacttaaagaggtggaagattgagatatctcttagttctttgtttgtttagatttgttgtgacagtgaaatagaatttagtaactactcttgtacaggttgatgaagatgtacaaagacacaatgaacttcttggagtaattagactagcaccttcagaaataaatgatgttgttgctaggcgtcgcaaagatttcacaaaagaattttttgttcatcttcatacggtagctgaatcctactacgacaatgaaacagagcaaaatggtgagatttattatttgcactacttctggggttgtactcagttaatctatggattcgatgggattaaccttttctctttatgttgcagctgtagcggaacttgggaatacatgcttggctgcagtacaagcttatgatgctgcaaatgaaagcattgaagcattgaacaatgcagagttgaaattacaagatattatcaactctccttctgtagatgctgcttgtaggaagatagacaatttagctgcgaaaaatcagcttgactcagcattggtgttgatgatcacaaaagcttggtcagcggccaaggagtcgaacatgatgaaagacgaggtagtaatagtagctttgctcagatgtttgttaaacatttttgttatgcaagatattgatttatttaaactactgctgaaagttttgtttccttatcttgttaggttaaagatgttttatatcacttgtacatgactgcaagaggtaatcttcaaaggctggtgccgaaggagattcgaatattgaagtatcttctcacaatcgaggatcctgatgagagattatccacattgaatgatgcttttactccaggagaagaacttgaaggaaaggatgttgactgcctgtacacgtatgaaattaaaaactcagtattcttattttatgaatgagtattatgtatagtattccaagttttacaatttcattacattttaataggacgccagagcaacttcatacctggattaaggctatcgttgatgcgtaccatttgagcagtgaaggcactctaattagagaagctagggacctgatgaatccaaagattattcagaaacttgaggaactgaaaagggtggtggagaacaagttcatgtgactttatgtcctaagattcagaaatcaaataaacagtacacagtgattccagacccaagatatgatcataaatagggattaggtgcatgacaactacatttggcttttgaagtgtagagttttgtctcagaaattttgatacacatattggcaccaatgtatatcaaccataaaccttcatcaagaatctttagtagttatagattttccatttccctttaggtaatgcaatgtatatcaggaagtatattatctttctctccacacattttctaaataataaaaaagaaattcacaaacttctaatatttccttcttttttgaataataataatgctttattgtcaagagcaatcattcaacaatacaagattagatgcagaagggatatccccatctacaaacatactatcagctaagctttgagagtttctagcaagataatgagcaacttaatttgcagaacgtttaaaaaagaaacttacactcatcaataatcacaccataagaagactttatacacacagctctaaataatttgtccatgaaaatagtgtaaatttctaatatttctttagtacaatgtataacaggtaatgcaatacatcaaaataattattttttttgacacacttgtttaaaagtaataattgttttaagcatgaaaattagttacaatcacaatccaacttattagcagaattaagtaattaatttttcttgtgaaaaataaactaaaaaggtaaaatgtaatcactggcaaaagacaaacttgattattttattgtatatatttttgaagatcacccaccaagccttttttttccttaaaaaattgaaatcatttgcttgatatcacttagctagatctaatttcttaatctaaaataatacaaactcagtttatgtttatgatatccattatagtattttggtgtttactcttttataattttctgtttagaacaacacacataaatacaaaaaaaatcatttaaactctatttgaagagtgaatacggtccaagccgatgataaatagaatattatctgcagatttgtgctagtcatctaaacaatgattgattttccaatttgattttactaaaatatgtatttattatcctcatttggtggaaaaagcacaaacctaacatgactaagtgtcactaagataagattaatatatatgtgtgtgtgatcttaaattaatattaaatattatttgttgcttacacttagatatctttaggcaagcaaggaataaggttggtgagatcattagacttttgagtacaaaagaagagagcataatcttgtaccaatagtcagttggggggtacaaaaactgtaaaggtcaactcatgtacaattgactcaagccagctaaactccaatgaaattatcacaagtaagcaaatgcaagtaagctcatgctggtcttggcacagaggatcaaatctccagtttaagaactaaactggtagagaaccaccgacaaggagtcagtttgtaaataacagctaaactactattcaaagccttaaaaagattaccttttacagttgggacatcatcatgtttcttcaaaccaacgagaagtttcagctcacaaacacacttcttgttaaatgactaaaatacccttctcatcttgagtcaggatggaagcaagctgcaccaccagcaagtgataccttttacggttgttatagattgtttaagctggtgggtatttttggtaatgcttaaatttgaagccttttcttgagttgggttatgttaagtctttggtttttttttttaagatttttgttggattattcaatgaaaacttgctattctagatgtgtatgtgggaagtaatggagggagtgaggagtttcaatgtggaggagctatttggaaatttgaggcttttctacacaagggttttgagtgttggtgatggaattataatgagatattgtaaaatttgggcttttcagtctataaatgttgttattggaattgggtcattgttgtctttcctttttgccataacatgtgcatatttgtatttgtttccaagtgttcaacctgcaattcctagttatgagattcctaaggcagttatttcggttgcgaaatgcaatgttgctgatgggaaatggatccaagatcaaacttaccctttgtacaatgcctcacaatgtccatttgcagaaaggggatttagttgtttggtgaatggaaggagagataggggttatgaaaaatggaggtggaagccaaaaaactgtgagattccaaggtttaatgcaagagatattctcataaagcttagtgggaaaagagtggttttggttggtgattcattgagtagaactcaatgggagtctttgatatgtatgctgatgactggtgtggatgataagagaagtgtttatgaagtgaatgggaataaaatcaccaaacagattagatttttgggtgtatggttttctacttataatcttagaattgacttttataggtcagtttttctagtgcagcctagttctgctccaaggcgatcaccaaagagggttaaatcaactctcagacttgatctgttggatgatattagcagagaatggattgattctgatgtgttgatattcaattcagggcactggtggactccaacaaagcttttcgaaatgtaagttttcaagctttctaatcatttccttttcattaagtttatacaatgctcttaaaggtaagtaagtagaatgctgttatctgattcactgttcataaagtgaaagttttaggaagatgtattttcatgattgtgtttctaagctagtttttcagacaggggctgctattttcaggtaggcaaatcactaaagctgggaatgccaatcaagactgccttcaaaaaagcattaagcacttgggcatcttgggttgagacaacaatcaacacaaacagaacaagtgtcttttttcgcacttttgaatcgtcccactgggggtatgtttcacaaacttctgactagaatttgttctaagtttctaacacaaactatgctgttgttttttactgagttgacatacatttttgtggaaagtgagtgaaatcttatgcttcttgcatatgtaacaggggaaagaaccgtaacacatgcaaggtgacccgacatccatggtcaaacaccagagggcacgaacgaagctcgatttcagacaatataatcaaagttgtaaagaaaatgagagtacctgttaaacttctacacgtgacacggatgggagcattcagaagcgacgggcatgttggtacttggggcgataatccatcagtgtcggattgcagccattggtgtctacctggtgtgcctgatatgtggaatgagattctcttgtcaactctgctagctgaccatgaataactttcctctccaatgagctatgaaacaggattggagtctaacttgtaagataattctttttgaagccattcttaggaaaaaaaaatctaaataaaaataataaattgctgaataagtttacattgcagagaaggtgtatctatatgtgtactctctactcatgttttctactaagatttgtagctaagttgtactgaatttttgcttatcattacaatatactaaattaatactttaagagctggatttcattaaatcatatgcatatgagaagtgttttccaatccattagaaatcttagaataagagtcaagtcacttaaaacctgccactaattcttaactctaagtctctccaagattggcctaaaaaccattcttacaaatagggtagcaaatgctctcatttcttcacacaacaactaaaaatctaaaccatcaacttctcctcatttgtaaagaccaatcaccaaaatggcatcatcacagaacaactttcaccctcctcagccaccatcaccggacaaccatccaacggttatagttattgtgttcatttcggttggttgtgttgtcttcttcgcgttctttgcagctgctctcttctgtttcctcaagaagaggacgaagaaggcggtaaaaaaggatgaaataatccatttcgacgagcacaagaaggtgactgaggccattgtagaaggtcgtcatggacctgaagctgtggtattgtcagttgaggatgatgttcattttgagagggaggaggtgaagactgagaaggttggtgaaaatttgaatgccaagtcggctcaacccgaggcttccacatcagcaccttcttcttctttctctagtgattctcatcatgttcaactgggacacaaggcttgattagaccattgtgctcatttcaatctagagaaaaatttgatttgaataaaatataaatgtataaccttgtgagaaagtcacataaaaactagtttcatcttattctttcattttcatatgtaccgatccatttatttgtataataaaattgataaaaaaatttaatacatatttatataaaaaa

SEQ ID NO: 294715 - DNA, 1044 bp, Cannabis indica
acctattaaaaagtgttccatatatatcaaattttaatctatttatatcaaataatattataggtcatatatgtcacattagtctggtcaagtgtgcatgcttactgtacatgttaatgagaaaaacgtccaaaagttgagagtatagctatcaatttgatggctttctacttattacttaattagcaagactcttttgagaaagaaaaggagaacggtgaggttttatgtgtgggcagccaacatatatatatatatgagttggaaaattctattgccacttaactaattattataataatttaatatctggtgttaggaaagttttataattttaaaaagtattttctatctatccatttgacttatgctatatatcttcgaacaaaaagccatatataatattaaatatattatatcttttggcattactctctcaaacccgtctgtttttattaaggcataaggcagcactgtctattaatatgtaccccaccagaagttattcatttggaaagaaaaacaaaaagtaaatacctttaggttcttctccctctcaacaagtttgaagatatatccaaaagttttcagagagagagagagagatgggaagatctccttgttgcgacaaggcaaatgtgaagaaggggccatggtccccagaggaagatttaaagctgaaggaatacattgaaaaatatggaactggtggaaattggattgcacttccgcaaaaagctggtaacacaaaatttccattgatgggtttataggtatatataatcgtcgtgtatatacagtatcattgtgtattaatatatgtatatatatttgttggttttgttctggatcaggtctgaagcgatgtgggaaaagctgcaggctcagatggcttaactatctaaggcctaacattaaacatggtgaattctcagatgaggaagacagaatcatctgcaacttgtttgctaacattggaagcaggtacagtaatttcttaatcatcatcatcatcttcttcttcttcttcttattatttttatt

SEQ ID NO: 294716 - DNA, 3419 bp, Cannabis indica
tatatatatatatataattaaactaaattaactcaaaatccatttcaataagagtacacttaaagctctaataagaagccagaatccaattaactaattcattataaaatagttagaatatagttacaaatcaccaagattatcatatttccacaaatccactgtcataaacagtacttttattattgaaaaatcagataaaaaattagaattttttggggaatcttgaatcatctgtagaaatcataaacaaactaaattaactcagattctgtttcaaaaggagtactattacaactctcataatcaaatcaatcagcaaaataataataaatattaaaaatatagaatctacatttgcaaattcaacaaatccactgtcatgaacagtaatatattataaaacaaataaataaactttttggggtttttcttcccattacttcaaatgggtctcaaaccccattactcatcactatcaattcaaagaaaaagatcaaaactttatcggttttctcaaatcaatagaccaaaatccgaaaagggtaaactcaaaatcaacaatgaaaatcaaaaccaaaaagaatcaagagaatgatagtgatactgacttgggtcacgaacagaggctttgacagtgtagccacgttggaggagaagcttaacaatccatgaagctatgtaaccggaggctccggtgactgccacgaccttgccggcgccggacatgtttttcttttctttgaaaatcagagattttgtttttgtatataaatgtgtggttcacgttttacatggctatatatattatgagcagtcagttacgtttatattttgattttgactaacaaaaacatttactttttcaccttaattttagctaaaaatgaaaaaaagtaattatggaaaaaaaaaaaaaattagaggcttgatacaaaattattttcatggtgtttgatataattacaacatcatttctatcaattccgaatagtttacaatccgaaaataaagttcttaatattccagtttatcactcgcgtttaaaaaacttcaaatgtattttcgacacggtaaattatttgaaattttttaaaaatttacaggataatgttataattataacgaatatctgtaaaaaaaaattgaaaaaatatattttgacatgtattttcgagcgtagaagttgtaacagaatgttgatggaagcactgctttgtatacttaccttaaaataaaataggtaagtatataaaagtgatgcttatatacatatatagattgacaaaaatagcattgaatacaaaagcaaaagtaggtccaaaatgtggtgccatggtgggagtagagatttgagtcatggagatgatctttatgtaaagtagtggtgtagctttcagtgtgttaggtaaagctcaaaaaggaatcttgattaactcattacagtcctatattatatgataatttttagggatatataagtttttttttttttacttgatttagttactatcattaagtgagtatagaatgaaaatcatatatattaattaataaggagataggtggtgttttcatgggagcattgtttttggacactaatagtatttatatgagactctaatccaatgtcattttaagtatttagggaaaactacatgtagagccataagagacttgtatcatgttttgtcaatggttatgattattaggtaagtctgtactgcaccctttaaaaagagttttgattgatctcttatttgtttcgaaatacacaagagctttgtagtttttttttttaataactgtgtacgttataaattatttaggaccacttgtaaattttcagaaaattttaaataatttacagtgctaaaaataagatttacatattttgttacacgcaagattattttcttatacgtatggtaagtaactgtttaaacttttattttcggcgttgtaaaatatttaaatttttttaaaaaatttagaaataatctttgttatacttatattttaagcaattaatatggttatgacacgtatgaggaagctgaaaaataaacaattataaagaaataactacgttcaaataacttgcctcaaattatacaattggtaaaaatattcaaactcatattctcataaaaaaggatgaaccgtaaataacatgaaaataataataataataaaaaccaagttcataaaataactcaataatacatacaaaaatctaccacctaaaaaaaacaatatcaaaatttaaaaaaaaaacacaaaatcaaaatttctattgattgattttgttttctccattcatgaccaaatcaatgttattaagaaattgagtgtacttatgtttaagccacttcaaactttttttcatagaactcttcatttttctttcagtagagtacactttataagttgtaagtcttttcaacttttgaaactcaagattggcatctgcaaggttcggtggcttgaccgaagatgtagaaggcttcttagaaatgattttggattttttgatagtggagactttgttttctttctcgattttcaatttgttgaaatcttccattgttatttagggttttattataaacttttgtttcaagtgaatgaacagaattctaaagcagaagtagaaaatttgagtaacataaagtctctaaattgagtacgaagaagaatgtaaataatgctttttagatttagttagaatttataaggatgataaataaattaagaatttaaaagataataagatttttaaaaagaattaaattttatagtaatattaagatatattcagaattaaagtctctttctcgttggaatttaaagatataatactaattgaataaaattaaaagattatatgatttttttaaaaaaaaattaaatttaaatttagtaagcaattatatgatatatatttattttgtttttttaggagaagaagaatccagcgtttttcattggaatttatatataaatctaataatagcagaacaaaaactaaaagattatatgattttttttagaaaataaaataaaatttaataagatattataatgatatcaataagatattaattattaaatttcttaaaaaaataatataaagtttttgatttttaaaatgtgctatcttaggagatagcctgcctaaaggaattctttcctttccatttttttttaattattgacatttttatttaaaatcaatttataccctctaaaaaattttcttatcaaattttatagagaaaatttcaaaaataaagtaaatttactaattagtttaattatataggtgtcgtttggtaatacttttgttttttaattttttaatcacaaaatgaaagtaaaatttttgtttttaaaaatttaacatttgaaaaataaaa

SEQ ID NO: 294717 - DNA, 3513 bp, Cannabis indica
ttttctttctttcttctacttcttttttttaaacgtctatacatgtaaacatattttctttaaataaaaataatatatactatatatttttttttcatgactaatcttctattctatatcactttttttatttcatgtatgatttctcatggccactcttctatatagattgcagatggtcttgtactagagaaaacatccagtcccctgggagttctcctaattgttttcgagtctcgtcctgatgcactagtacaggtaaagggaaccctcaaccttcattgctctttaatttttatgttagtatggtaccagtcgtttgggtgagcaagctagctctgtctgtctgtaataaaacttttattcctctactatcaagcaaggcacttgaacacatttgttggcttctctaaggacatattaatgacttttaatccccatcataactttatcctaaacattaggaaagccctttttctcgtaatcctaagtatttccacctttttataaactaaacttgagtatattctcatcatcattagtatctgtattttgttttatttaaatagattgcttcactagcaatccgtagtgggaatggacttattttgaaaggtggaaaggaggcaaagcgatccaatgctattctgcacaaggttagtttcttatattcaattgatcaatacataatataatatactttgaaagaacataatataatatacttgaaattcttgtgcttgtcttcccatcattccttggcttctgcgttgtttacaggttattaccgaagctattccagataatgttggcggaaaacttatcggacttgtgacgtcaagagaagagattcctgatctacttaaggtggaaatatcctagaataattacttatttattgttattcttttctttttatgcatgaacttcaatgggaaaattgagtcagatgaagttaagaaggttgcgcaattattttttgttatagcttgacgatgtgatagatctagtgatcccaagaggcagcaataagctggtatcccaaataacaagctcaaccaagattcctgtcctgggtcatgctggtaatatgaattgaacctgccataactctgttatttatagttgtttttctgttttgaacatggttctggattttgtagtaagtaacagcattttgttttcttcagatggaatctgccatgtttatattgataaatctgcaaacatggatatggcaaagcaaattgtcctggatgcaaaactggactatccggcagcttgtaatgccatggtaatctatttattctttatttcacataaattaacttatctgctttaagtgccagcccaagtttggaaaacctttgtcattattgccttgcatgatttgacatgttccttattttttgtgcattccactctcaggaaactctccttgttcacaaggatctggcacaaacaggttcttttaatgagcttattgttgaccttcgcactgaaggtacagtttctaataaaatatatatatatatttcttttcaccaagtattcattccaaaaaaattaagtacaaagaatcaacatatctattccaaccacctttccaatagccagatgcaaagctaaaataataagccagcttcttacataacggttattgtaatttttgtcccaatcaggttttcatgtcttgagccatcgatgtaaattaagactacattactcaaactaaaattatttatggaccttctagaagaaggctttggaattttctagaggcacaacttaccggtactactgttttgcaggtgttactttatttggtgggcctagggcaagttacttgctgaacattcccgaggcacgttcatttcatcacgagtacagttcacaggcttgcactattgagtttgtggatgatgtctacacagccattgatcacatacataagcatggaaggcatgtctgcatttgcttttagaaagcatgttaacttcttcaaatccttttaattatgtcatttgtatagaaacagatctttaatattccaaattcactactttcaacagtgcacatactgattgcatagttacagaagattcaaaagttgcggaagtttttctacaccaagttgacaggtgatactacgcaaaagcttatcttattccacaatagataccattagcttgatagttgtctatgattgagaagagttgtttattatgttatgttagtgatgaatcgacgtggtaacactatggtatttggttctatatctctgggaactaatgaatttggcttgttataaacattgcagtgctgctgtcttccacaatgcaagcacaagattttgtgatggctcacgatttggattgggcgcagaggtatcatattgtgtgacagttacacaaaagttaagaatttttctcatggtggctttgtatttgattccctacaatttccgtgcaggttggaataagcacaagtcgaattcatgctcgtggtcctgtaggagtagaaggcttgttaacaacccgatggtatggtttagttgtttttacaaattatggattctgcatatgtgcttttcgtattgatttatcattttacaaaattttaaattatttcttttacgagcagaagaactaataaagaaatggcctgttacaattgcaggatcctaaaaggaaatgggcaagtggtaaatggtgacaaagcgatttcatacaccttcaaggatctgtcaattgaatcctaagttatttggatgggatggaatgaatcacaagaatcaaaacccggcactgtgtcgggttttaactctcttgtcaacagagttgatcgatggggagagaatagggaagcaagaggattttttctttgtgctttgctaagttcattttagtgtagtgaattactagagagagaatatggaaaggaagttgttcctctttgtcgtttactgcgttgcgtctatattagtgtagtgaatttgctaggcttaatttggtaactaaatttcattgctatggaacaatcacaagcgaggcttggtttggtatatctaataaataataataataatgataatttccttgagtttattttatcacggagctaccctggtttgcacttttaccttagtttcaacctaaaaagtgttttgagtttagctgttagaattttgttccttatcataagcatgtagtattagaaaaatggtccgacataattaaggcataactcaattatacaaaaaaaaaaaaaaactaaactaaagcatactctgttctttccagtgacggagggagaatttgtaagatgggggtaaaattgtagaaaattaactggggggttaattataaataactatttatattttacgtatcaatcaatatctatctatatatttatataattgtgttgttagggtagatgacatggcatgttgtatgagcttttcttctatttttctattctcttatttttttttacattatttagattttt

SEQ ID NO: 294718 - DNA, 1314 bp, Cannabis indica
gaccaatttccatctctaatactattattagtaaatcatgtaatctttttacctttaaactttggtgttgtgaatgttctgtatccaaacggagctgcaaacgttcaaactcagcttcaagttcagcctcaagttcatccatttcacctaaacgctgttcattcatattaagatcagtagaaatagaatcatcacattccaagatggtttctgagtctggtaccacatatgaagttgtcccagtaaaattcataagaggtgagagatgggtattagagcttgaactctctctaaaattattattggaagaataagcaagattactcttatttcgaaactcatctctaatattatgaagaaacatctccatttgtttcctcatttcaatcatcttattcatttcatttttactcgtaccaattagatacagtaaaccacaagcaatccccaaattgaaagaagtgtttcctttacattgacctaaaattaaacaatcaacagttaaaccaaaataaatctcacttcattgattaatccaaaaaaaaaaaaaaccttaaaaatcatcacctgagtcttcactctctggagccgaaacaggcaaatcgctcaccggccgttcctctgttttcctctccttggccggcctcaaggccgagaaacaccgagcaatgatccgccgcggcgaggagcaatggctgttgtgcttacacttgtcagaggaccgatctctccggcgattaccaacgccgtccatgaggaaagatagtaggggtctgtaacttctactatcgtcggagtgatagccgtgatcgtcgtcggagttgagaagaaggtcggctattcgaagaggagggatttggttatggggatcgggaaatggagtggggtttaaggaattgatttccatgtttgaaaattaaagaaataataataaaaattgaatttttcttttttccatttaatgcgatcgtgaagttttatgaatgggaaaacacagaggttttaaatgcaggaacggaaaggagggaaagtttttaactgtctttccacgtcttttcgttttcccatcacttttccttttcctttacattttgatggggtttagttgagaggagataaaacattatggaaaattctccaatgaaccctttaaaagggatatattaatgcaccccttaaaaaagatatattgatgcatccttatctattttagcatccgaaataattttttagtcaaattttttctcatgatcatgtacgttatagttatttaagacatcctgcaaaattctaagaaatttggaaaagtttaac

SEQ ID NO: 294719 - DNA, 1692 bp, Cannabis indica
aagtataagagctatatcccttgcgggcaagtgatcctatccgatccccacctatatacagatagtgaccatgtccactctgatatggttcaagattgatgagcaaaaaatagtcatcatcttgagggagaatgttgtggatattgtcccatatagaataaatggtaaagaattgagccatatataagaacatgggctactccactcattgtcaattgattttgaaatggaatctcataattctcaacatgaatggcctctaagcatggcttaaccggcattagcacagggtctagtatgacataaatcaattactgttaataaataaattaattaatagcagataataagttaataacatactatattacatgttgaaatcttttataacatatttatattatatctatatgtatatataaattagtcccatgcacactcctggcgtagattcgtataatcaaaaacaaaaggcttactttatccctttgtctgtgtttcctcaatgaaaagaaattggttcctttgatccttccccatctcctttatcaccttctcctctactacccattataaacttcttcattcacttttgtttttccttaatagattaccttcttctcttcatatattattacattataaataactaaaataataattaataaccttgtgtctgtgtttatgggggctggtttctcagtgttaggtgaatcgagagagagtagtggtaataatggaataaactttggttattcgaaaaaggcgaaaacggtgctggatgacttgccggagaattgtatctcaaccattataaaatacttgaatccacctgagatctgtaaactggctttgttgaacagagcttttcatggtgcttctttggctgattttgtttgggagtcaaagcttccatccaattacaactttcttctcgagaaattactacttcaatctcaaacctacgtgcctaagaaacatatatattctaaattgtgtcaaccaaatcggttcgatggtggtaccaaggtaataaataaataaatatataattaattacctttcattttataacttacaattacaaatgtcatattattattatgtatataggaagcttggttggagaagagtagtgggaaactttgtttgtccatatcgtcaaaggcgttgagaataactggaatagatgatcgaagatattggaattacattccaactcaagaatcaaggtcagaaattcaattaagaactcatttgttaaagaaaattcgttttattaagcaatatgcaataggttggtttgttgactttgagtttttttgactacctctctgtgtgttcaaaaatacgttgtttcttttattcaatcatctttttcaatcgtactcatatcaaaagtctctctgtttcctttttagccatcaggaatgtatagtaaaatcttctttattaatatatttgaaagcacagaaagttcctggaaatttcctgattttggatttctttgaggctgaataactgtgccatcagatattcaatagtaatttaaaggaagctcataattgttttttcttgttgggatgtttagggttacacagttatgtacttaaaacttttcttttttagataattcgaattatggcattgttgaaattatgacaaaaaagaaatagataatccgataatttt

SEQ ID NO: 294720 - DNA, 2487 bp, Cannabis indica
aaaattttcctgctaattttatttttggtgattctctagttgatgctggaaacaacaactatattgtttccttatcaaaggctaactatgttccgaatggaattgatttcggttcaccaagtggtagatacacaaatggaagaacatacattgacattataggcaagtttctttttttttttaagcttttgttagtttgctctttttgtgtttctcctcatatttaagattttgattttgttttaataggtcaagaattgggtttcaagcatttttctccaccttacttagctcccacaacttctggaccaataattcttgatggtgtaaattacgcttctggtggaagtggaatacttaatgaaactggaataatatttgtaagttttacaaatttgttgttgattgttcaacaatcaagtgttgtgttttttagtaagttttacaagttttttttttaattattattattattttgtctcaataattggatgattcaaatttgatttatagggaggaagaataaattttgatgcacagattgataactttacaaatacaaagcaagacattatctcccaaattggtcttccagctaccatgaaattgtttgaaaaatctctcttctcaattacaattggggcaaatgacctcaatagttacgtggcaccacgtccctctttttctaaacagaagttggtgtctccagacaagtttgtgggatctattatttcaaaattgagacaacaacttaatgtaacaaaaaaaaaagataacccttttcttattttcatcacatttaaactttgaaccattataacttggttatatttgttacatattgtagagactatacaacttgggagctaggaagattgtggtggctaatgtgggacctattgggtgcatgccattggagagagatattaatcccaaagtaagagataattgtgtatcattccctaacgagctagctcagtcattcaatgcccaattgagaagccttgttgcaaagctcaatctcaatctcaaagggtctaagtttgtgtatggggatacttaccatgctctagaagatatccttgacaactacataaaatatggtattttaatattattttttttctcaacatttttagatgtgtgttcatgctttatttttttttcttttgttttttaaaaataggttttgaatatcgaaactcttcttgctgctaccttcccagaacgttaggagatctaatttcatgtgttcctctatcaaaagtgtgtttggacagatccaaatatgtgttttgggataaatttcatccttctgaggcttctaatgtcatcttaattagcaaaccattatcttgatggtgacactacttttgtttcaccaatgaatgttagacaactcttctcatcataattcttaaaccaaccacaaaagggtcacaagaattttataataataatataataaataataaccttctcccattatcataataatttataaataatatatataataatcacaaaaggtcattattatttttttaccttctcccattaaagaaaaataaagacaatgtattatgtatatgtaatttgatggtaatgaagctgaacaatattcctatctatctttcaatctatctacagcacaaacttaaggaagtgatgtggggtcctttataaatttcttctactactatctttttctattaaattattgatctttttattatttattaataatgtagcatttaaaaaatattctctaaaaaaacataacatatgtaagaatctaaatatatatatactaagaaatgatactacgcttctcacagttttataacaattaaaaatgagtaatttacgtcataaatatcttaggtttaatttttgacggtaataatatctaagttataattttaaaacttctgtaggtacctggttaaataaattaccacgtggcaatccctgattgatccaaatcattaaattttattattaaaaaaattagttcaaatataccaataaaaaaaatgacacatgaatataatgacttaatatttaacggttaggtacctacagagttctagaaatataacttaaatattattaatgccaaaaattaaacttacgtatttatttgtaactgagagttaaacttagatatttatgccgcaaattactcattaaaaattgcataaacttaaagaattttataatttcatagaaaatttatacattttttaagatttttttaatttcttttaatatatatttatatataactatacttgaagctacaatgtcatgttatcgttattatttaaaatcatttcactaatatttaaatttagggtaaataacggcataagtattcaaagttttgagtttgtaagcggcataagcccaataattttttttagtgccataagaactcaatgtttgtaaaactgtaatttttctctactttcgtcagtacaggct

SEQ ID NO: 294721 - DNA, 2825 bp, Cannabis indica
gggcataaaacccaacattggatgcaaactagaggatagtgagaaaagttttaagccctgaagcatcaagtaaatgctctcgaaatcacctttgaagaagaggaggacatcatctgtaaagctaagatggttgagccttaactcattacatctttcatgagatagtcttctttctctcatattttttcatgattttcctgaggtattccattcccaaccaaaataaaaggagggacatgggatccccttacctcaaacctctctttgcttcaaaaaacccatgtaaagatccattaaatagtaaggagtatctaggagttgtaatacaagtcatgatcagcttaataaacttagctagaaaattaaaagcatacatcatcttctctaggaacccccattccatagtatcattaggcttttttgcaagtctaacttaatcatccaatttaggcttggattcgtttttcctacccataatgcctaatctgatctagaaaaatcataatattatgagagatgaatctacccttaatgaactccccctaggtttgggtaactatatctggaagaatgagcttaagcctattgcatatcaatttagtagctaattttgtatattaccttacaacaagctagtgggcctgtagtcacctacagtgtttggacatttggtcttgggaatgaaagtaatcattgttgagttaatctcattgagcagttgccctgtatggagaaaagatgtgacaacttcaaacacctccttccaaactagatcccagttgtcttgataaaaggagctaatatgtccatcaggccctagtgccttgattccaagtatgctaaatacaactttcttgacttcctacaaagtaaattcagtatttaacaagtcttcaagctgtttagttatgattgggccttgagaaacaattcgggtgcatacaaccttctattttccatttgagtacccaacaacttctgatagaatgatagaaattcatttattataccaccagggtccttaatcctctttccttcagcattagaaatggataaaattctgttttgacatcttctctctctaataatagaatgaaaaaggactgagttttcttcaccttctttgacccaacatagtcgaaatttttgttgtaaaaatgagcaatagtctttgtgcactcttacaaaaagacttctggctttttctcctattgttgtagctccaagttcaagggactattttgcaacttattttgacaatcatttagttccttttttactcgagcctcattagcttgaatcccagagaaacttcatttgtttagctccttaaagaaaactttaagatccttaagttttgagactacttgaaacatcttagtcttagtaaaaggttgagtccagatcttcttaacttattggtgataattaggatgtgaagtccacatcctaaagtatttaaagggtttccttctactaggaaagtcagggtagacatttaagactgctggtgtgtggtcaaaaatacctacattgaggaaaataacttctacagtgttgaacatgtctttccaggattgattagtaagaactccatcaatcttggagtatattttgtcattttcttgctgcttgttactccaggtgaaaagacttccactgtatttaacatcagcaataggaaaatcattaacacaatccaagaaagccgtggatgagccatgcttaactttatcacctattctctcatccttactcaatacgtcattgaagtctcgaaagacaatccagggatcgatttttgcaagacttcaaaggtcattccaaagagccttccttccatcttcatcattgaaaccatattcaaaggtaacaaaaaaattatacctcttatttatagtcttaacaaacaaatggatcaattgactagcacaattgagaatactaacattgaattggaatggattccaagcgacaatgattctcccacccttatgccatgctatatttgaagtgaagcaccaccccatgaacattttttggtttaagtctccaagtttttgagccttaaccctcgtctcgaggagaccaactaacccacccttttgagtttgctgattgttaatttatcagacgatccaacataggattttatccattataaagagagggtcctcctccctctcttgtatttctaattgcagtcttaacttgatcagtatctccattgttgcttgactcattatgctcttctcttgattctgacagagcctgtaagaagtttgaagtagttaatttcatcattttctctttctccttgatcttccaccctttaacaactggttgaaaattagctgttgttccattctctatacctgttcttgctgtctaccttctttccttcttcattcttttatttcatgacccatatctttacaattttcgctaaggattcgtttccacgtttcacgaataatgtgatttagggcctataattcgtcgagcagctgttccactcaggttggccgacacacctgaatttggaaacaaggtaagattagtataacgatatgcatatacatttacatgtttagtgtgcatgttagttaagcctgttagattacattagaaatgtatgttggcttgtgtactactcgacaacatcacatcagtacgactagagtgtgactagcgtaccgagtataggttgatattatggtcgatagtactacttgacagtatcacatcggtacggatagagtatgactagtgtaccgagtataggcaatattatggtcaatagtactatctgttggaaattattt

SEQ ID NO: 294722 - DNA, 6224 bp, Cannabis indica
atgtagtgttaaaagaaattggcatcggtattttttttttttttttggtgcaatgtcttttttccttaaggtctagctggctagctagctagtaattataaaacttaacttttagataccaaataattgaatggacacaaataagtataaaaaagaaaaaatattaatatgttgaatatagttgggggttcatattaatggcctattttgcagttgctatataggaaggtgtatgggaaataaatgtccatctttatatatgaatatatataatgctaaaagacattaataataactagcatcatcatcgatattatattgttattggcataattaagtattaaatctcatattatttaaaaaaatactaaaaggcacaaatagtacctagcaccctcttatgtgtcaatatcactattaatccaaataaatatcaagtctcatgataactcttaggtaatatcgctcgtcaatcggaatgcgacatgtctagagatgctagacactactggtatccaatagcaatataaaaacttttagcgaatatcattgcaagaagacacatctaaaaagtactaaataccacaagtgtccaataacaatattaaatatatgtagtatttaattcaattacttttttgacacgtgagatagttatttggtggagtgatatattttttcatttttctaatataataataaatttttccttaaaataaataatgataaagttaattggaacatcgaatgggaaaaactttcatgtgtatattttgggtgtttaagttttttcataatcgtgtacgttatagtcatttaagacaacttgtaaaattttgataaattcaaaataatttataatgtataattcaatgttcaaaccatgatgtcttaaataactaccatatacaatcataaaaaaaaattcagactaaatttttttctagttgctgaaaaagataaaaatatattggtgcaccccttcaaaatggtacattgtagaatttttctatgtatttactactatcatcaattcatcatattatataactttaaagttgatcacttaaaaaatccagagagtcgatttttagaaaaatttcaattagctctcgtgcgataccttgcctttatatattacaagagggatattagtacaaacctttctagaataatacagctcatcaaagtttgttacaaaagagaatatccctttgacactataataaaaaataaaaggaaaacaatcattacaaatgatttagtaactatgccactacaacagtacactaacgacagagaaaaaagctgactaggattgacatgcgatttcattttttaacacctcctctcaaactatgtggagtttgaaccacacctagtttgtcaataagaaaatagaatctgaagcttgagagactcttggtaagacaatctgcaacttggttgtaggaggcacatatcgaatttccagcttctttcccaaaactttgtctctaacaaaatgaacatcgagttcaatatgctttgttctggcacggtatacttgatttaaagttaagacactagctcccatattgtcacacaatgtgacaggtactccagcaagaggaaagtaaatttcataaactaattaatggttgattaatccatgtgatttctattgaaacttaggcaagatctcggtattctagctctctactagatcttgagactacagattatttctttgaagaccatgacagtcatatctccaaaaaatacacaatatctagcaatagacttcttgtcatctgggtaacaagcccaattagcatctgagtaacttgtcagtgagagtttatcacagaatttgatatgaattccatagtccaaggtacctttgaggtatctcgagaccctttttttcgttgaccagtgataatactattcccattacaattaatcttattccattacattaccattcatattaccattaccattcccatcacattatattatatcaaagcaaacatcacctaagtttattgattgtgaagctgagatcaggtcttgtgtgagttaaatattgcaaagctccaattagacttttatattctattggtttttttgatggagtgccatctgtgattgacgaaacctttcccactgttatgggtgttggacaagattttaggtgtagcatgtttatttttcttagtagctcaatgacatacttggcttgtaagagatatatctctatctcatctctgtgaacctctattcccaataaatagtctagcaaccctagatcttttaaagagaaaatttggttcaacttgccaggaactgttttagcttcttagcattgtttctagtaacaatgatgttatctacatagatcaacaataacatctatagtagttttgtagaagaataaggatgaattagctttggaattgacaaacttccagctttgggacttgctttaagccatacagagacttctctaatttacaaacataatctgggtaccttttgtatacaaaaccagcaggttgttccatgaacacatcttctgttaactgaccattcaaaaatacattgttaacgtctaattatctaacatcccatgatctagatactgctttagtaagcaatatcctcattgtacaagccttaacgacatgactaaaagttttctcatagtctattccaggtctttggttgaaacttttagtaaccaagctagctttgagcctttgagtgctcacatcagagttatatatatttttccttaaacacccatttatttccaactatattcatgtgaggagttctaggtactaacctccatgttttgttctttaacaaggctacatttcatatgtcatggctttattccagccaggatgttgtaatgcttcttcaacagagctcggttctccttgtcttacttcccactttgattgaccaatgtaaactttaggcttgaagattccagccttagcacgtgtgacctggggatgtgagggaattgttgtgtttccatttttcgcacagtttcactttcagcgttctattcattttcacttacagcaggaacttcattgttgaattcagcaacatcatcgaaatattgaacaccaaatttttgggtgttgtgtgagttacttaattaagacaatgcttcaagagtggttgaatgatgatctatatcaccttcaggatgaggattctcttatggttagttaggaggcttttcttttggaacattaataaatgcagaccaagaagggacctaaacttgaacactttcttcagatttgcttgtgttaaaaaaccatatttgaatggaaaatcgagttcattaaatatcacattcccagatatgtagactctccctatgctatttaagcatttgtaacccatatggctatcactataccctaggttaacacacttagttgagtgatattagaatttatgtgtttgataggggcacaaacatggataacaatcaacatcaaaagtttttaaaaatttataatctggttttctagaatgaaatttaaagggttacatattgctcacagtagtgaggagtctgttgatgaggtatacagatgtttggaaagcatcccaccaatattttgaaggcatgctagcttaagcaagaagagtaaggcccatctcaacaatatgtatatgttttctctcaactcttccattttgagctgaagtgtgaggacaagggtgttggaaacatgtaccatgttgagttacaaagtcaacaaaggctttgtactcgccccttccatatgtttggagctttttaattcttctgccaaattgattattgactaaggccttaaactgagcaaatgccttaagtggatctgatttcacttttagaaaataaatccatgtatatctagtatggtcatctacaaagtgtatatagaatctaaagtttgtattggacataatgggaactggcccccaaatatcagtttgcacaagatcaagaggaaatttagctttgttttgattgattctaaaaggaagagagtgtgatttaccaaactgacatgcctcatagaaattatgttatttatcattgattgacacaacatttgaaaattttttgacagcagacaaagacaacctaaagctaggaattgaagacacaacaaacactagataaaatttagataaatataaaaaggaactaatgctgtttggagaggaggatttggcacttgttgagtttatagaccttctttaagcctcccttgaagcaccttcctccttgttattttgtccttcacacaacaattattagatgagaactcaacaatgacattattattatcattagttagtttataaatgctaattaatttttagtaatcttgggaacatgtaaaacttttttcaaaattaaaggatatgagttagtggtaggaagaacacctacactaacatgttgaataggtaacttattaccatttccaactgtaataattttcttaccactatttcatctttagattcaagttgccaatatctgatgtaatgtggttgttggcaccactgtcagcataccaagcctcatcttctgccatatctagagtagcaatgaaagcagcaactatctgaccagatttttcacatctgaggtgtttctagtaggagttgatcccatgtaggactcatcatatcgattataacattgagcagctgaatgctccataccttccacaaacttggcatgtaggtttggggccattggatctgcctcctctgcctctattgtttggtttgcctctactgctattgtggttgttgtttttgtttgccagattagttgttggtgtagatgaattattgagggatttaccattattagagaaggcagttaacctctccactttgctgtcaaaactcagtaaaatatcctgcaattcttgccaagaggttgactgtcttaccccaacctgcataacaataggcaagtaatccaaatttagaccatataggacattagagacaagttgagcctctgaataaggggcacctgcaagggctaggacatcagcccattgccttttctgtctgaggtagtctgcatgttcatggctccctttttgacggtctgaatttttttttctatactcatttattttggcctttgaatgagcaccatacaagcttccagagctctccacaactctgctaagctcgagcaaccaacaacttcagttgctatggtctctgtcaaccaccccataagaagttggtcatgaacaatccattgttcatattctggattaacttcactaccaaaactaggttgtccttcttaattgataggagaaatgaactcttggggtttagttcttgcccctgttaggtagtcatctagtttttggtccctaatgatggtagtgaccatttgtttccacagtgtgaagttgttcctatccaatttgaaagtaaaagattgattgagagtgctcccaaactatgggacaacaatgtttgaaccagaggcaccactgtgatttccaaacgatcgattaaccacattgcttcttgtctgaacttgagctaatatatctccctacaatggagtttgttctcttgtagccatggctccaagggtcactctgatactagcttaaaaaatgcaaggagtagattttttaggaaaagctcatttagctctggtgcgatgtcttgcctttatatattacaaaagggatattggtgcagacctttttagaataatacaacagctcagcgttggttgttataaaagggaatattcctatgacactataacggaaaataaaaagaaaataattattacaaataattaagtaattatgccattgcaatagtatactataagaagagaaaaaaaactgactaggattgacacatgtaagttcattttctaacctgatcaaattcattagtagtccatgtataataatcttcataaattaataaataatttttaaattaatacacacaattaatcttcaattaatctcccacaaacccgaaatttgttgtacccccatcgggccccaatcggaccaatcggactcggtacaataaatttcgggttaggggttctcctccatgtggtagtcagtcggaatacgcagttgactccgtgcggtaatcggtcggtcggaatggtgggtaggggtcggtcggaatggtgctgt

SEQ ID NO: 294723 - DNA, 3446 bp, Cannabis indica
tatttttgtaaatttctctttcttttattcatgttgaatacaattggattgtcattatccaatttttattaatgggaaattctttggctaataattatagatgtgatttgtcacatgtatgctcattcagattgacagtctagcattcttcgtactttgttgatgcattatcattatcggcttattggttttttagttgaatgtattattaggattttctgtaagggacatttagtatgaggcgttcaaaataatttaattaacttgaaaataaaacagagaatatgattgtctgaaaacttatatttgtgtttggttatacaaaagatacctaattagattagtgttaattgaattacattatttgattgaacacaatattaatttgataaattgttgtaaaaagttatataaaaatattaacatactaaatccatggtaaccatggtattaagattaaatgtaatgtttagagccctgcacatttttgaaaggatttaagattaccccataaaaggttaatcttatttccataataataatattcttatctttaaaatagaaaactctcataccaagcatgagaatgtaaaagattaccattcttattaaaacattaatttataagaatcttttaaaatgaagtaattaaaccttgtaacttttctctcgatttactagagttttcttaaaaaacttagtcgctgccagtcctatttcttcctttggccaggcctgtcaatctctccaagcttgggtgtggctctggtcaagatccttatttggcatgtcagggtaagtggatggttcaccttaatctcatctttcctttgtttcctagtttcaattccgtttatccagtggttgttgtgcgttttttgacctcgtgtgctatggggcaatggtgattaacccagatctggcaaagcatggcgggacaatttggtggttctaggttgggtcaattctcaattctagcacggaaggagattgtgtaatttggcttgtggggtgtgggagaagggagccactggcggagggaatggggggcatgtgaggtcatttacccccctcaactttttgcatataaattttttgtataaaattttaagtatttatattttgaccccataaaataattttttatttatgtccttatatatttttatatttgttcccataaaatttatatttttaattttatccaacatatttttatttgtatccttataaatttatattttttatttttatcctcatttatattttttttattctcgcaaaattcgtatttttctcaataaaattatatttttcattaatgctttaaattttttttttgtccccacctaaattattgggctggctccgccactgaagagagcgaccgggattgggcttaggttcagaccatgggtctctttgtggcttgttcggatttggtgtgtgggggctttggggtgtggagggatccttaggagatttaagatgattggcaaattggtgtcttttttttagttttttaattattaattcttgtttgttttaattttttaataatggtatttttttcactgtcctactagattagtaggaattgttattggcctggtgcaagatgtaaatattgtctcctattggtttatgagtgtctcatcgataattccaagtcgttttggcgatgatatcttggtctccctccttggtcgttagatttgggggatcttcagatttttattaaccctttatcatgtgctctaatcttttatgattaagcattacgacatggttggtcgtgttatttctcttatttatgacttaaataatggaattgttatgtttcagtttttattgaaagatcattgactgatagtctttgataggtggatatgttcatttggtttggaagcctagcatatttcatatttctttgatgcttagctgactcaagcccgtccttgagttgaaatgggctataggcaaaaaaaaaaaaatagttcttactattaagataaatggtatttttaaaaattattaaaaaaatatgtatattttttaaagggtatttttttatttgggctcctaaaataagtgggccctaggcacagcctagcctgcctatgcccagggccggcactaggctgacttattgattccttagttgaggttgttgttagaatttgttattgtaaatggtttggtatgtctaattttcataattttactctttgagttatattttcatgtaatggactttgtcagatttaccaattagtgaatatttctgttttctctaaaaaaaaatattaatttaaaccaaacaactacttattgtaatttataaatggtatgatttgcctattattattattgattatgctctttataagatttcgtaataaactttgtttgatttatatattaaaattttttatttttctaaaaaaaaaaacattcaaacaaccacctttatatttttttttttcaaaaaagccaccttgatagctgttttttacctcacaaaagaaggctatatataccaagtagctaaaatatacgagtcaacagcggtcaaacaaaacatgatttttctttaaaacaaataacaataataaatcatttatatatatattattattatgcaattaatgatgtcatcgctgacgtaaaggtgatgtaggaagatgaaagttcaaattaataagaatagaaaatatggtcagcacaagaattcattaaaaaaaataaaaagggagaaaaaagagagtgaaataattagagtgtaggtccagggttgattatatttgcataaatatttaatatttattgaagaaaacaagcagtagaagttgttaaaggtcggtatctatgtgcagttttttttttttttttttttgctttatgggaaggggagcaaggggctataagtgggccttcaaatgggccccactccactagccggcgaaacagtccaaaaactttaagtccctttcacacagtgaaagcccaaaccaaaggagttttgttcgtataagaactcctacggacgctctgagcagccccgggcccaccaaccgaccctcacccccctgacctttattatccactttttattcccaggattattttataaatatataaaaataacaaaaaattacaaaaatgcacttgtataaaattttaaatatttttagaatttttataattttatttacgaaaaatacggttttttttatgttatattcttgttaatttgttattatttgtatgttattttttgttattgttttgatgttattttatcgttaccttttatgttgttttcttgttgtttttgtattgtttcaatagaaaaaatgtaaaaatgtaaaaaaaattctttaaaatgtaaaatgtaatttttttttttaaagcaaatagtcacttatgtaattatctctttattt

SEQ ID NO: 294724 - DNA, 1667 bp, Cannabis indica
cactagactttattgatcatagcctagtaagtacaaattgggggttgtgtcgtcagactttattgcatgtggcagttccaatacgcttcctcccatgcggcattaaatgcgagatgactgttcagatggaatctgacaccacccggaggtgctttgtggccatcttgctctccgggagcacatgagacttacatgccttctccgggaggcatgtccgagataatcctttgctttcaagaagacttagctgttttatttaactgctaaacccttcccatccacatatcatcatccggttggtccacgtattttgggcaaaatcaagagcaacagaggcgatgtcttagtcttctcctttgttgttatcttgaccttgaatttattatctacaattcacaattcaaaaaataaacaagttattaaaaataaatatgtatacataaaagaaaaaaaataaatatagaatgataaattacacacactatatatatatatccaaaagcgtatgttaaattttaataaatcatcatacattgtcttttataaatccaaaaacgaaatatcaaacttttattaataaaaataacaaaataacctaacagtatactaagtcttagcaatatcccacatatatataacacatataagtgacaaaaaaaaaggatcaaaatacaaaattaacaattaaataatattaattactcaatcatcttattgaattgcaatgttattccaaatgcatatatagtctataatctttaattttaatcgaagggtatatataactctgcatatatttctgtctaaattacttaattctagtaattataaaaaagttgataaaaattaatttatataatcaaaggcacgtatttctcatttaaaagaaaaataacatatacaaataaatacacagcacaatatctattcaatatttattttaaatctgatttcaaatattaatataaatgaaatactacttcaaagaagatgaaaaaagttagaaataaatgaataaaaaaaataattacttacaactaaggtggtgcttcctgtgtcgtggctgcctaaaaaaagaatgatatcaagacaagattacacttcaacaaataaacatgaaaagtgctttgtaagtatttaatatttaccagtaaagaaataagaaataaggccatagaagatgatagaaataattaccagaagagacggagggagcaagccactgatgtcggtgtcgtatttgtgatgttctacaaagaggaagaagatacttatttgattagagagcggatgaggaggaatctaaagagaatcaatctgagacgaaaaaaaaaaaaatagagacgagagagggagggagaagcttacctattccattgtcatcgtcgatctggaatggggatctctaggtatgtgttaggtccttttttggcaatttagttgtcaaaatattttttaattaatgtgcatatttattgaacattcaatttgtttgtttgccaaactctggaccatttttccagggggagttgtggttggttagtacttgtgaacatatcttttacagttagcttgttttggtttctttgtgatattcgattgtgttactcaaggggagtagtttcttttgatcttgctaactttgccttgcaggtactttatgttaa

SEQ ID NO: 294725 - DNA, 2240 bp, Cannabis indica
atattcttttatttttaagtatattctgttaaaccaagaaatgccgttagatagacacttttaatatataaagatattaatgtgtacatttgctaattctttggtactctagtctatggcattgtaacgtaaatcatttttcttaaccaccaaaactgttccaaaataaaagttttgaaagaagaatttgataaattcttgaacatgtcattttttttttcgaaatgttgtcacaattaattgcagagccaagattttacaaacaatatctgagatatatattaataacctctgctgttacttttttaatgttcactcattgatttgtactagtatttaatttagaagaaaataaatgataaagaagaagatgatgtgattaaatggtatttgtgaaattaagacatttaaaattagcccaggccagctttagtttccactctctactaacaactgcgttgtttttcgggccggattgcacacaaggtgatggattggattaggtttgttcagtataccacgaattttgtttgggttcttataccacatacctaaatttttaacatttttttttactagggcagatttttttaaaaaatactgttttttttttaaaaaacactgagtaaattttataacgtgttaagttttcacttgttccatagttgtttttaattattctgttttgttgttttataataattttaagttattttataaaagcattattattgtaaaaattccgtgtggttgtaaaatggtaaattgttactagtacttttataaaaacctttttttttattattattattttcattttgtctaaacaagagatcaaatttttactacgaagttcttatttctgataatgtgtataaatttgaaaatttacaaaaaatgtataactaaacacaattcaattcaatatataaataacatagcctaaagaaacggaattttaacattttatagtattcattatttttaatacaaagtatgatattattcaaaatgtaaagtacaagtagtttattttttgccccctttttttttttgatagaacattacacaattagttgaattgaattggtaattgctgtagtttatgttacatattattccttttctaatttattttgtcacctatttcaatttcttttccaaacattttgctgagtgaacttgatatcatatcaaggattgaaaagattgcattagagtaaatttataacttttttttcttcttatttttacgtttttcttttaatttttttttatactttcatttttttataaaacttattttacataaatataaaaagtaaaataaatacttaagtttaactctgagttacaaataaatacttaaatttaattttgggcggtaataatacttaagttatatttctagaactctgtaagtacctgacagttaaattttaagttattatgcacatgttattttcttattgggatatttaaatttttttttaaaaataaaaatttatgacctcgaccaatcaaaaattgttacgtgacaatttacttaacacttaataatcaggtacctatagagttccagaaatataacttaagtattattgtcgctaaaattaaacttaaatctttatttgcaaccgggagttaaacttaaatatttataccgtaaattactctaaatataaattaataaacttttgatattcatttctacgtttttaaacaaataccaatacccattttttctaggaattattacatagaaaatataaattgatactttatttacaaaaatacctctataaggtatggacaatattcatacgttttatatgattttaattaccaaaacaccacttacactatcacttacacaataagacaatagttacacggtggttgctgtgtggttgcgcggtagttgcatcagacgaaagtttcaataagataatagttacagggtagttggccgaagtttgcatcagacgaaaatttctgggtggttgctggatggttgcatcagacggaggtttcaatcagataaaataactgttagcaaaatatttatgcaactgtaatgcaactgttgtgaaacattaaaaattaaaatagtgtttccatgtacgtaaatgtatctacatgtcttcttatgatttaatatgaacaaatttaccattagaaatttggaaaacaacaaaaatacaccaggataaatattttactatagtattgatgtattt

SEQ ID NO: 294726 - DNA, 4173 bp, Cannabis indica
tttgtattataatatttataaaggattcgaagttaatactaatctctgactcggacctaaatccaaatcttggacatggactcggacgcagacccaagacatgaactccaaaccccagatccggaactcggacccaaactcaaacctcgatctagactcggacccgatcctggacacgagacccggactccgacctgggacccgaacgcgtaggcagtgttgaggtcgaatttattaaaaatataaactttacacaatctattaaatacaagtcaataccaaacataatattgtattaaataatactaataatacaatacaattcaacataatacaatacaatacaccaaaacagctctctctattttaataagtgaccatgcaaaaattatataaatatatatatatatataaattaaaaaatattatacactgaaaggaaaaataaaatcaaatcaaacacaatatatatacagacaagtgacccaatacaaggtccagttttacattggcaagaattgttatagattcgataaagtggagagttttgcattactaacaggcttgaattttagggttaggccaagggaggttgagttatagaatcatgtgactagtgaccagttgattaatgagtatttcattggttaacctaaaatactacttagtcaactaatgaccacttctagcaactgcaccatagcaaaggatgtgtatacttgtgttttttggttgaacgtgttcatatggccagacatgttaaagatggttaaagatactgactttttctttaagcatctacggcgaagttgtctttcaagaattgtcaccaaaaaagagttgtataatgataaatgcaataaaaatgatgaacaagaagaatctatgtacaacttgtatgattatgtatgttcttacactatagtattgggcttatgaggcaatacaagagcttgtgacctaatatgttgtgaattatgggaacaaattccttaagatgctcaagaagattaaggaaaagaaggatgttaccaaagctaatattgcatcattatttgcaatgaaagtagcagaaatttcaaatgcaaatttttgttaattattcattgattaaattttagttagaaaatcaaatgtaaagaactggggatgaaaagcttacgaaaaattacgagttttagctatcaatggagtaaaatattgttgtgttgaatattagagctctcttacaaatagtgatttttcaatctctttacaagtatttaaatgaaacttttatacttgagctccaatggctttaaaatacaaatggtcacaaaagtcagggcacaaagttatgtttgtaccatgaaggtcagcgtgtcaaatggatagtggaggagtgttgataggatgttagcttgtacctagagtgacacaaatggtgtctccactacctatactcatcatacccgttgtacaaccacctcctctcatcaagctttgtcagagacgtgttagctttagcagactcatccacgatcgtacatctctcctcaatagcgcatctctttggtatctttctcatcatagcctatacttataacgatggagcaacatttgaaaatttggttaggtgttgggagagtaagcagcacgtagaaatttggctaattgttgggagagggagaaacacttgaaaatttgactaagtgttaggagggggagcaacgcaaaatttagctagcaacacttgaaaatttagctaagtgttgagagaggtagaaacactaagaaatttggctaagtgttgagagagagcaacacttaaaaatttggttgtgttattgcttccaagtggggaacaagtggtcatagaaggagggtatgaggaagtgatgagagagagagagagagagagagggcgaaggttttctctaagtctttcagagtggtatttgggtatattttaggaagagcttcaatatttatatttagtaaattttgagagtgaacacttaaatttaatgtaaatttgggtgtccatacttgcacctttgggtaaggaaaggctccattggacaaggagagaacccctttgatgaggggaagctcccttgggcaaggagtgacactcctcataagtggggcgaggagctatgtgaagagggaagtggagcgaggagtactacatgctttgttgtattgtgagcctaatttgctcaatattactacgatttggatgattcaagatactttaaaaagctaagaaagagatctacatcatttatgttttgctctaaacccaatcctgactttaaagatgcctaagagcactaacaagtcacgccttataactggagtcatcaatcattttttgtttctaccaataagatacttaaaatgacttaaattgcataattagcctccaaatatcattgtcaagtggtgccttcatgattagagactactttgctcggaataacttcgatatttcaccttatgaaattattatcaatcttgcttgttaaggcctcgtcttgctcattagatgagacacgaatgtgcatttgattttcaagacaacataagtagttgaggctgtaaaagtggctaatattttttgtgatgaggacaatgataatcaatccctataacaaactcaacaccaactccaaagacagacctagctccaatcactattcaagtgatcatctagactataacaggtggtaggttggagagggtggaaggtctacaagcatccgtcctaaagaaccaggtgaagaccctatagaatcaatgtgttatgatgggtcagttgaagcagctagtgtctctggttcaagatcttgattttaagtttacagatgagccttctactcttgatgagaaatagtctcaagccagcctcatgtctggcatctttattgctggccctttagatagtatgtttgactaaccaattagactacttgtgtcatagggaggccttgtaggtcaacatatctggcttgcttataacttataagcatgttactacttccaatatggagtccatttacaaagttggtcttcctagtatatgttccttcaatgttttcgttgtagctctttgctttaggtgatgtcaaccagcaacatgggctataagagaaatcattgtagctctttgctctttcctagtatgtgttccttgttctgacaataagagaaaggcctagagctagcaaccaatttgttagaagggaactcgacgttgttgggcctattccaatcattaggcctatgttcttactgctaaggtctaatcctcaaaaaaatattaatgatctaacttcactttaaaaaggaattcgatatattcgattttgtcagcttgcatatgtcagataagggggaacaagtcttcatccagataatgattttgaagatgaagaatggttggacaaaatgagagtagacaaagtactggaggaacatcagtcccatctttttcaaggcatagtgtctggctaactagtgtcacttgaatgttacgatttattcttactcttttgccttttatgttttgtagtgtttgcaagattcaatttggataaagatgcacggcatgcaagatgcgttgaaaccggggaggggtgactgagattcacttcgttctgatgtcaaacagttgaatgtgtccaatgagcttactagaattgttggtgaattgaaggaacaactagcttcccatgatggtgatgctgaccgattgagagctgctcttgctgaccttgagaaggttcgagctgagatggattccttgagaaccgtttggatgtagcttgtttggagacggaagttcaggttcacaggtagatggctcatggcccttgactatgtgagagagaaggctgactttggacactttggcagcttcccttaatgggttgattacttatgatcctccaaatgacgactaactacttccccttggggcttcagtgtggatcctatatttagtttggtcccaatctaaggatgtgtctccaaaatcattttcaaactgctgaaaacctgatcatcacagcaagacctgaaaggccaatgtttgatgagtgttagatattagatgtatattagctgtaaaaggattagatatttagtagatatttagtctcctaagtttgtatataaatatgtattatt

SEQ ID NO: 294727 - DNA, 3409 bp, Cannabis indica
tacgggaacaaaattccaaggttttagaagacaatagatctttgcttaagaaacttttggaccttaaggaggaaaggacttccttgcagaggaaagcgatgttattcttcacgaagcaatatctctgaacactctctcattggttttggagagctttacagttgagaaagccacagaactaaaagagctttctgagaatttgaactcactctgtaaggtcaacaatgatatcagggaggaaagtagaatgctgaggcagaaattggagaataaagaagcagaaaatgcacatttaagtgagtcggttgaaatgctgggcaaggagttgcatgaaggaagagacttgaatgatcaactaagccttcaacttttgactgaaaaggatttcctagaacagaagacagcagagctctcagaaacagaacagaatctaaaggttactgaggacctgaatgtgaaattatccaagactgttgaggaactgaagatggaatgtgaagagttaaaattcaacagagatattcttgcagaaaagattcttgaagtaactgaagacagttgtaatcagaaaaaggaaatcgagaaccttcgtggagtgaatgaaactttagaagttaagatgggaatgttatgtaaagaaattgaagaatgcaggatcaaagaagaaaatttaacttcagagttgcaagagaaaagcaatgattttgaactttgggaagcagaggctgcatccttttattttgatctccagatttctgctgttcgtgaagttttgcttgaaaataaggtacatgagcttattgaagtttgtgacaatcttgaaattgaaagttctgccaaaagtttggagattgatcaaattaaaaacaaagtaaacttcctggaaagccaagttggatgtctggaggccaagttgactgcatatgttccagccatagcttctttgagggagaatgtaacatctcttgagcacagtgctcagctcaaaacgaagcttctagccgtaggcaatcatgcacaaaaggtaacaatatttcctctcaaaacaatacagaaaaatagaatattctctcatcttgggtttgatctgtttttccttttatgggctttgctaattatgtacatacatagtagtcttccattttgtactgctaagttattgatggtaagcttgttttttatgctgatatttattatgaatgcatctccagggtgtgaaaacaaatcatctttgtgaagagagctgtgaagagatcaaagaagacaaaactgttgagatcccggatgggcttctggatctgcaagaaatgcaggattctattaaagcagttgagagggcaatggtagaagaaatggaaaagctttcagctgaatcaattgaaaaggccatggaagaggaagtggaaagacttgccgtgcaggactccctgaacaaccacatcagggcagcagcggaaagtgaagaaactgaggagctaagattgagtggcgcaacgattaaagaggaagacaatacaaatgaaaagacaacgagaagtaatgtgtcgtttggtaacaatgccaagaaatctaaagccgaaaatgggatattgatgaaagacattcagcttgatcaagtatcagattcttcattgtacggaagaagtaggagaaagaatggtgagactgatgaacagatgcttgaattatgggaaactacagaaaaagactgcagccaggacaaacctattgctctaaaccaggcatctgaaccaagtcagggtttcaccagacgccgttcatatagagagcaaaaattcagaaattctacttccaaggcacaggttgagaaggagcttggcattgacaaaatggagttatcttttgacagattgcaaaaccaagaaaataacaggggaaagatcttggagagacttgtatctgattctcagaagttaacaaatctacaaagaagtgtccaagatttgaaaaagaagatggagataaacaagagaagcaacaaagtcaactatgcagaattcgaaatggtccaaagacagttactggaagttgaggaggctgttgtgcagctaggtgatgtcaatgatcaactgacaagagacgtggaagaagagagtccctcatcttttgatgggaagaattcagtggagtcagaagaggctggacatgtccagcggaagagagtaactgaacaagcacgaaaaggagcagaaaagattggacagctgcagttcgaggtgcaaaacatccagtacattttgctgaaactagaggatgaacacaagaccaaagggaagaccaatagatttgctgaaagtaaaactggggttctcctaagggacttcatttacagtagtaagaaaactcgtcaacggcggaagaagggttgtttttgtggctgctcaagaccttcaactcgcgaagactgaggtgacttgttagaaggaaagcatatttttatatttttacaagttttttttttttttttaatttttttccttccttttgtttagttaatgaagaaaccatatttgtcagcttagattgtatctgtatgaattagtctcctgatctaatcaataagctgctttgtccagaacatgaacactaaaactatcctaataactatgaacatatctatcttaaatgttaaaacaaaattttgttctctttactattttaatggaaactttttatgggatgcacatctttgactgacttatgttatggacgttaccgtttgtatcagaatgaggtttttatgaggtttagtaatactatttaaagtcgttttgagtcctagggtttctctctctgaaggaaatacgttgggtttagtcccttttgagaaagggttcactgctgtgtgggtggttgacaatggaggttacgaagcctgctctggtttaggtgattgggagtgcgatggaggtgtacggaaggccagatactagtggtttgtgcaagtgggagtgcaatttggttttggtaagtggcttggtttttctggtttggttggaatttgaatttctttttggtcatggtttggttggaatttcattacattatggttggattttggtttgtttggcttgcttgtgggtggctttatttgttttggagtgactttgtttgtgttgatttgctattggagtggcgttttgtggttttggttgtttgtgtgggtgagtcttggcttgtttctggtttggttttggtggtagtagtgagttgattctggctgttttggatttggctcgactttggtggtgtttgtcctggtttgattgggaatcgagtggggttgggatgttggggtctggttggtgctggttgtgttggtgtgtcggggtttggtgaattctgggatgtggggtcgtgtgttgattgttttggggtctagtgcact

SEQ ID NO: 294728 - DNA, 2236 bp, Cannabis indica
aaagagttttatttagggcataaaacccaacatttatctcaagtatggattgaaatttatgggtctggggtttaaaaataacgacttcaaattcgagattatcgagttctacatggtccgggtgttcgtaatcttgatcagaatgaggcattgtcttgattgaaagaaaaatatctaaaaattttggaaatacagaacataaaagctcaggacctatgaatcatctaaccctaaaattttagccttaagttgttaaaaaacaaaaccccatttaaagacaataccatacaagaaattgacaataaaaaatatataaatatggaatacaataatgaaagaacaatggtggaaaaatataattactgggcagctgtaaggaagaaaacctcaaagaattcttcattgagaacttctgatgctgagggtctggtttgtagcaatgctgagattcagaagaaaaacttctagaaatttgaaggaagaatatgagagataaagagggcatgtaattttagagagaatacgggttggaatttaaatttctatgaagctttgtaaaatggaaatggctaaatacaaggatgctactgaccataaatccaaataatggtaatcgttgaatcgcaatgatgactgatcgaatggatggaaacttttgaaaaaaaagagtcaggtcaataaatgctgaaatgatatttttctcgaagtactaaactgccaaaatgaagcatgcattttcttttcaaaaggaaaataagattgtaccctctgttaattaagaagtccttttttttaaaagtacgtacttttcaggggacaatagttatactcgtattttgagcaagcaatatggtgatgacacgtagtgaaaggctggaaaataaaccagctcacgttatggagcaataaatgtgtttaaaaacttgcttggaaaaaataattggtacaaatatttgaacttattctttcaaagatagggacgagaagtggataataactacaattttgtgagactggggaaatgaacaatcaatgaattctttaagagcttgctgcttattgacccacaaacttgtgagtatgctgaaagactaaagtaattacttacgatataatttatctcagaattatcgcattatggcagtgcctgcgtttgcttctctcaacattaccgaaggatgcgagaagtactttccatattatacttaggcgcaaaaatgtatctttaaagtaaagcattataagataatcatctatgttgcgaggagaagaagcacaattagcacaattacttatagataaagacaagagcagttatagcggttatctatttttattccatgagatgtaaatatgaaacatgaagattttccacgtttcacaagcaattacaaagataagatctcgagaaaataactgtcaacctaaaaatcttataaacagggaaaaaaaacctagaaaataacggggacgatcaattgaagaaatagagagaattataaaaaaattatcttgtattctataaacattctataaaatctcatcaataagatagactcgtagagtatgaagaattaacttcgaaactacgtaaaaaacttcttgttatttacaaacatttattattaataattattattataaaatttatttattactttaagactcatttattggttaacaaaaatctgcgttaacaataaaatttttaaattttttctaataaaattttatataatttttcattgaatttttgtcataatatttaaaatatattttatttttgtttgatagatatattttttatgaatatgaatttgaagaaaaaaattaaaagaactgctataattaaagatatatattttataaaaataaaaattattaactttggtgaatatttttggtgcaaataaaactctcttatgcataatcgtatttatatctatttctatgttatattaaatgtaaaaaatgttgagtttcttttttgtttttaattaaatcttccattctttttagatattcatatgagttatgaattttagaaatatcttttcgaacccaaaatctttaatcccctaaattttcttggcccgtgagacccaaatttctccataggagacagatttctaaaacatagtaacactattcctctagtttatatcattttattttttatttttgttgtcaaaaattagtatatacatacagtatgtgaatatagatgacactaatc

SEQ ID NO: 294729 - DNA, 11932 bp, Cannabis indica
accaactcaatatgttactaaaagaagtttgtgttttttttttgattaatatatatattatatattataattttttaaaaatatgtataattaaacgcggattggattggatccgttattttttgaggtcaaacaacatccaatccgcacaagtgcagattttggatttttcaatccaatccaatccacacaagtgcggatatccacattttgcggattggattggattggatcgtgcggattggattggatcggatactttgtgaacgcccctactttattataatgtgtaagactttcttgcactatgtttggtagagatgaaggatggagtgttatggaatagagaggataaataacttggtattgagaggagaagggagatgatacgtataaattttaaaaataaaattactatattactaataataaaatatatttttaattatataaattaatttatttattttttttgtaatatcttcaatcatcccacatttggagagattaaaaataaatgatttggagatcaaatatctgtactttccttccaattttctttcatgccaaacaagtgaaattgactctcctttcactcctctccctcctaccatttccatcctgcctaatataatctgttaaatttggttcaacttctagatggcgataaagccgcttaaaaacacaacagtggaaaacaagaactaaaaagtagaaaatctatatacaaaggaaacaaccatttttgtatataaaaacaggacaccaaactgaaagaatttaattacaaaggtgaaattaattagaaagaaaaatcaacaagatttgggacgtgtgtgatgagcaacgaggaaatatgctggagattccttactgcaacatcatcatcatcatcattttcaggggaacgaacacccaacgtagccatctatctgtatacgacactaaatttaccatcaaatgtgcttttacaaattgggaagaacatgaaaaagagaaaaaaaaaataagcacacaccaaaatgcaagagaagaaaaaagaaagatggatggatggaatatttacatacatgtacctatgtgacagatttgattatttccaaagccccctatgaatttttccacaacactttttctcataccagtgaccctctacaccggaggctaatgaatattatatagcatacaactatatttttatatataaatatatttatatgtatatatgtatggcagagaaagaaacctctaccaatatttttttagactcattgacaacggaggtaactcagcagcataatagttttaatcatgacgattcctgcaccgcgtgctgcgttggggcggggatggactccaatgtgagtccaaagtatgtattctgagttacttctccgaagaagaaagccaaatcaaacttgtaatccacaaaacaagatgcagtcattcctcatataatatgagtgacaactcagttgtcaatcggcgtgaatagaaaccaaagcatcaactgcaccggcagcgagtagaacttcgtagggatggaaacttagacaactaacagaaccaatcttctgggccatgatagtagggtagtatcgaatcgtgttgagctgttctccttccagactgaaaactttgatgagttgcttggctgaaccacttgcaattataggggcatgtctatgaatagctaaagctgtaagtgagcccctgtgggcttcgattgtgagataagcctcccttttgcttctgatatcaagaaattgaatgtcaccagcctgagaagcactgacaatctggacacaaaaataatcgaaagcaacccgttactttaaccataagtagtgaacttttggaaatcagaaaactatgatcataatattctcgatttaccttagccggatccagtcctggttgaaatccaatccccacaactctttctaccctctgagtgtgtggccgtactgcgcagaccagcctatgataaatggtagatgagttaaggacaaaagccccttgcagagtcaaaacagtcaattttttttaaaatagaatgccgaagatgaaatcattggtaatgttgcatcaaacacactcgtcaaaatatgcaactagctagagatgcaaaatgaaggattaatgggtgacttacgattcaggagttcgcacatcatacagtcttacagaaccgtcgacaaaaccagcagcaaattgactgccatgaacttgggaagcagactacaaagaaaacacagtaaagaaaaatcaacaagtggaaccattttaagtacacactaacaaaaagtatatatatacaaaatataaaactaatggacccccactttagcaaatacttggcaatcagccaaaagtcacataagcaagttacaaaattaatgtaatcaatatagctgtatacataagcacataacaaaagtattaactgaccaatgctgatatgctgcagtctggtgatgaaagaacagaattaaaaagttgctccttatccagatcccaaatcatgatgcgaggaacctccccagaagcatactaggaacaagacataatataaatttgttaaaacctatcaccaaatataaacattatcattatgtatcaatcccgagattacatttcactaagaagcaattaccagatatccagactgttgttgccaatccacaacagcattcaagcttcgaatgcctggtttataaccctgaattgaagagaaagcagtaacaagtttctgctcatccttcgaagcataatctttccaaatgcgaatatttccatcacctggatcatataagtaaagaaagttaaactccaggcagcacatctgataaaagcccctgatcccaaaaagtatgataaaactaggctgcagtctagtatagtacatgaagcagcaagaagcaagctgtcatctagctcattcacaagtgagagcttagaaattcctttatctggaaaatcatgattatcaaagctgttgagaagtgtagcctcatcatagttccataccctacaaggcaaccagaaaccaaatgtcacttgacgtggatcagattagggtaaaacagagattttcacaaaagagcagtcaagtgcgagggcatgaatcaatagaccacttggtgcaaacattacttagaaacaagattggcagtggggcaaacattataaataaccgctcagtaaccaccacagtacacagcttctataagttacacaaaacatgacagtctttcatcgtacacaatacacattatacatataaaaatgaatttatatctttaaaggcaatagtttgatcttccaatccttatttttgaaatgaaatgctacgcatacccgattcgctcattctcatctgcagcaattacaattggtgagaatggttgcagcaagattgtctttgtaccagtctcaaattttgtatcccaccgagcaatttgagtattaggcttgcttacagctgaccaaaaccatagaaaacaacaaaacaaaaatattagaacctgcagataaaacacaatatttgcaaaagaaaatgattatgcaaaatcaaaaataataatataataacccacaagaatgctggcattttgctatgtgctccagcgcaaacttttctctctcctctcttttagctaatatttcttcactatcatctgccactgtgagaagaggctttgaaaagtgcccacaactccaattatagatagtagattgaggaagaagactacgttcagtagaaccagaagatactcctgaattcagaagcggaccagcaagtccagagtccggtgagctcattaaatgcggccgaaactctaaagagcaaactctccgcatcccagtcaaataactaggccgaggagggctaacaggaggcgttcggaaagttaaggatgtgtggcctgttaataaaagtttattaaataaataattatacaaatactccaacaaattatattgtcctcggcatataattgacagaaaaatacctcctccgttcatatcaagccatgacgatgatcgaaccaatccaaaagcacttgatgccataggatcactaggtcgaacactaccaccagaagtttttagaggttttgctacaacttgttcaatccctataatagccagtaccctgcgaccaagcctggcaatgcgtggagatggatcctttgccaaagcacacattgctgatacacactgtgaatacatcacattgtccaggggttttactgctgagtggttagcaactccattgcttacaccgtcattcaatattccagaatcagaaagttgggatgagtcatcagacaatggagaaccatgcataattcctgaggtagcaagagggctgctggtgcagacccttccatctcgaacaaaaggcgagctgtcagtgccaactcttgatataggacctatctgtgatggaacaacactactaggacttctaatatgagccaaagaaggcagagaactcaaaggggacccagactgatgcttccaatatgctgcagcaattgacttgagatgattgttgtggccaaaggaaaatctccctagagctgccaggatgaaaaagaaacgaaacttaattagctcagatagaaaattaagatactgcccccgaaggagcatgtttgtttgggcaatctcgagtacaaacaagatgccataaatgcctaaacagctggtgcaaacgacttctaagaactacacaaatttaacaaatgaataggcaatttttgacaataaactacataccaacagcaacctctgctctgactaatggacttccatctgaagctacacttaataagcttttaataatactaatttctgctctactcttttcatcattatcacattcttcatctcctccaacaccatctctacagaagttagagcccacatcaagaagggtacccaatgcaaaaacagcagaagccctaacctgaaaataggacaaaagtaccaacatcaatttttattgcagaaatagaaatgcacccatcttatattaaacaaaagtaaagtaattgatatatggaaggtaaacctccggttgaggagcagagagcaaaggagcatatatagctagagcatcttctcctagacccattatttgagcctcaggaaaatcctcccatagctttccgagacagagacaaagccactgaagaaataggggttcagtttgtgcgtcacttggagttgaaacttgaaggtgcctcaagcaaacttggaccaaacctgcttcaatacaggcttcttgaccccgtcggtgaccatccacaattaccgccaaaacaaatgccgccattgcacgctgttctggatatgcttcctggctatcaagaaacctgatgaaatatgtatgtcccccatccttcactagatcaacttgacatgactatcattccacaaacaaaacaatcaatgtcggcataatgttaaaccactaaacaagattacaaagctttttagaccaaggtatagctcaaatcacatgtataccttatcaagagcaagaatctttgtccaaatgaacacaagaatctgccgtagttctggtgttgttgtttgcaatagcttcagaacatatggaaatatccctacagacagggcctgcaaaaacagaagatgatcagaaaataaactacagcattcaaactttactaccaaatgaattccacactacatagaagccaacgaagtaccagatctacagcccagggtcccatgtcaaggaatcttccaagaagaaccaatgctcgaaatcggtggcactggctaagtaaaacctgagagaaaatggcataatcaacaagttagtctacagaaaagtgcaagtaattgtaagcactgtcccccaattaaggaaggggaggggctacagagacggtcccaccaatcaacggaagaatattaacaagaaaaaagcatagagataaaccctaaaccatgctttcagaaaatcagcacattgttttcttcttacagccacagcgactaattaggagaagaagcagaagcagtaaatgttttttttatagacaaagtaataagacaataaattcaagaatatattaataacttgtatataacatcaataataatttgattggccatgcaagaaaacagttctctagcattccatttgatgaagaaaaaactgaagcatttctaaaaaaataacatttcatgctaaagaaaaaaccacttttacctacgatgtaataactaagaagttcatacagatgtaccagattttaagcactaaacccttagattagcaacacaattaattaacagaaaagagctagataaatcaggaatggacattggtggtaacaatattaaaccaaaatatacaacacttgattgtgaatagttattctagtacaaaactacaacctcctggataagtttatcaaacctcaaaaatgattaaaaaaaacagataaatcacctaacctggagaacaataggtaactgttctggaggtttcttgtgttcagacccatggtcaagccaaacctcaaaagctgtcaactgttcagtaaaaaagggacttggctgaacaaaaaaatcaaagtaatgtgagtgagggctaatggggtatcaaggctgcacctgtagaaaacactacattatctaaagacagataagtaaagaaacacaataataaaacacttcagatgcacctggaactctgcagtaggatcctcaaccagcgacggaagctgagaaaggcatatctcagcagccatgtcccatgcatccctgcagtgtgcgatagttacagagtgacattcgaactaataaaacagtacgtattaacttcattagtatctcttgtagtattaccacatgtgatgctgatgggtaggcggcaacaatggatgagagatcggagaacaattggcagaacgcataattcgctcagcaagtaaaaaatttcgaaaaagactggcaactaataaatcttgcctgaacagcctctggaaaagctctgtagcagaatacaaatgtataagaaaatatagcaccaaaaagaatgatacaggaacttcaaattcaaagaaattataacttagagcattaaaccacaggaaagaaaaaattaccatgtggcagaacattccaggcaatggtatcagtcactgcagtgaaaatccaatttagttcccctaaaagtgttttgcggtcattttggcggcccgggattttatcaattagtgactcatcaagagattcgtgtagtaatgaacgtctgcaaaacctgagaagcaggatgcacaatgaaactgctaccatcccatcaatgggaatccaaatatgatttgggtacagaaaggtcaaataacacaagaaaaactgcattgaagatcactcaatagtacgtttacaaatctccgaaggaggaagcaagatcagcaacatcaagagatgaaaggaaaaactggaagtactaccagaactgaaatttcagcctccattaagatcagcagaattacaaaactctttaaaaataaaagcactataatccagttggtcagatcaaatctatcatccatacatataaactagacagaccctgatagctatgggcaagtcctgtatcagaactaaagatagtgttgaatgctaaacattgaaataaacacatcagtaaacatctacactcaaacttacagctcaaatgttcaaatcatccgttaataccaaaccagcaacctctggaaactagggtaatctgtttataggcaccaagaatgtaagcagataattactttactaaaaagatcaggcagtcatatcttcttttttatccaacagacatatctcatagatctgtaatgagtcaaacaacaaggatgctacacccaaaataaaactgggaatgacaaaagcgtgataatgtgttcaaaattagaaagcactcatcatttgaacaaattatggtcaaatggaagagaagaacatacccatcagcaacccacagagtatataagggtgagcattgtcaaaaatctatcaatcaccgtaaattccatacaaaataaaaccaagcaaaatccaatagttacacgatgcatccatcagaaactgatcacaaatttgagagaaataaaaaaaaacacgtatgatgagatgagcacaaatccaaacgtttgaagaaaagcctgattgacatggtcaaaatatggttatttcatgtaaccagattccataaatgacattataatgaatatatgtcttaagcatggaaatatatacatttgaacaagtacataaaatgcattacagtatcatagcatgctaatcatgcacaatacactacagtatatatcactgacatttcaaacctcctacagctctaaacaaaatgatcacagctaaaagactttcagttgacaagctaaagataactaagacgcagccaatatggaataagcatcacaaggcagcaccataaaactgcaggacgttaaataaagatgtatatcctaacagaagaacaaggaaagaagctcaccatctcaaagccatcttaataggtgttgtgagacaagatgtaaacacatcagcaggaaattcagcactttgtggaagagtctcatgtgcttcacaagctccaagcagaatgcaatcccttgtggatccagaggagctagaagcagcccaatcatgaagctgccaaaccatcaaatcaagtcattatacaaaaatatatatatatatctgaattacagaatgaattcatgtaagtaaccttaattatcaatacatacataatacatcaagtcattatatgtttgagttaatgttttacctcaatgaaagcattcacaacattcccagcagcagagcaatcaaaaacatatatggagggtgtcttcaaccaggaatcaaggtcactgattggcaatgggatatactgtgtataactctgcagtacgattcatgagaaaccaaacaacactctagtaattgatcttaaaattaaaccacataaagaacctgagcagaattgtagaccttattgaaaacccaaatttcaccgctagcagtcggcttaggcacaccatggccattgtaatgaaatagaaccctctcagacttggcatatcggcggcatgtattacaaagtttcttcacttcatccacagtaggatcaggctggaccttatatcgtgcctgctcaaagatcttcaaggtaaataaaattaaatctaagacaatattatatgaacactgtacaagccaataatatcctcacccttggttgccacctttcatactgggcactcaagtttttcccaattgtttcaagagctttttgtggtgccattgaaaaaggatctagaagcaaaaaattaaaaaaaactcaatgcactcgtacaaataaaaatcacaaaaaatcaaatatcgatcatcagttaccaaagttaatatcttaaaagagaatttacaattttaacttgtcatcataatagaagcccaacttgtaaatagaagcaagtcactaacattatgttcccagttacccaataaaaaaaataaaaaaaagaatataggaagacacatgtgccaacacatacaaatgcgcactacaatgaatttagctttgtaataaagcacctgtccagcactccattctagcacaaggggatatctttatcacatctggaggatcaacactaatgtttaaacataaaacaagagcaacatatcctgttttcatctgcatcaggaaaagaaacagaagtttaataaagcagtcatccagacaataaatgcagcataacaaagcccaaggaaagagagaataaggcaggcatttaagtgataaattatatggaaattttatattaattgaaacaactttaaaaaatattcattaatcaaactctctttttttaaaataaatccccaagtttaacttgaaagattgaaagataccaaaattctgtcgggcaataaataaaagaagaaataaattgaaatgacactgatatcatacactaaactcactcaattggcagaaaagaaaaatccatttaaaagtaaacgtctccaataaatttggctgtgcctcctgtagataacacttctatcacagattcacagctaacatgcaaacaagcatttcagatggttgcacatttacttgtgtaacaacatcatcctatccaaatccttatcagatccttactatattttatttttttgtaaaacccgaatgtgttgcaagacttgggaagggagcaaaaacagtccagtccaatgaaaactaaattcttatgaccttccatccactaagcttttcaatatgaagatcaccatccacttagctttaaaccgaaaatttcaaccgaatttggtgctttgaggctttgaacctatctttctaattgtcctctatgtcagtggatttatgcagtcaattatctccagcattatgaaatgattttatatccaaatttgggcaattcctaaacatacagtacatgaatccgtatcctttaaaaccagtacagtcatatatcaactgaatttcaaattgatgcaggtacattcacaaaagacccatttcaacaagaaattaagagaaagaaatgaaattaattgaagagataagaatttactcgatctttaggtcgccatttcgagattaaaccagtatctgatggaccagcaggaatacaagcctcgaaagcctcatgacgaaattcacacaagacaactgtttgaggcaaataagccatactcgtcgtggtggcattcgtagcattgccataactactactagcagtctccgaatccaatctctgagaactcaaatcaacaacatcatcatgactcgaaacgtactcttcatccaaatgattcgaaaccaacgccacagaagattgcgaaaacctggaggccatcaaatcccccaatgccattcaaatcaaaaaaaaaacggcctcaataaacagaaacaacagagctcaaaaagagatcaatcaacccttccccaatcgagaaaccataaccgaaaaaaaaaaaatccaattcaaccgatgaacgcctgaagattcaacgaagaaaaaggaaaatggaatactagaaaagagtgtgattccaagaactagtcaacgaagccgctgaaccagcggcgcatagagattcgtctgatgaaagtgagggaatccagctcgagaaaccctagaaagcccagcggacttttttctctgaaaaccctagaaaccctaggtcggtaaagaagaagaagaagaagaaaggctgagtctcataaaaaaaaaataaaaaataaaataaaataataaaaataaaaaataacagtggcggcacaaacaacagaaaaaaaaaaaaaaactgaggagaaaaggattttgtcaaaagaagaggaaaccagaaagagaaagaagagagagaaaaagagagtatatacagagagagagaaagagagaagtgtaatttcacacttttcatatattcacattgtattcttctatatttgcattttcttatcaaataatcttattttttaatcaaacaaatacaacctattgaagaattattttatatactatttttttaatttttttttttcaaatttacagtttgagtttttagagtggtagtggttgcagcgctagtatacaattttttattgcaatttaagttgcagtgctaattgcgggtttctatgtagaatttcgtaaaaatacaaaaaaaaattattttaaagtgtaaaaataaaaaaactccaatattttatgacgtaaatacttaagtttaaatttttttgtagataaatatttaaatttaattttttaaattatattttcgaaactttttgtgacagtcagtagtcccgcgatccgtaagg

SEQ ID NO: 294730 - DNA, 2167 bp, Cannabis indica
actctgttagtatttggtaaaaaaaccaaccctcttttcttgtaaataatcttttgaccaggtcacctttcatacttctgcaaacactccaaaagcacagaagcttcactaatcgaagaagaagaaaatgacatcatttgcatagaaaaggtgagacaaaggcgaagtaccacgagaaatcttaatcccaaagatctctcataactactcagctctcaaaaccagcttagagaggactttgctacaaagaatgaacagaacaggtgaaaggggatccctctgtctaagaccacgattaggattgaagggagccaacagagcaccattgaggaggatcgagaaactaactgaagtcacgcaagccataagaagaagaaaagccttttgattaaaaccatttgcctttaacatacgtcgaaggaaatacaattcaatacggtcattcatatccgttttaaccgccctaagacccttttttgcctttttaccataatgaaacgaagaacttcttatgccataagagagcactcaacaatccatctccaaggaataaaagcaaattgattaggagaaacaagtctatcaatgatttctttgagacgattcatgagaaatgattttgtaaccgaaattacataagcttatcagacggaattaatcaagcccaacaacattctccaccttcgggatcagatagaggaaggtgtgattcatttgtttttgcagcaaactagtcctaaaaatctccttgaccatgcattacacctagccacccacaatatgctaataatttggtaaaaaaataccagagaatccatccaagcttggggccttcaatgggtgcaacttgaacactattttatggatttattcatcgttttcctcctcataaataaaatctaagaataaaatctcgaaatcattgtcaatcactgggtttgatgtatggaaaacctcagcaaaattagctagaaaataatctccaatcattcttcgatctcaaatttagatccaggcaaagattcaatacaacaaattcgattacgccttcttcgaatcaaagttaaatggaaaaacttcgtgttcccatctccatatcgcagccaacattcttgagatttttatttccaaactcgctccattttattctccatatccaaaatatcaagttgtaaagtcacttcttcttccagacttgattgggaaaaagccacactctggcataaagataacttttgtttgagctctctcaattttctatcacaaaacctgaaacttcgttgattccaaatcttaagagccttcttcgtattgctaattttttcgattatgataacactatgattgccttgcactgttgagcaccaagcttctaatatgacctctcaacattgggggctagagatccacactttcatgaacctaagatgaaatttaagcttttccccaacatcccacagtttcacaagtaaaggcgcatgatttgagcttaagatcaaataataaataacttcaacctcaaaaaaaatctaagcaccattgtgtatccgtaactactctatcaaggcgctttcaaaccctttaattggaaattttggaattttgccatgcaaaagaccccttcaaatcccaagtcaacaccttctgtgttaaataagaagtctctaagtaagtccccttctctatagtgaaacttgcactcatcttctttttcagaatcatcaaggatgacgttaagatcttccatcatcatccagtgatcaaagtaatcttggatttttctgtgatcttcaaattgttgtaactggtctcgtacacacaaaagagattccatttagcatacctaagtgcaggggaaactttagctttgaaacctaactcaaaaacttcctccatttccaactataatcctgatctccacgataaataatagcctcccgcagtccccaaagctgaaatacaacaactattgataaagcctagtcgattcagaacttgaactattacctcgacacctaccttagtctccgaaaggaaaagaacgtccacttccgcttcccgaatcaaaccccgaagggttcgttctgccacaggccttcataacccacgatagttccaagataggtacctcattagagaggtgggggcatgcttctagccgcctcct

SEQ ID NO: 294731 - DNA, 1825 bp, Cannabis indica
tggtaaaatattcccaacaccaccttctagtccattcacggagttaatggcaggggacaacctcaaactcccaacgatcttaaggagcaaacaaccttagaattttcggaagcaaaaaccaaggcggcttaggatgaggaacttcttgctgctgcctaggacagtcaccatcctgaacccctcacagaagaagaagagatccaagccaagttcaaggctgcgtacccagaagcaaatacttctagaactaccacttcgagaagtggtaatcatccctttcgtttagttcgtacccgtagcctttctcagatgccactagtagaccaaggggcttttcaccactctttcttaaatttgaaccctcatagatatctaatgatggattacatcgatagggtagaccatctagttaagcactacaacaattaagaactccctccaaacactgttaaagtgggccctttcctcactatgttcttctcgggcttagggaacatgacagcttcatcaacgggaagaagtaaacttgtttgcgagaggggaaccatatagttacacattttatggttacacatcatgatgtctttctgcttttgaaactgtgtgatttaggctaaaattagtttcaacaaaaataaaataaagtaatgagtatatataaaaattaacaaatacgaacatagaataaaacaaattagaattattaaattggcccaaaatgtaaagttgatataatagtgcaaatgagtattattgtaaattgataatgtcaaataaggatttaacgtgtcataatcattttttcaaagtgtttatggtttgattctctaaataattaacatcttcctatgtccaattaattttaggaataccaatttaagtacaattccttcaagtcatacaaggtaaataacatattcctatgctatttacaaaccaaatttttctaaagtgatattcatgcatcattcaagtaattccaataaccttattttttctaaaatttaagttatcttgtaacttactaatggtaatcaaacaaaagtaagtaattactcaagtactcctgaatgaacaaaagcaatttactaaaatataactataaataccaaattacaatttctaccaaattacaatttctagtcaatatataattctagcaaaagagaaatttactcataattgattgtgcacaaattatattgtttaaaagagaaaagagataaaaataaaaaattcatttggaatttgtcacaatacttcaagagtttgtcactcttaatctttgtcaatctaaaaattaaaatgcaaaattaaaaatctaaataatactcaaataaaactcttctgcctgctttgtgttggcgtcccctggagcaccaaaaacccaccacctgctgttcaaggaaaatgaagttgatatatttatataaatatatattcatttagggcttcattatatttgatccacgtgaatgtcaattgatgaagtaaaagccaacatttatttgtcaacccacaccaatcaacttgggctttagtgagcccattgcactttcatttttttccaaaacaaagccctcaaatcatgtcggctgccgattttttcatttttaatctgaaacttcagtctcatataaagaacatacaattttgggcttattgagtccatggccatttatgtgatatttgctccgtattttcactcataccactactttcatacagttatcacatcacaccttaaaattttgcttgtcctcaagccaaaaaaaaaaaaaggccaagatgcaaaatgagcctaaatctaacaattaagttaata

SEQ ID NO: 294732 - DNA, 1764 bp, Cannabis indica
tatagtaaatatattgtaatacatgaaaaataatactcgacacataaatgaggacatcactatgattcatatgtttattatataatgaggaacgttcggtttgaatattttagtctaaatactaaacaagtgggagaatattagaatattttttaattatgaaataaaataaagaattaattttgagataaatgaattttccatattcattgaatttggacaatattaattacgtgatattttatatatggtcagattttaatattcattatctgatttgatttctcaattaattatcaaaatattctaacaattaatgtagctcagatactgatgtagtatctcacttataaatatagggtctcggtccctaagttcttcactcattttgtgtaaatagcaaaattccatttaaagagagttgagagagcgaggaagctcaaattcccatacagaagctatcgcaaagattgaagctcaaacattaatggttgaaagtatttcgatcatttcatcgcatatacatttcgatatgtttatagttattccgcgttatatatcgttcatatatgatttattttttatattatattatagtcgaacattaattaaatgagaccgtggaaaatgatacacagtgaaatgataatgcttttcttaaaaattgagaaatatctctagctaaaaatacatagtcaaccattaacatctcacataatatctttaaacgtttaacaatttgatgaactcttttaaatcaaaacaaaaatatcaccaaggaaacacaattaatgctacacctatatatatataccaccaaaactaaaataatagtaagcacttaaaagcaaaacattattaaggtattatttctccaaatgtgaaagcattacaaatcaattatatattccctaatacgataacaatagtaataacaattatgaacaataaaataagaaaataaagcatgactttgtgttgtggataaatgataatgatgatttaagtgcactatgagcccctccataatgttgtttaaacaccaaaataaataaactaactaataagggtacaccaaatttgctaaaatgggcccacattttgatagtattaatgagtactacttatttttcataatgtttgcttgaccaccaccaccactaataataataccattttagccagtcatagctatagccacctacctctttattctaggttcaaaatgatagataggaatatccctatccatcacccttaaaattgtagaaatcatgtggttattaataccctttttctttcttaaaaagtcacaattaatttatttttattttattttcttttaaaaaaaaactctaagtacttataggtagatattatttttaaggaatcataggtagacattagacaatatggttttttccaccaattagtgagaaaagtttagtttatgataattttatactcaattttgatacatggttggattggatggtagaaattttgatgagatcctaaatcataatgaagtaagaagatgattattgcatcttattttcctatgcaaaggggaaatatattattttaaattattagaaggacattctattgtctgtcactattatttctttctttataaattgaactaaatatttatttaaaaaaaaggctaattaaaaatttttaccctatactttaacaagtaccaaattataccccttgaacttttctgaccgttaaaaattcctcctgaactattgagat

SEQ ID NO: 294733 - DNA, 4734 bp, Cannabis indica
aatcaggtgagcccatatatcacatgcataatcacatcacattatcaatattcaaccaatcagtcttttcattatataacaatattaactatatctcaatattaatcaattcataacaatactaattatattacatacaatgtactatgcagtacaatatacttttcttacctttaatccaggttcatacattttggctaacccaagtggagaactatccccgatgatctcagcccttaagctttccctcttcaaggatttggtatcctgctactaccggagcttagatcgctaaatctggattgaaaatcgaagaaaatggatttagagagagaaggttttgtcaaaggagagagaacgagggttcgtttgttcttttgtttaactgtttctgatatatcttacataatataacttatataatctgaatgtgctaacaaggtaaaaatcactatggatgatattgaggatgaagtattgttttggaaaccgtctatagtttgtttttttttagggtcaaatccacccttacacatcttagaggggtttcctaaaagggtctggaatgataaaattgacagggtgaaggtactgtcgtatgggattttcataatcctgttcaatttgatcaaggacatggatgaagtgttgaatgggggctatattttctttaatcgtagacctgttataatgaaaccctgggatcccaatgttaatttcaagaaagaagatgtgaaatgtgtcccaatttggattcaaattgaagatttagagctgaaatactgggggaaagatcattgttcaagattgtagggcaattaggaaatccagttatggtggattcggtgacaaaggagagggacagattgagttatcctaaggttctaattgaagctaggatggatcaacattttcctggttttattgagtttgagaatgaacatggtttcaatattcaggtgggtattaaatatgagtggaaacctgtgatttgtacgcactgttcggggttaggccacacagtggaagaatgcaggaagaacactaaaggtaaacaagaatggattgtgaaagaggagaagaggctgagtgtgaagaagatagatgaagattgcttcatggaagtgtcaaaagggagtaaagcaacagcaagaaagggtacaacagaagttgtgattgtggaaaactcatttcaggtgttaaatatgcataatgagttgcagaatgatgaggttggagtagtaggggaccaatccgaagagggtaatactagaggggggagaaccctctctctatctaatggataagctattatgttggaatgtccgaggagctaacaatcaacaaaaataggggttaataaagcaatttattaaccttcaaaaagttgatttttttagcctccttgagacaagagtcaaggctcctaaacttgggaacttgtactctaatgtgtttgcgggatggtgtttctcttcaaatattgcttggcatgcgggagggaagattgttatagcatggaatcctttgagattcatagtggatattattacacgcacaagtcagcttatgcatctaaaagtcattaccatggatggaatttttgatagttatttgaaagtgatatatgcatcaaacaacagaaatgagaggagggaactttggaaagatgtaattgagttgaacccaaaggggaggtggtgtatgatgggggatttcaatgagatcctctctaaggaagagagaattgggaatcgagttagaagctctcctgatgaagagtttctaaattgtgtgaatcaatgccaaatggaggatgtgaagtatagtggtaatttttttacatggtcaaacaagcaacatggagaagatagaatttattctaaaattgatataatcctagctaaccaggcttggttgagtttcttatgagaatgctgaggctactttccttaatgaggatttatttgatcattctactgggattctaactttgtatcctcagttgaatggtggaatttaacctttcaagtactttagaatgtggaattctcatcctgagtatgagaggatgttagcagagatatggaagcggcctattggtggttcaaagatgtatcaggtggtcacgagattgaaaatgtttgaaggggtgctcaaggagataaataaggaagggtacatggatttccaggctgctacagctaaggctaaagctaaattggaggacatccagactaaattgcagctaagtcctttgaatgttgatctacatattgaagagaaggatgctagggagagatatacaagggttcagcaggactatgtatcatttctgaaacaataagcaaaaatggcatgggttcatgagggagacaacaacacagctttatttcatgctagtataaagcaaagactgaggcaaaataggatcttctatattgagcagaaaaatggagagagggtcaatgatctagtgatggttcaggaggcttttctggagtactacaagagtctgttgggaactaatatggagaataggaagtcagtggtcaagagtgtcttgaggaggggtcctgtggtatctcaagaacatgcagagctactcatgaggaaaatcactatagaggaagtgaagaaagttgcttttgatatccctggatcaaagtctcctggccctgatggctattccagttactttttccaggataactgggattccattggggactctatattccaagtagtgccatctttccttgagagtagcagaattctcaaggaaatcaattcaacgatgattactttggtgcccaaggtaaaatgtccaaacactgttaaatattttaggcatattgcttgttgtaatgttatctataagattgcaactaagcttttgagttctagaatctaagagatactgccagatttcatttctcactcacaaggaggcttcatcaaaggcagatttatagggcatattataatgatttttctggatttgatcaggcattatgggagaaaagcaaacaagccaggttgtgtgattaaattggatatacaaaaggcttatgatactatggaatggcaattcattgaagagatgctacaagggcttcagttcccatctccctttatcaggttgatcatgcaatgtgtctcaacacctaggttttctcttatgttcaatggaaccctccatggattctttgaatctaagagaggccttagacaaggggatccaatgtctccattactatttgtaataggaatggaatacctatctagactgatggggaaaattggggaaaaggaagactttggttttcatgatagatgttctgagctcaagctaaatcaccttgcttttgcagatgatgtaattttgttcggcaatggggatgagagaagtgtcaagtacttgttgcaagctctgaaactttttccatcacctctggtttgcagcctagccccacaaaaactgcaatttattgcagtaacatggagcattcggttgtagagaggctgttgaccctctcgaggttttcaaggcagaatctaccttttacctacttgggaatacctattaatgctaagaagatctcaggaagtgaatgtgagatactaattgagaaaatgaccactaggatacggagctggagttcaagaaatttatcatttgaagggagagcagtattgatcaattatgtcctattggcaattcaagctcattggagtcaaatcctcatctttccgaagatgattatcaaaggtattgaagcagtgtgcagagcttatctttggaaaggtcaagcaatgtttcaaggaggtggagcaatcaaatgggacatggtttgctctcccaaatcagtatgggggcttaggcattaaaaaagtggaagaatggaacaaagcggctatgtgcaaatatgtttgggcaattgcaaacaacaaagagtccttatggatgagatggattcagagggtatacttgaagaaaggggattggtggagccattctccttccatccatgtaagttggtattggaagaagttggtggctctaaaggatcaagtaaaagggttgactgatataagagaatttactgcacataagttctctatagcagcagggtatagaatgcttgctccttccttgacaaaatcactttggagtaaagaggtatgggctcgtttaaccttacctaaacatagtttcattttatggctagctatgcatgggaggttgaagacaaaggataggttgttcagcatgggaatccagcttggtgaaggctgctgtttgtgcaaggaaggaaaagaaactgcccaacacttgttttttgagtgttcggttgcagagatggtcctcaaaagcattaaaaatggctgggatggaagatgaaaagtggtaatttgcctaacatcataagatggatcggcagggctaaaagaaccagggggcataagcaggtgtttactgctacgactgcctcaatggtttatcatgtatggactgtgagaaatgtagtcatttggaagggagagcaggtggcaattgatcatcttattgcagagataaaagagaaggatggatacaatccttgtaatcggtatattgtgcatcttgaatatactggtatacccgattgtaactagaatttcttgggcctttaatggtgtcattaggatgtacaaatgattggtttatgcaaatacaactcactgatttat

SEQ ID NO: 294734 - DNA, 7201 bp, Cannabis indica
aaaaaaaaaaccaatcctatagcgctagcgcttcgcgttctttctattccatcccatttcatttcgggataggcggctaatactaatctaataagtgaagtagtcgtctgaccaattggctcggacaccagaccgctcgtgcccgcccattctgtctcgccctaaatggaatggctctcttagttacgctgcgccccgacccgagtccccacgtccgctcttctccgcccgcaacccaagaagttggctttgccaacacaacattagggccgtccccttcattctatgctgaccccggcccggggctggctttttgggaagcccgttcccaccgcgctcacggcccggctggcctgccagcggtagtggaaattatcccgttccctggtcaaagacttggttggatgcgggatctactccacgaggagcggtacggacgtagatgatatcatcacgacctctcttttcgtaccgctagggatgcttaacgccacttcgccaactggcgttacctgtgctttcgtgtctctcagcgtggtcagcactgggtgtttccgagcagcgaggcttacacccattcgcattagttcatccaaagttccttacccttatgcacgaattattgaataagccatcttcctatcaaggttaaagagtcaactgagcatctcagcggcgggattgaatacccggatcgaatcagagttcacgccgcccgcccggaacaaataggaggcgtgggccacaggtcgcacataagccgccgggtcgcacgacagaagaacacccaacatacagatgcacactcctccatgtgaaatattcatcttcattggagctttttggtagtagtcgtgaccaacagccatcagctgtcggctcgttggtaaggcgagagcttcaagcccgatttctggtggcacacccctcacacaagcaccacccaacgaaggggggacggggaaagctacaggccaaaaaccttcgacccttctttctaaatgggggtgcccggagcacctcatcttgtcatttcgtcgttgctcattcccgttaggccgaagtgtttggcctttccttctccgcgcccgctcacgcttcgctgacctatcgcgtgctaaagataagagagtacgaaagaatagtaaacggagcacaccgcagaaagattctaaatatgagaagttccccttggatgcgagaagaaggaactgaagaacgagaacgaaacgaaataaagcgtttctagtttcggatgagcttctcccaattatgtctggtaatagaatagggcgacttgctctgaccaagactccactttttgctccgtccatggagcggatgaatttcctggaatgtagacagacaaaaagagggaatgcagggataggaataggaattatagtaccattggaagaaggggcacctgtgggaacatctctactgacgaaccatttcaatagtacgggtgctgccgtgccacaaggcacggccatggaagtaatgaaaaagaaacagttatatagttggaccatctgctctatccgttcgagtttcgcttctctagagaagatgagacgctaaacataaaagtgttcgcaacgcataccaaaagggtaccaatgaagccgaccattaatgactagttcgaacaccaggagcggtcggatcaaataagggatcagaccgctcttagaaagatgaaacaaaagcaaactctcatagttggagctgggctccaactatttcttcgtaagtgaggtacttctttcggtttgaatagggggtagccttgaagtagccgcgactttggtcgtagtcagttcaaacacataaacccagtccacttgcagccatgttgatcaaaatgactaagtttcatgacttgaccagtcactcgccctcgtattagaagatcatctcaccctgtggtcgacattccattccccttagtcgtgggtgctcgttctattttgatttgaatgggccgggtctcccgaggtacatatggccggcccttcgggtgtctcggtgatacaaacaaagaaaagacgaattccaatcacatcccctatcacttaaagccaatccttacaaaaggaggaaatagaatcgaataatctaccttagtttttcctttccgttgatcccccccgacaatcaagctgcactttcttctaacaagtggctgagagtcagcaagcaaccttggcctcttggcaggctcttcaagaccttcctttccggtccggccgcggtacggcacctgaactcgaagctacgatcagatccgattggatctgatccgttcagattccacagatccagccgatttggtctggtcctatccgacccaaccccggaacttagaacggccggcatgttttggacggtagaacggggagagggggagtcgtgcccattctctctccgggcacgagcaggaacataaaaaatgttgaccgaatacatgtacatgacggaacgacatatataaaaatacgtgatctgatttgataggctgcctgcagaaatagtttaccgaccgcaaaacaattcattcttgtgtgtagcgcatggggccatgtctcccgaacgatcatagtacggccgctcatctaatatcaaatcaatcggtagatctcacttcccttcccccataccatagccggaagggatagcgtatctacagaagagagagtacgggcccttacccttaatttagtttagacgcggctcgaatttacgctataggctgtgttaagcatgcttctttgacagaaaacacactctttttccatgacaacaggactggactataaagggcggggcggtaagctctctatcaacaacaggggggctgttctcctttgtcaacgacacaagcaaggagtttactttgtcaacctttggatgtctttggttaggctcggttgactttgtcaacgctactaaggaccggggcgagcggaattcagtagaggctcgaagaggggcttactaagcgaagggccgaaggcggctttgctatccatcctactataccaccgaagggcggcagcaaagctgcaaggaggtagtgcggctttctttgttctcatggcagagtgaggggcgttatccatccgccaatagaaccggcttttagtgaagatccgctcatatgctgcatgaggggcggctttgctcatgagttagcgatcaagcggaaaaggacctgcgggcttcttttctttccggagcggacttgctcgtagctccctattgatataaaaggggatgaagggtgaaagataaaaaaataagaagcaagtcttgagggagtaaagagccaccgttaggtggttctgcgccaagtgcgatcgattgtccttcctttctttatagattgaactaccgtaactccactcaaccaacaaagtgaattccatactcaaagttgagttaccgtaaaataaaatatctatagaaactaagggggaagagtttttactgaagccgaaaggtatcctaaaggaatggtagcaccacaatccacccagacgcggccatcataaatggttcgtgcgacggcggcggaggcaggttcgggataatccattcaatcttcttcttttctttttctctctttttcttaattttcctcttgaaacatttccagaaactcaagttttatttcctcttcttccggcagcatttctcctttgagcggcatttcctcttcttctttcggtggagcttcctctctaggttcttcaaggccctatccccccgcccctttttttgttaattcttcttcccttaggatcgcctttggaaaagccggaacgtaggggtcatgatgatccagtgggagggatcttcctcacaaagccagaaagtattaatagctttaattgtagtgatggtaggggggtgttggaaattggacacttcgaggcaggtatttgacggtatacctataccgacggaacgagggcacgagcccctactaataatcgaaggggatggagaccagagcgtgactagggagcgagttattaaaaactcccattttctcgttggggttcttgggagcttcctgttcatccgccacgttgatttttccttcttctatgaaatcttgttcaaagtctagcttgcatccgtcgcatgacctggtccccccttcattgggacctaacaaaattctgccaattccttcccccccccccagatacatacttccttttctttctcccataaagcctcctttcctgaatcttagtttttctctttcttatttattataactattatcactttctatttaaaaccgggccggctaaaaaaaacattaacgtatcagggtagtacgcctggaacaaaaaggttcgtcgtacaatttcggcgattacaaaaataaaggagtatatccctctcccttagtgtctttccacttccgtcgttcaggaacaaacacttcgcctaattcttttgaatcccggcccgctttttccccactaacccattacgttacgaccactgaacaaacttggttgacaaacatagtttatgcgccgctaatgtagcggcttgtcgagcatttgacaaactcacaccatccatttcaaataggatttgtcccgtagacacacgagcaatccaacccgttggatttccttttcctcttcccattcttacttctgtaggtttcccggtaatagggagatccgcgaaaactcttacccatatcttaccatttcttcggaattgtccgctcatagcacgatggaattgtccgattgtagcccgacgcgctgcttcaatggctcgatatgaaagacgaccagctctacaacttttagtgccatatcttccaaaacccagttgtgtaccatccggtttgcaacccttactacatctgcctttacgatatttactatatttcgtacgtttcggatatagcacgtccctttttttttaactatatgaaatccacactttgacacctaagattccgtaacgagtagatacttccgcagaagcataatcgattttctggttaaatacattacgagatgtttttccatactttccgcattcagttctagctatttctgcgccttctaatcgacctgaacaacatatacggatcccttcaaccccttttttcattactaatggaataccctttactatttgactaaaaatggaacgaaatgatgttttgtttctcagttgaaaagagatgtcttgagcaatcagagaagcactttgataaacagatttgatcttgaccgactcaattaaggtattagtgtttgttctattagacaacaaagatcgcatttttttcacttcgttcaaataagagttgtacccgtacggaattcttctgtttctcagtatgatctctatcatcatctctattccctttatcaattctcctatcccacctaggtctatgaatttctctatcaattccattaccttatccttacccatgagcttccaacattttttccttaattgacctaggagttgttcccgggcatcctcaaaaaaaaggttattatacatcccaaccccatcccttagaaagaaaaaggtagcaccgaagaaaggaaagagcgagatggtggtttttgttgttcccgcgaagcgaagatcattcgccaagcgaatgaagtgggtcaacctctttttggcttcggccaaacactttttctcactggtcaagctttctacaaaaaaagcgatgcgagaacgtattctcttatctaagcttcttccctgtgcattcgctccccccatcgtagatggttcagccacgcccggtgccgcgaaatgattgagaactccgatggggtcgaaattaatttggttctttgtattcaataagtattgcatgaccaaataattcaaggaggggcgcactgcagggagggtccttttaagtagatgactcgtcgggccgtcggagcgggacttctttggcaaaaagcacttgaataacttcgtttttctgaaggagtcgtcattttctatcaggaacgctatgtcatttacaaccccggcgtatttcggatgcttgacggccctgctgacccgaagtgatttagaaagattcttctttatcgatggtgatcggtcatggtatccatagcgttgcttctttttcggccaaatcctaatttcgttttgcttctcccggtcgtcgagcctgatcgactcgactcttttccctgccccccggcctctcacttcgtttcgttcttcttctgtatcgtcgcttgaatgaagacacccgatcggcccgactttcccaaatgtccaccaccggccctctcctttccgggtctggatttttccgtcgtttcagtcgtcgtggtcgacggggaagaaagaaatgaatgaatgttctttttggaaaatgtagaataatacacctaccgagacgaaagccaaaggtgagtctcgtaggtggacgtatcgaaccgaaataagatctcagattgacatcttgatacactaatttaccataataataaatagagtcaatggtgactccgccgtgggaagagccgcttctttcttgcttgatagtgggggcttccattcaccaacgcagactaaaagtgctctccgaaccgtgctggatagtcacccatcacacggctctcaaacccaacctgtggtgaatcccgggggacaaagtcaaagcgcttgatcctttgccccatactttgagatgctcctccccgccgatcaagcagcgacgctgctcgtgataggcttagctttaagccgctatcgttcggttcgaataagtcaagtcccttcggtcggttcgctcaggcggtcttcccttatcttccctaacgttcagagttgttctggtttgagaaaagagcaccggccgagcgccctgaatgaataagaaatggacagcagagggaatcgatgattcttattcaaccgagttgaagctagcaacatgtcgattacacaccggaggttggtaagaactgaggtctgcaagcctaacctaagtgggcctaccggcgaagcaactggtacttgatcgggcggtttggtttcgtgcaacgccctcgcagcaggaaggggctgttgtcatttgaaaggaaacgccccttgtatagggttccaaacctgcgcaccctgattaaaaagctctttctttgtactgctttttttt

SEQ ID NO: 294735 - DNA, 1164 bp, Cannabis indica
aaaatgaacaagactaatttaatgatcaaaaacgtgttattattaattatacaataatacatctgcatacataaaaaagaaaatgtgctataacttccatgttgattctcttctggaggctgaagcttatagtcccctctcgcccgtggaattctgtggttcctcgggatggaatgatgcatggttctactctggctatcaagttttggtgaaggctactggggacagaagttgcccatcctggagactcaagcctcttttctctaagctttttaatctgttttgttgtggttctggggttaatgtgacttgggttcctagaaactgggctgcatcctttgggatttgtcgttctctgtctactgaggagtgttgcccctgttcttgggcgtttgaacgttgtgttgtaggttggttttgtgttttaaataaaggtttccttccttaaaaaaaaaagttatgtgacctacataatcaccactttcatttaaaaaagtattatggtatatttttgttggaagcatatctcttgtagggtataatggtataattttttgtcttttcatttttctttctccttattattaagacattctaaatatttttaccttgtaataccaattaacttttttatatttttcaaaaagattatgttgtctacaatataatccatgtgggaatgaaagtataaaaaataaagaaaaagaaaaattattaaactataataaaaagtgagaaaaatgatataaagcatctattgcatgccgtggaagcattctattattttatagatatatatcttcatttccaattttgtgatgagagtactttaaatcgttattgggtaatttaatatcaattttcacgtaaaaattaagttttcatatttaaaagtgttagtgttctagatcaaacaaagatgtttaaatacttttttgaaaattatgtggaaaaaaaaataattataaaaataaatccaaaatttgtacgctaatccttccatatataaaaaatttaagtaagaaaatagtgttataaatattaataattacgtggatgtccaaatcttttatttattaccatgaattgtaatcaacattcctcttttctttagtttccatttttcttagtttcttactatctcactcttgtatttgtataaat

SEQ ID NO: 294736 - DNA, 8079 bp, Cannabis indica
gacgacactataatcatgaacaaatacataagttcttgacttaatagaatttatacattaaacataatcatgaaataaatcatgtgaaccatgcaacataaaagcaatttctgatctttattaattagtaaatctgattatattgaaatgggttttatttagggcacaaaagccaacacaggtaagttcctgttgtatttttcccttgatttcctaattgttttgagttagttttggttagggttctaaatatttcaggggctgtgaaatctattgatattagtgtataattttaggtcagtttatgaggttgtttaagcttgtaatagttatatgtaggtgttggttgggttgaatgagttagatttggtgaagtgagtttaattttcatttgagaatgtaattttgagcatattgatgagttgtggtgaattgctgattttgatatattatatttgttacaatatgcttttatgggaagtttgattaggtttggaggaggtttgggttgaaattgaagaagagaaccctttaattcctagtgtgccaaaactgatcgaccggttggttctggtgcacctgaactggtcgaccggttggttctggtgcaccagaactggtcaaccggtttccctgcagagggaattcccgagttttcttctggttctgttttggctcggggtattgcgtagtatctgttttaggttgcttatgagttgtttgacctattttagagttgttggaagtttatgtttggttttggactaaggttttatttcaaaattttagtttaaggtatttattgagttttgattattatgacataggactgggatcgcccagcttgttttccactcaggtcggcccgcacgcttgagttatgaactgaggtaagaaaagtgttatgcatcacttagggttaagtgattagcaatggtattgtatagtctcgattatgatcgagatctagattatttatttgctaagcctcggttatgactgagggttggaaatggtcattaccatcacaagtaattacttctgaaaccacggatagatttcttacttatcgtttgctttactggacaatgatagtgacatattcagctcgtggttaacgagtggtaagggtactttatgaagtactaggattgtgtgagtatgatattatgtaaatgtttaagcttgttaatgtgagattgaatagataattattatattaattattgtttcattcacttttcttgctgagtctgtgtgactcacaggtgctatatgatgcaggaaaggaaaggcaataattaagtagccatgagtttgaaggtcgtagtagtaatgtacatatcagtcgcggtgttacgacctaatggacagggtgttccattttgattgtattttggaatataaagtttatgttgtaaaagcacttttaaaccaaaatgtaaatattttgaaaacatggggaccccgtaataattatacttatctttttggaaaagtagttttatatatttgttttaattagtaaacttttaatcaaccacacttttggtataattatataaattagtaaaaggaaactttgtaaacacacacacacacacacgtggcatccctattggacagggcgttacatcagtattgatttggatttcatcttataagtaatgtgtgattgtgattgtttgagtataaatgttaatattttaataatggattatatatttgttattattacttttcttactgagtccttgtgactcacatgtgctatgtggtgcacgtaataggtaaagacgttttgacaattatgagtgagaaatcttctccagtaaatgtacatatcagcttatccagcaagtggtgctgagttgtcaggaactacatttttaatgttctaaacttttaaatatattttataataatattgtaatggtatgtcttgaaatattttaaataggggatcctcaatcgtaaaaagggactatgccatgattttataatttaaatcagttggtaaaatttttattaatcacagtttatctaaactgccagcttattattgtaagctactttataaatgcacacacgtggtgtccctaaggattagggcattacaacatagtatcagagcaaccacagttttaaaggtcctgaagactagctggatatgtacatttatagtgaagaaaagctcgactcatgggtagtaagtattatttacatgttatatgattaattgttattcgatatcgttagcagtatatacgaagtaagcctgagttaggttaatagttgtatgttttaattgagatagtttagtagagctatatgattgattaatacgtaaaggaattcttattagtattgttcttatttaagaaatatgagtattgtgaaacaacaattattaaagtattaagtatgaaactcaataagaaaatttgtacagttcaatgggaaatttattgctactatgatcacgaagtgatgtgtgttcttttgcagtaaactagttgatgaaacaaacaacttaaagaatttataaactagtaagcttgtttgaaagtaagatgagtatttaaaatgtcatgtgggtcgtagaatatgagaaactattaaaggaagttgtttaagttgtttggaggatggaatcttcttgccttggaggtggttaagaacccctaaaggtggaacaatagataagtataattgtgtccatccaagatctaaggtggaatggagattatgattaagtgagttgtgttatttcgtgctacagaagggatgtttagatagaaatggatagatcccaagaaacgtgagttgaaccatgttaactaaggaataactcagttaatgatctataaggagataatggcgagaatattgatattactaagataaaggagactatctagattgctagtaatgttatgatgattatgataacaatggaaatacttttaaagtttgattagatggtaaatcttgtatatggaatgaccatggatgtcctaggaaaggtaaggtttactcagaaagtggaggagaacataacttgtgaacgaaggagatacactcaagttattgagatgtatattaataagattgacaaagtattagttattaataataatagcacttggggagatttttgaaagtctctattctatatcgagtaaggtagaggttataaccccattgattgaaaggatgaatttagatgaccttctagatgtgggtctcagttagaagtattaaagtattaaagtttctattagaatggaaataaaattgataagcttaccgaaatgcttgatggtaaaagatgttattcctaaagagaaaggctgtgtttaaagtcatttcatggtagggtgttagaccatgttatatattgttaagagaatgaggtacattgttacttgttaagaattctttatctcctgtaaataaggttaaattctctagtgaatgtagagaataaaatgtatatatatgggttgttttattggacgaccagaagtgttagattactttgttaagtaacagtgagagtgatagagttatgtctctataaacccattgtagagttaatatgattgtcttatttgggcaatagaagaaattggttactttatgaagtaacattgatcattggttatcttatttgataacaaagtaggttgttttattaaacaacgacccctataattaattgtaatatgagatttagaacaattcacaaagtatgaagattacattgattataaagaaaaaatggtaatgtatgaatcgaggagtgaaaccttggtggtaatgatgggaaaagaatacaagagtcttagattctgatgaatcagcattgtcaatgggagactcactataagttagtatggtaagtcataccaaagaattgttagtaaaattgagaatattcttaaggtgtgtatatttatggatatgtttggaaagattattatgatccctactaaaaaaagaatgggatgtcaagatcaaggtatgatctttgactaattattcttagttgaggaattgggaaaggaatacttccagtttagctataggtactcgatatgagtagtattgcttttatcatatgcgttgaatcagttaactttataaaattggttatgtgtaagtgattgagaaagtaacagttatgttagcttaaaaggaattgatataggatgaaataagttgagatgaacaagattcaagttgacattaagataggaactcctcaaggttaagtgaacaatactgataaggaattgtaagaggtctataaaagaataatggaaattagatttaattaacaaagagatgaaagtaggaaatacaattaggaacaacaatgacacatctaccttccgataacccacgataacttaccttggagttaagcatactcggagtaatctcaagatgggaaatgttttgggaagttatctcagaaagcgtacgagtgaggacaaagtacgctagaaagattcgtattaggatatagaagcagcagtcgttctagaaatcttcaagaggaagggatgtcctaataagtacagatttacaaggcatcaagatgaatatatgttagtagatggaagtaaggaaagctataattggatatctattagaaacaaacataaggcttgtcaataagttaaattagtacgtcaccaactattaagattatatcagattagaagattctataggaagaataaaaagacataattattgattatgtactgtgggatcttatgattttggccgagtagtagcggttggatataccgagttaatatgttgtctataagtgcagattatttatatagtaaatgaggatatggagttcaaatgaaggaatagtttaatcttgtgaaatcccaaagtttatatctttggttatgatattaagagttaaagaagattattgagaaccatgaggattaaagtaaaaatagtacaatgtttcattcttgatggatgggtaatcagagaggactaatagaatattagaaaacatgatgtgggcattgttgacagtgagaactcgtcaacaaagttagtggtcgaaaaaatgcaaagttatccaaaaatgtgataaagatcaagacaaagatgaaggtgaaaagatgtctaaatattcctctctctattcaatatttgagtttacacaaaataattttacaaccccttctcacatttgagatgggggtatttatagggtctaatggccaaaagcacaaagtgctcccaaggggacaacgcatcgctttcaagttgtaggctgcaggtgctagagtttgccttgcaactcgtacttttgtcaggtcgcaagcctgtggtccctagctgtaggagggtgatcccgagttgaaagtgtgtggtccccaattacagcagggtgatcccaagctgcaggtgtgtggtccccaactataggtttgaggtccccacatgctagtcctaggtaagtgtccacagtgtacctttggttgggcctttagaccttccaggtctgttgtcgccgctactcatactcccttgcattcagatgcctcagaaggcatggtaatatgctttcccttgcatgccttgtccactgagttctcatccaacatcattcttgcctatatgccttcacatcatagcttatactcatatcccttcgagacacattaattcaatctcacacttggcacccttttcccacacacacataacttccccctctcgcacacacagcttgcatgggagcccccaatgggctcgcatgcaagcccccacgctcacagaccatgcaaacccctaccttgcacacattgctcgcatgcgagccccccatgggctcacatgttagcccccacgctcactcaccacgcgaccacccaccttgcacaaacggatcgcatgtgcctccacatttccattctacctttgcccgcttcaggctcagtttgccctgaagccctcacgggagctcgctcgcgggtcttccatgtacgcacacatgcatcttcacaggattcacggggtaactgttgtggtagtgcagacgtatcttgacattcagaatactgacttttagaaatatgccttgggaaagtatgctaacttggcacagttttgtgagtcttttttcccttaggtgaaaaatctcgaaaattaagaatcctaatttttggggttaacacttgccccagtctgctagaattcttttaagtgttctggtagactataggagtgggagagtttgtgttgctgtaaagtaattattgtccccttcacgcttatcgaggatttgtctactatatatagagggcttcctttgattgagttctcacttcaaatcactcccttggcatagtggcaatcctccttcctcttatctaggagttcctgagttcgatccttcctcaagtcatttctaatgctttttatttctattctttttgcatggatactttctttcctaaagttatactatgttggatgtcctttgcttttgctattagggtgaggctcaaattatctttactttgaccctggcaatagacgtcttcccactttgaggcaacctatccgttctctgcaacttcttttgcttcaagaggtatgttgcctccccttgttccttgtacttgtgttaactttactctatgggctcaggattctagcagtcatgacgtgcatgctaatcttacagtactagttgcattgtctgcatccctatcggggcgcatgtcctagtaaactcaacaccttaattttacctcatagatggagctatcaaggaaacacatcctctttgattcattttgtcctaagtcacgtccagtgttagctacttaaagcaatgtctccttctgccgaaatcattgacattttgtcctctaattcggaagatacttcacataatccattcacttgatatgctagactaatgtgtgagagggataacaactttgagcacatcatcgcctgtcaagagcgtgtcgagaggattcgagctaaaattctctcagtcttgaacgcagagcagcatgaactggttgccaatccttgtgtgtacctttctatacatagagcttctcttgtggaatcccaactccacttggattcccttgagggctctcttcctcccattcttgacattccttcatgctctatggctgctgaccctcctatgtgtaaggaatagtcagtttctttcgtcatcccccacttctgggggtgcctaggatcaagacacgagcttacaagaggtttgtagggaatagaaagcaagtgctgtgtgcttatcattgtttatatatgtctgcaggtatgtctcatctcaagtactcagcgacttccactgtgccccacaagtgtgcatcatcatacctatccaagcgacacatccctccgttacccccacagaagtagatttcgtgtatttagatatccgaagtactttacccgcagatggcatctgtaagataatggataccttcagggtgcgtgccacaaatgatctcattcttcgtagcgctgggtaggatgagtttgcttttgcccccatggagggggactcgcctttagtgggcacatcatggcggctggcaccactttgcccctccacccactttttatcgatgtcttggcatattttggtgtgaagctctccaactttcccccatggcttatgcgatcctatcgtgttttgttgttgccttcaaaggggtgaacggttgcttccccactgctgttgggatccactctatcttcaaaatccaccagacacataaatctccttgcacctatcacttctcaaagatcccctgcccaaaggtacatgtggtggccaggatgtcttcaaagatcttatttaagccttcgagctttttattatcgacgggaggcctactagtgtatccttcaggttcaaggttctgttggaaattatttatcacttgctgtgtgcgggcactactctaatcactaagtggttcgaaaattcaaggaagaagaaagagagagaagtggcggctaggtatatagagagaa

SEQ ID NO: 294737 - DNA, 1631 bp, Cannabis indica
taaaaacgttaattgataagacgaaattagacgtgacggttattatattcactataccaattctcttgtgcgtctattttgtcacagggtcaaaaaattacaagtttttataatctaaagaaaaatacaaccaacaacgaaaaaaaagttagctagcatagttatcaatctcccatttagcacaaacactattaagattgttgataaccatgctatttgccttttaattgtaagctctatcaagttttcctccacagtagcatagcatgttcaataaataattaccccaaaatatggtcatctaaatttagatttaataaatcaccaaacttcagtactagtgtacgttaactttggatgccactcaaaggcaagtttgaatgttctgtatagatttcataccttttaagataaaaaaactatgctcaattgagattggaggtctcaaatatggctttatggtgatcataaagactacaaaagaaactgattagtggccactaatagccgtatgacataaattggccagcaacctaaagaaatggccacacacaacgaaaagaaacaaacaaaaaaaaaaacacagaaaaccaagaagaaaaaaaatcaacaaacacatgagccgattgctgatacattcatttctgttttttacggcattagattggtcacctcacaagagttccatctgtcttggtcaatacgagtatatgacttatatttgattggcagtctggtaggtccatttttctagcttggtatatttttttataggaaaaactccacgtcatcttttacgtcacctatttcgaaaagacatgtggatgattacctgaagaaaatttctaaagggtaataatggtgttaaaatttaagaaaataatttttatataatggtgtaataattgtaatattttatataatttttatataaaatttaagaaaataatttctaaacggtaataatggtgtaattaaatattaatttttatataattcaagaaaataatttttaaaaaatattacaattgtaaagtactacttacaaagatacttaatatcactagtgtctaataatgcacatcatcacagaattcatttgcattctcacatcacaatttgggaacagggtcgtttcagtagcactaggtctagcagcatatatataaacgccttaaaatatgatcttagtcgtcgttgagcgttgaccatcacatccaaaaagtccaacttaaggaaaaaaaaaaaccactacatggccccatgtattggttggtacttggtaattggtaaagtgggaatttaccatccaaactttcctagaaagtcaaaacatgttttttaatatgctacaagtatttcatgcaactccttaaggagtatcgaaagaccaaatctatttctcaagctctcagtctcttccaaatgacttgcataagaaacaaatctctcccaatccaatttggcgttgttttcttatgcttcttccacttcagtcctggagtttctctaacactacaagagcaagaacaatcagttctcctgaagttaaagcagcagtggggaaaccttccttatatgagtcaatggatcccatcaaaaaactcctcttcccactgttcttggcctgg

SEQ ID NO: 294738 - DNA, 3837 bp, Cannabis indica
gaacaaaccgcacttgtacatgttttgttatattttagaacattttgaaaaatgaagcttcaattgtagtgtaaaaggtgtgtcaaatttagcacatgttaaaagtttagttaaatttaatacaaaataatatagtctgaactaaatttaataaatgtcaacttttttatttatccatttaccactaattaatgacttttttttattaaaattttatttacatttaaataacttttttcatatagtttcaataaaaatttaataattatgttctttaaagattaatttgcatcttttgcaggagcacaattgtattatctatttttaaaaattgaaaacagatttttttttaagaaaaaaataagtttcattaaaaaggcaaagagtcaaagagatcaaacgatcaacaagtatgataaactaaagtaaattaggcaggagacccgactaccaaacttgagaatcctctattgagagagccaattcagctaaagaatgtgttagagcattattaactcgtttataatgagaaataaaaatactagataaggacttccaaacatgaaaaatgtcattaagtacaataacatactcattaaaaacttgcaccttactaaaaactaaatttaccaaacgcaaatagtcagtaaacacgctaatgcaagaataatctaaacatcccctaaatttttatagtcagaaaatttaaaagaaaaagtaaaaattaaagaccaagaggtccaaaccatcgaaaccaaaacttcagggaatcagaagtaaattaactttgtaaaaatttctattctaaacttgatgatggataaaatgtgtgcacatctaagtctgagggctcgggccattggaatcggagcctcggggagttcgcaagtaaataatttaacaaaaatcttagaaaaggaactatgtataagattgaaatagaaacatgaaatcatatctaagaaatgaaaagtggtatatatatggtcctcaggaacccaccaaaagatagtcaatattataatattttaaaagcctccttgggctaaatcattgtctttgtaaacccaaaaggggaacctaggtccccaaaaataaagaaaaataggaaataaagctaagggctaagcatcaagatcgacttgggcattgatgtcagcattagggtccagaagggcttgtgcagctacaacagcagcttcagcttcacatttggctcaggcagcttcctccgcaagttccttttattctcgcttcccgaacttgtctctcatatattctgcctctttaccatatatcccaaggatcgtgttcttttctgcttgccaaaaaagaaagaaaaaagtttcaaaggctaattctaaccccagctctgtgtctcctaatttgtccatggcttgatgtgcttcatccttggcatccttgagatctactttaagttgcttgttttaagtaaggagcacttgctcagtcgaataagctctatccctttcgttaatagcagcttggacatcttcctctaagactttatttggttggtcttaaatttgatatcttactgcctcttgcttaaatctgtgtctgcctagcaaagggctccctaaagggcaagcacttggccattcatctttgcatgcttaatcttcaagtcattgatctgttgcttctggttggtattctccatcttcatgatcttagtacgagaagccagagacttttctagctcaacattaaggtcattttggttgtgtcttgctcctctttaatagaattgcacttcgcaaggactgcttccctttgactaatagttgcattatcctccatctggatagtctcaaattcaagggtcatcctagcaacagcgtctgtggctctgtgagctaataggacatcctatttcaacaaataattaaagtcaaaaaaatgaatgaaaaattataacatacctcattaaaagagaagtttagtacttaccgctaatatttggtggcaaagagatcatgtgaggaaaactagatcctcactgaaagaagttgcatatctcttgggttgtacctctgctaaggtgcttctgaattggtacagaagatctgcggcaaaggcgcccatggcactccctagagttggagtgagttttgtagtagcagcaggaacatcaataatctgtttcggatgctttagaagtagtgataggttttgagctctttgttcctagctttggcaagatggcaagacaatagatcgcgagcattacgaccttcgtcctagatttgggccactaactttgttttctgatctactacaacttcacctccttctttgatcaatttagctttggtgggaagtcgaagaatcacgccactatctttaaaaacttcaccaaagaatctgcctgggttactagcggaagactcagctggctttctccttttgttccttttgttctttcctcctcttgaccgccaaagcagcaaattttgccttcatgttcgctttctcgagtgcatcaaactttctcttccagatgaaagactccttaatggttcaatcttcatcctcctcttcgcaaagagttatgacctcttctgcagcaactgtaggagtaacctgacgctcccctgatggagcaacttgttaaatcaaaatagttgaaaccacagcgcttggcttcgaaagcttctcggtaattttggaagatctagcacctccagactctctccactctttagggttgggatctaaaagccttgccttttggctcccttagttgcagggcctttttctccttcaaagtgttaatctaggcggcaataggtacacaaaggtaaggacctccttcattattgtattcgtcactacaaaagaggaagagttagaccaacatgataataattataaagtaaagacaaatagaaagcaagatctgggatcaagcctcaaaattggaaccggagtagtccaagttttctaaggcaaagttagttatatctttgcgccctaaaaagttatcatattggaagaacctcagataatggatgtgtaaatcggtctaccctaattttctgggaaggagtgatgaaacgtgtgcggatttctagaatttcatccacccaaagcaagtgtctctggataggataatgtgaaggactgaaacttacaaaatatgggccaaacccatcttgttttatatacaaaaaatcctccaaaaactgaatgtttattacatagaagggatttttaccttctcttgaagttctggctcccagagttccaccatgaggaaacatcactcaaaaatggatatcgatccccacgtcctctccaaggatctctcgatcctcctcatcttttacatacgaagcttgtccttctccacttcctccataaattcctgggcaataatctcgatgatcccctagaaaatctcctctatttctgtaactatgccatagaactttggaattttgatggactagtgatttgcaatcataccaacttccttagcttggccattgtgactagacaagcaacctccaaatcgtccatggtgtagctgacatataactctgcacataatctaatcttatgggactccattatttgttcgcacggacctaacattggatcattgcaagagttaggaaggatgcactaaattaaagacaaaagaaaaacaaaaatggcaaacaaaacttaccaactctcaggaatttcacggccagagttgggtgccttttgcagtggaaagacgaaggtaaggaaccaatattccctcatgtccggagggtggttctaggtactatgaggacattgtaccttttgttgggttttatgccc

SEQ ID NO: 294739 - DNA, 3207 bp, Cannabis indica
tttccatttttgtttatttccttttttggggtcataaatgtaaatttcatctatttttagtctatattagaaaaaatctctttatataatccactaaaattgaggaccgccatgcttggaggtagtacatatgcttaaacttagagctgctaattctatagtaaccaccacacaccgacataaaactaaaaacgacaataactttttttgaaggaaaaaacgacaataacttactaaaataagcatcgaaaaacgacacgacgactgagccaaaaacgacgttgaccaaacccaatcattttattctctagatcctcttcgtcacttggatttagccaaaacaaaagtgtaataataaggttttttaatattgaagaaagaaaattgtgaatagccagatctaaccacgtcattcattgactccggaaaacgtgggacccttctcgagcgcccacgtggctaccatgatccagtgttgaccttttgagagacatactcctcagttgaatgagtcgactccttctttggcgtgccatttttgctccttccttacttccttttcttcttcttcgtcttcgtcttcgtcttagtcttattcttctttttctttgtcgtttttgccaatccggatcatcgaattcggttccactttctcgggttcgggtctggatccgtttcccaaaaaaacacaagacgtgattgtgtgattgctcccgctttcgcatttcgattaggggtttttctctgtgttttcagaagagttaaaatgccgcatgaatcgtcatcagagcaagacccggacgattctgacgccgagttcgttgaggttgatcccacgggtcggtacggtcgggtcagtatttaacttcacctactttctctatataaatatatcccattgattttgtttttattcgtttcatccaaaattttaaaattgatttaataaattctgtattgtagtagatgcttctgtctttatgttaaactacttattttcattgtagtggaatttgaattaattgattgcttagttgcttctgtctttatgttaaattacttattttaatgggggtgctcttaatttggttattttgcagtataaagagattttaggaagaggggctttcaagaaagtgtatccttattatgctctttttttattaatatatagtttatataatgaatcttatgctgaatttagtccttttttggactcttttgatttgttcttgggaagatatgttaagtttccttaatgggaatgtgggaactaagatatcgagcatttgatgaattggaaggcattgaagtagcatggaatcaggtcaaggtggtagatctattacgccactctgaagatttagaaagactttattctgaagttcatttacttaagactttgaaacacaagaacatcataaagttttacttttcttgggttgataccaagaatgagcatatcaactttattactgagattttcacttcaggaacactacggcagtgagtcttactttaattgtttcccttttaacttgttttttattaagagtttgtgagtttttgttattgcccatcttgaaagaattggttgttttacttcagataccggaagaaacataagaatgtcgatttgagggcgttgaagaaatggtccaggcagattttagagggcctcttatatcttcatagtcacgacccacctgttattcatagagatctcaagtgtgacaacatctttgttaatggaaaccaaggtgaggtaaagataggtgacttaggactggctgccattcttcgccaggctcgctctgctcacagtgttattggtaagatttcttttgttactctagctattactttatggttacttgaatcattgtttttatatttggacataagaccttgctgttgatggcatggttcttgctgtgatctaggaactccggagtttatggcaccagagctttatgaagaggaatacaatgaacttgtagacatatatgcttttggcatgtgcctgctagagttggtcacgtttgagtatccatatgttgaatgcgctaatgccgctcaaattttcaagaaagtgacatcagtaagggatttattttctgctcttgctcatttattttaccattgcaattttcattattcgttaatcaagagtgttatatgcaatttgcatgcttataaccagagtgttgcatggttttagaaagtagttagttactggagaaatcatatatggcgttctttagtattgttttgtttaattttctactaaattgatgattattgaagctgtatcattttctctatcagtaaaaacaaatatttctatctaaattccagagacagtattaaaactatttgatttataaatttgaaaaaataaataaaagaaagggctaaatttttcccacactgtcatttattggccttcattttgcatattcatcattattcctatcaagtaccaattaccagagtcatctgttaattactgttttttctttcttttttatctatagggaataaagccagcatcattggcaaaagtgaaagatcctggagttaaattatttatagaaaagtgtattgcagaagcctctgatcgattgactgccaaggaacttttgttggatccatttctccaaccagatgaagatgaaagtgtttcacgttctcgtaggcatagaagtcatcagtcagattattctgacatatcaaatgcagaaagcagtcatcatcgggctgattttgagacgcacaaggttcctcctgagacaagtatagacttcacagtggaaggtcaccggaaagatgtaaacacaatattcctgaaacttagaatagcagactcttcaggttaatagcttttctcaagttcatttcgtttcagccaacatatatgtagttatgtgcgagtgctttaatagtatttcttcttatccaggtcatgttcgaaatattcactttccatttgatacagaagctgatactccaatttcagttgctagtgaaatggttgaggagttggacctgacggatcaggatgtttcaggaattgctgacatgattgagtctgaaattcgaaataattttccagattggacacctgaggatcttttctgtagattattctgatgaagaatgtcctacttcggatgtgtgcccctgaaactaggatgatgttccccc

SEQ ID NO: 294740 - DNA, 1058 bp, Cannabis indica
ataaattcacttattgatgacttgaagaaaaacgttctacattttaattttaattatgaatttaaaaaaaatattttaaaaatatttatcacttaaatttataatatagtttgaccttctaaaacttttttcgcgctcttagtcatgccactctcattttagttttgtctatataatgatacttgtcctattatatttaacaagatttttttttctttccgcttttattcctttattttacagtgttaaacaaaatttaattttttgtataaataattatttttttatatgtagattataaataattagattaattatttatatttgaaattaaaaagcttaattctgaatttaaaagaaaaaaatctgaaaagttaaaacctataatcacaagtcactacaaataaaaaagcctttacttaaaataaaataaaataaaaaagcctttacttaagtatcatatttgaattactatgaagaataaagacaaaaggatatgtggcctactaaattaatattgaccataaaatataacacgccattcacgcttacaactcaattattcataaagttggtgaatgccaatgctgattatgacgatgacattcaatgtctttttctttgctttttttatattgaaaaagaataataaatatataaaaaggttttcttaccaaaaaaaaataaataaaaaacaagaatgggttccattcagctaatttaattaattataccaatgacaatcaaaaaaaggtacaacataagaagttgaacatctgatcagttttactttgattataatcaagctagctttattaaatgagctaagagctcagctgcctatggtaaaaaaaaataacctaagttactatagcaaaatgttcatattatagttttacaatttctgtagaccataccaaatatggtatatatgtatatataaaatatatacgaataatcacataataaatacataataataatatgcacttaatttaaggaagaagtttaattatgagagttacacttatttttagtcattggatcattattagacg

SEQ ID NO: 294741 - DNA, 6255 bp, Cannabis indica
catatttataagtatattaaaatttaagtgtgtaattggatatccaattaaaaaaccgatccaatctaatagtaattggattgaattagattgaatttgattggattttgaggtctaattggatcggatcgaatgatattttttcaaatccaattactaattggattagatcagatgaggaaaaaaagttagattggattggatgcctacccctaatacatataccttccaaattattaattggattaattacaacttgaatattagaggaaattatattgtatatctactttattttatctgttttaatttttatctttatttctatattctttaaaatatactcacttttatagatgatgtccttattatacattttaggttaatataaattatgtgctagacttaaatagagggtgaagatatattggacaacagatatacaaaagcgagtactttttaatgaagtataatataagagtattttttattaatggatacaaaaaaggaagtacattcttcaacttatctctgaatattacacattaaaaagcccctacactaattaatcgagtgagaacttataaagagaagattagtctcttgaagagcatatactaacaatctcatctcgtatccaatattatgaaattgagtatgtctttcatcttattaactcatagagtaatcttgtctctttgcgtaccatagtaagggattatatacaaagtgggcatctataacaaggtctgccattaatgtcggagagaaacacgccgggggaaagagagatgagagacagataaaaagaagaaagtaaaaaagatgaaggagcctagatcatacactctattttttctttttcttttaatttgttagttatttatttatttgttaaaaaactattttcaaataactatgatttttatttgtttaattattttaaaataatattagtatgatatgaactgataatatactgacatgtgctagtattaattactttagttagcatttaataaagtgttagtgatctaagtaacagaaatgtaactcaaaatatgtaatttatcaaacaaataatatacatgaaattaaaaacataaaatatgtataccgaggaaccctctctctatacaattattttcaacacatcatcctttttctttttaaataatttgttatatataaataaaataaaattagacctcacggtcattacacaagatagagtctggtatagttgagattagcaatcccagttacatttttcgcgaaagcccacctaacaacattataggccgcaaaattacaaactcttaaaataaaagagaaattacaacctaacaaattagaagagagttgcttacaataatgaatataattatcaatttctcaaccgaataaatttcctttcagagcattgataaccttttcagagtcactctccataagaacaaaaatgtgcttcatcataacagccgtgtctaaggctaacctgcaagccccaacttctccaataagaggatccgagaaatagagcattttggtagccacccacaagacaatccctaagtgatccctagctacagctatcgcgcacatggagcagctaccaactttgacatcacaattaattttaatccaatcatttggaagaggagaccagcttgggggcatcacagccaatggcagaataagtaaacaagatgcataatctgcgtaacaaatagagatagagtcaatcatttgcttaatgttacacctacagttattatgaaccttatcgttgcgagccctccaaatagtataccccacaacgaagcatagaggaacaacttaccagtatccaccccttttaacttcaagctccaaagaaaagtaacccaatcccaaacacgagctcctgagcctaagacatgcataatcccccacggggaagccctctagagatggtcagcataagtgcaaaaaaggaacaaatgttgcatcgattcctcaccctctccacagagagggcaagaaacctcttctatactaattctcttggctagaatggcctgaatagtcagagcatcgaaaaaaaatgcaccaacagaggaccttatgacgttccaaggttttggagttctaaagtttgttctgcaacttgagggccatagtgcaatcaggggctctttctaagactttgtagtaaataaaccattaggctcctttgtccaaacccacttatctctaccttggccactgggtttaccactcttaataatgtcactagtagtttctgggtcaaacaaaactctaagtttaggcatatcccaattcccattatctaaaagtaactctgccacctttgtcacccccactgcctagaatcactaggctttgggtagaaatcttggccatgagtaacccacggatcagtccagacattagtctctttcccatcagaaattatattgcacgcacctttcttcagaatctcctttgctttcactatattcttcaagaaccaagaattcgagttcttaaaagatccttccaagaacgatttatctctcagacatttaacttataacaccttacgaaacaacaattgatcttcatttaggagggtccatccccacttagaaagaattcatacggttaactcacgaaatacgacagtgacagagtatgccaccaagttttatcgattggcgaagtttgcctttgatgaagtggccactgaggctgctagaaaagccaaattcatttgaggattggaagaacatatcgcccgagatgtaattgtagcttcccaacaaccagggattgtccgaacatatgctcggtggttgagctagccttcgctgctgagggtgcacaagatcaaatttgaaagaaaaatagtgtaagaagagataagtggaagtaaacgtctaatgttggttctggtaaaggtgtttaccctaatgatcgtaagaaaaaatctaatgatccatcagctacgggtcctaacaagagattccaaggcaattaaggtttccgatgtggtaggaatgaaaattggagaacctatccagagtgcctgaggtgcaagagacgccaacagggcgaatgtcaagctcgagcctgtttctagtgaggggtagtgggccatttgaaaagaaattacccacagttacagagaccaaaatagaagaaagatgatactctagttcttgctcgggtgtttactgtgacccaagcagaggctgatgctggtccttttactatgacaggttagatttctattgatggcgccttgttgactgttttaattgattcggtgcaacactttcttatgtgtcaagtaaagtgattagaaatctgcatagacctagtgatgtttaattgagtggtttttgtaccttactgcctactggagatttggttatctccagcaagtaggttaggtcccttccaatgtatgtggagggaagaaaattattggttgattttcttgagctgaacctagaggattttaatgttatattggggatggactagctagtaaagtataacgcaaccatcgattgtaaaataaagatggttacttttgagcctgagggtaaggacccatagtgtttgtggacatggttcaaggatcccaaattacattaatctcggggcttaaggcaagagatttgttatgggatagatgtgtcagtttcctagccagtgtggtggataccacgaaagaaataccattgggactggaacacgttttggtggttcaagagttattggatgtctttccagaggagctactggggttaccaaagcgggagattgactttgaaattgatttgatatcgggggcagaacttatatttaaagctccatatcggatggcacctgcagagctgaaagagttgaaggttcagttatagggaatgctgaattttaagttcactagaccaagtacctcaccttggggtgcactggttttatttgtaaagaagaaggatggaaccttacagatgtgcattgattactgggagctaaataacttgacggtgaaaacaagtatcctttgccaaggatagatgatctatttaatcaattatagggaaagaccgtcttctcaaagattgatcttcgatcttgttatcactagttgagaattcgagaggaggatattcccattacagcttttcgtacctgatatggacactataaattcctggtgatgtccatcagattaactaattctctggcagtatttatggacttaatgaaccgagttttcaaagactttgtagatgattttaattgtcttcatcgatgccattttgatcttctccgattcagaagaggcacatgagaaacatcttcgaatggggttgcaacatctctgagagcataagctttatgctaaattcaagaaatacgaattttagatgcctcaagtaagcttcttagggcatgttgtgaaaaaagatggtatcttggtggatctaataatgattgaaacggttcaggaatagcctcgacccaagtctgcaaccaaagttcaaagtttcttgggattagcaagatactacaggaggttcgttgaagggtttgtcgaaatttctacaccttaaactgaactaacccgaaagaattgtaagtttatttggactgacaagtgcaaaagtagtttccagacattgaagcagaggttaattaccgcaccagtgctaaccttgccagtcaggaatgagaaattcatgatttactgtgacgcttcaaaacaagggttaggttgtattttgatgcagtctgataaagttattgcctatgcgtctaggcaactgaaggaatatgaacaacagtatcccacccatgatatggaactggtagcagtagttttcactttgaaagtttggcgtcattatctatatagtaaaaagtgtaaaatctacacggatcacaagagcctcaaatactttttcattctgaaggatttgaagatgaggcagcgacggtggttggaattagttaaagagtatgactgcgagatcctgtaccatcctagaaaagaaaatgtggtagcggatgctttgagtcaaaaaggtccaaggcaaatttatggactgaagaggatctcaccaaaattgactgaggatatgaccagagcaaagattgagtttgtagttgggaaactagccaattaatattacattacagtctgatttattagagagaatcaaagcaaaccaacaacatgatccaaaattgcaagagtgtaaaaagaagcttgaagtcgggtcagcaaagggtttctcaatttaatcatatgggttattgcggtaaaaacaaagagtttgtgtaacagttaacgatagtatccgacagaagattctagatgagtctcataccatgccttattcattacatctggggataactaagatgtatcaagatgtgaaatcactatattggtggccaagtatgaaaggtgatatagtagaatatgtgtcaaaatgcctaacttgttcgcaagttaaagcagagcatcataggccagtgagattacttcaacctctgaagattccttagtgtaaataggaagaaataaccatgaattttgtagttggattactaagaacaatagtgttctatgattccatctagataatcatggatcgatatataaagtcagctcactttttaccagtgcaaactatgtatacgggggatcagtaccctgatctatatgtcaatgagatagtttggtttcatagtgctctaaagtcgatcgtcttagatcgagatccaaagtttacatctaatttttgggagagtctacaacgaagtttagtataatctttcatcctcagactgatggtcagtctaagaggactattcatatatttgaggatatgatacgagcatgtgtattggactttgaaggtcttggaacaagtaccttcctctgattgagttttcatataataatagttatcagagtactattggtatggcaccgtatgaaatgttttatgggagaaaatgtcaatcgcccattcattgggatgaagtcgatgaacggagacattttggccagatgcagtcaaagaacgagtgaggccattgagaaaattcgagctcgtatgcttacctcacaaagtagacagaaaagctacgctgattcgaaacgtagatatatcaaattctaggttaggtattttgtcttccttcgagtgttaccaatgaaggtaatttggagatttggaaagaagggaa

SEQ ID NO: 294742 - DNA, 2429 bp, Cannabis indica
ggtataaaattccaactgattgatctacccaaaacaaacgtaccttgaattatagaaactaaaagccagcttatatcagttaaatcaaaaattataagttaaatgaagtaataatataatgataattatattgtaaagatattgtgaaagcattatatatatagaggtttcaatggttacattaaatatgtaatcattatggttacctttatttttaatcattagatcactattggatggttgtgattaatttaggaattaaattaaataaataaataaataaattgtaacctgatagtaacttaaaaatttatttccttataaatcttaattaaaattagttatatttaaaattaaattactaataattattaattaattttttacaatttgttactaaataagaatcttttaaaaaattattttttggatttaaattattaaaatatttataataaaacctcttataatttaaaaatattacacccataaccttagttaataaaaaaatagtaagaataacctctaattaaatgtaattcaacactcaatcttattatcaatactttaagtgctaaataagtgtgctagtccaagattggttcaagtaatttattttttttttctaaaaaaaaaataaaatctattagcaattataaaattaaagattattttttttgcggcactcaacacatctgtacttcattaccctctgccatgtaattcttctttcttaaagaaagtcactttatcattccttctttgtagttctaaattaatatactataacactattatttttttactatcattaaaatcattactgaaatggtagtatattgtaaaatcaatatagtaagtacttgagtttttcgcttacaaaaagaataataaaattaaaaaaaggctaattaaattcactctttgtattttgatctgtaattttttctcaattttactaatataataattatttatgtgttcaatcgtgtcctttaaactttaatatatattaaattgtgctactaaattttgatatgtagcaaatcgtgtttcataaattttcattcagatcagacttctgttaataaaattagataaaattttattcaataaaaaataaaaaaatataatttaatctatttcaaaatttagcacaaaaattctaaattatcttttttagagtaacataataatagatattacaatcaactaatacatcttttttcttctcttactcacaactaagctagcttctatagcttaaattctaaatttcctttataaaaagaaatggagtatatgtacactattttaaaactcgtataatgattacaaatggaatagataaaggtttgactgaatttcaacttgaatagatagagtagaatttcatttagatttttccaaatctaaaacatttaatatttaaaatttttaatctatacttattattctgttttgatttttttttttgtattttaattttttttaaaaatgtggaatatttgatatatatctatttaaaaggataatttacttattcttttccttgatatgaaaaactttgttatgagttttaagaagattttttttttgtttttgaaatggttaaaatgttgaagatttgatatatattgttttcttttaaagaaatattgtacatattgagactgatgctcttggtggtcaatgccttgaaagctcccttcaattcaaattcaaaattctcagatttaattagtgatgttcttagtcttttatcctttttctcgaatgtaaatgtatcacatgtcaatcgttctgcaaacaatgcagcgcatgggctagctaaatttgcattagcactggatggatgaggcttgtatttggttggagattattcctccgcctatatactcgattattgtaaacgaatcttgattgtttaataataattaaccattttccctaaaaaaaaaatattgtacataaaaattttcttcatatgaaattaaagattgtaaataaacttcaaaattaacagtaattacgaagtttaataattttttatttgataaaaataataaaaatcatatgaaggataattttcctattttaccctttcctgaatcggtaaacataaatcgcttaacgagttaacatggataaaaaaactataaagaaaaaggtatggtgtcctacaattaggccacagaacatggttaaagacttaaattaaagtgaaaattacatgaaatatgggatttcataacaaagttagaaaaatatggcatttttaggtttgccacttttctatggtattttttcacatttaagttttttatggtatttgatatgccatatttttataaacttattatccaatcccatattttatgtttttgtttttagcttaattagttttatttatttttttaatttatttt

SEQ ID NO: 294743 - DNA, 4966 bp, Cannabis indica
tatatatatatataaatatacatcatcataaaatcatcgtcaaacattattttttgcttaaaaagtatattttcatgagagcataaccaaataattagtaagtatatttcttatttattattttgtattgtattaaaattaaattttcatgagatcatcgtaaaaccatcattaagtattgttttgtttgtttgttttgttgccaaaaacatgttttcatagaaagattgctaaagcatcgttatgcgttgtgttttggacaacaattaggtattcgtggtagcataagcaaccatttaaccattttgtgaaaatcatgtttcatgagagtattgaaaaaatatcgtcaaatatcgtttttggcctaaattcacgtttttttatgcggccatagctaaactatcgttaagcatcaatttaacaccgttttttctttttcagaatttttttaagaaaaaaattccaattcaaaccaacaaattgtattcatacttgtttgaaacctataaattagtgttttaaattaataattgcatagattaaagtttggattatatttttaatcattaaaaatacaattatatatagggtcagtggtgagataaagcggcgttaatggtggttagggcaggaggtgatcagagtctcgatttcatctttcgaaaatgtgtgagacatgagaaagagatggagaaaccaaaggttaaagagggagaggagtttgaatgaagaggtattattgtcaaaagaaggtaattagcatataatgccagtctttaaattattttggcacatgtttcatccaaaacaataataattatgttggcactttattttttttcagatggtacagtataaagcataaatcatcaagttttccattaattaagcggaactagtaattttcttctggctaggggtttagtttagattagcttttcttaataaatagcaagaaattgagccaatttggaattagaaatgagacaattccttttgcacttttacaaaactccaatgaaatatgaaaggagctatgtaggtgaatatttttcaagtttagcttaattcataatacatcaaaagtgagaaaaataagcaaataaaaatatatgataataataaggtaaaatgacagtttgattttgcccccctcctattcacaaatcccacaagctcaaaagtcaaaacaatgtactctaatttacaaatgtgataactgatcccccaaaaaaaaattactcctttacctttcaatcaagtcactttgccagaatataataatcatctcgataagccaggcaaagtcatagttttggaattgtactttgagcagtggaataaataaacccctcaaactgttggagagtcatcatcaaacaaccaactctcttgagttttatcattgatcagaatgcacagcagatcctacagaaaccgcgggttgtgtaagtctcagtgttcctccaagctcaacaggaactagagggataagagagtgaagaacgtctgtaatcagcggccggtaacttggctctggttgcacacacagcactgcgacagcagcaacctacgaatagcatattatgcattactcgagccaaaacatgacgatgtagtacaacaattatatatatttggacaaagttattcacttccaaatagtattgaaatgaagtgttacctgatacaagtgcttaagatccatagtatcttttatcacaggatctacaatatttggaagttttgatctatctgtaagctgtggcatggcctgcataaaagagcattatagattattttggttacaagaaaaaagagactgaactgcatggtgttttcaaaacaaagacacatacccatgtgacaatagattggcactgagctggtgccagtttctcgaccggccttcgacccaacagaagctccaaaagaactactccaaacgcatagacatcactcttatcagtcaacttacctgaaagtttttgttagtaattttcttgtcagtcaccaccaaaacttaatgagtagaatgaaccagtttcagagatagagcaggacattgtagaataattaaggatattaaataaaccgaactttaactcccaaaagctagcctaaaagagtaggatgcccaaatagttatacactactaaccaatcccatacttaatcaatgtcggatcctaacatagtcaccttttattaattaacaagaaaacttttggtcaatgaaatccatgtcacaatacagtaacaactcaccacttcattagttattttgaacaaactcaacaaaaagccaaaaaaaattccttaatggttgatttaagtaaaacttttaattgtacaaataaaagagaggcatgcctacatggaggtatacagctatgtgcccaaaattagtagatccaaagatttatattttacaagttcatcaagctcaatacaaaagaagctgtgtcagggatctagagaactactatattaattttcattagttggggggaagcaaacacataattatcaaaacaatcagacttaaaatacacactaatgcaattattacaagcttagttggcataccatctaacagatactccggggctacataacccaatgtgcctgagagcttgatattattcttgttttgggtcccatcaactacagcaagaccaaaatcggataactgattccacaacaataagatagaaaatggaacagtataagaagagcatttataatgtttattgggaaagggtcacaatttataatagcaatatcttaaaacaatgtccaagattttaatgaagagaaagatagattagatattgaacaaattttatacaatttaaaattaccttggcattaaagttggcatctaaaagaatattagatgttttcagatctctatgaatcactgaagggtggcagtgttcatgcaaatattctaatcctctggtcaaaaattgcccaaaatgttaatagggttaaataaagagctactgtaaaaatgaaataaattaacagaagattctatggtgcacacccaattttcgggatgcactttctttgtttttcttgacatccaaagagtttttttattttgaatttctcaaaattttacatgatgtcttatataagtataatatacattatcatcaagaaaaattgagatatcaaaaacagaaaaaagtgcatcagtgcaaactaaaaataaaagaaaaaatgggaaaacaatctcataccttgctgtatcaagagcaatcttcatccgcatatgccatgttaatgcagaaccatgggagggtcctaccacatgatgaaatataattattaaatataagtatggactatgactatcatcaacaccagtcgaatttatagttaatcaaactatgaaaattaataataaaaaaataatgaatagatgccataccatgcaattgtgtctccagagatccattatccatcaattcataaacaataaaccttgaatcaccttgactacaacaacccaatagagaaataacattgggatgttgaattttactcaacaaatctacttcattctacaattttcaaaaatggaaaatccattaaaaaaaaaaacactataatataaatataacattaaaggaaaaagaaaaaaaaaaagagtacctggaactctttctcggcatcgtgactttggcactctaatcttttaacggcaacaatcaagttatcatccatttgagctctgtaaacacgtccaaaaccacccacacccaagatattaccttctcgaaaattttcagtccccttttctattatcttatagtcaaccaatgaaacagatcccttctttccaacaaccatccttgaagtattgaattgagcaaagaaaggatttaatgaaaatcccttttcaccatcttcaaaccataatccaaacaaaacagaacccagaaaaaggataatctcagaaatcttaactagaagaataaactattcaaaaatcacaaatacccagaaaagcttgattcaaaatctgacaagtgtaaactgaggtacctgagcttcgcccagttcttctatgaggtttccgagagcacttgcagtgataaatccacaagcctaacaatgacaatatgattgcaccaagtgtagtacaagcaacaataagagcaattagaattttcctgtgagaatccatagtgttcctttgaccttcttctccaactccaactcctgcttaaaaaaaaacaaagagtgtttattaatcatttacctcagtttttgaatctttaaataacttaacattttaagcaaaatgtgataatacccagaaagaagttcaaatctatactactaaatgagcctaaattctatgacccgtctaaagaaaaagctcaaagcatgaacccaaaagaacaagagcaacataaacagatagataggtatggtatggtaccagcaggagagtaggcaacagtaggagcagccattgtaggagaaagaggagaattaggtgagaaagctggagagggaacaagagggaccggtgtggcaccaacccaaaagggattagaataaacaagtaatagtagcacaagaagaaggagaagaagaagcttcatggtttttggcttttctctgttctctctttctttttttataaatttaatttcctttttttcttctttctctgttgttataaatcaaaataaataataagagaaaaacatgaagatagagaaatgtgcttttcgggtttttgaaaagcaacacacacacaaagacaaaagggaagagagaagaaagaagaaagagagagacttttcactgttcaaatcaaaatggcctcagaaagaaagaaagaaaatggtttggagttggttttggtgttggaccatctaaaagaaaatcagtctttttattattattattattattgttaataattttaattaattattttt

SEQ ID NO: 294744 - DNA, 1184 bp, Cannabis indica
aatcaacttcaacatcattatcattatcaccattaccattgtttctttttctcccttcttgatcttagaataatatctatccaaaatggctctttacaaagaataaaataacggcacatagtgcgttctcactactcattccgagcatatgggctttttattacataaaggatattaatggagggatgctttgttggtgaagcacttcccaaatttaacataatgtctctgttcatgtgtatcactcactactttcttcttccatttaagtagtgattgattatagagcttagccaccaaaataagaaaacgatagggttgatagtgaacatgaatgatagattcggttaatacagaatcactatttctttatgtcaatgatgaggaggtgttttgaattaatttcttctatatgttagagcaaaattatataaaagtaaaagggaaactagcataatttaatgttctagaataactaggatatatggaatttttattgggagaatcccaaggaaaaggaaaagagtattgttaagtatgaagcattattcttatttaataaaagatgacaaaataggtcagataaactagtatgaagaaataaacaataggtttgggcttttcttaaatgagtttgagtcattttttagttgacaagagtaacttgtttatttaatgaatattttcgggttaacatgtctaatttaaaaatgatacgatagtacatttttatatctattatatttattacatgtaaattgcattaattaaattagttaaatagagcataaattgttagaactttgtatgaaatatgtaaaaatagaaaagtgaagtgtgtgagtaggagtctcacatgtgatagaaacactacattttaagtgtatatctagtgcaaatttgagatatgggtttgggccccaaggggtacccagttttgcgcgcatgggtgaggactcacacactggaccaccacgcgcgcgcgccgccgccgtccgaccgacctgggccgggttggcgggtgaggtgtcactttattttttgaagaaaaattatttaattaaataaagatttatttttatttatttatttattcagtcaatgatccgccttttcctcccacgatccaactcctcccacgaacgatttttctgagagcaaacagtagggtgttacagagtgat

SEQ ID NO: 294745 - DNA, 971 bp, Cannabis indica
cttcttctcttctcttcttcttcttcttcttcttctctaattcattattattaatccatctaattaattacatcctatatcttctttcttttaatttctagggctatatataataataatatagatataatggatcatcataataatgatcatgtattgattagtgatcaaaagggtttgttggaatacatgagaaagtcaagtccaccaccatttttgctcaaaacatacatgttggtagaagatcccgccaccgacgaggtcatctcgtggaacgcgcaaggcaccgccttcgtggtttggcaaccggccgagttcgccagagatcttcttcctactctcttcaagcatagcaatttctctagctttgtcaggcaactcaacacttatgtatgttaatcgtataataactctctttctttatatattttcttaattattataaattattttattatatatgcagtgacggagtcaggattaattatttttattaataactttataaaagattctctttttatagatgatatttaacttagctaaatatatagtaaatgtttttccttttattcaatgttcatacattaatttaaaaatacagtactatatgtaatcaaaggtgataaaaaatgaatataaattaagaattttgccaaagtattaataacttagctttataatattgttagactttgagtcccttttattattaggttaattctggtttttctttaactaaaaattaagatataataatttttattgtgattgtcttttgaaaatggagtctatatgattaagtccaaaaggaatttaataatgaataatagagaaaagtcatcatataaatgtattaaatatttggccttaaaagagaagaaaccaattcttgtagaccatggactttgaagatatatatatatatatatataaatatataaatatatatccacaataatatactggaa

SEQ ID NO: 294746 - DNA, 4555 bp, Cannabis indica
attgtataaaaaaaaaaaaaaaaaaaaaaaaccccagctattgcttatatacaacgaaatggaagtcttgtcttgcactaattggtaaaattatttccaccatcatttcatgctatatttagaattagagaatgaggctttgttcatctgccattgtggatctctcttctcaccaaccatcaagtagaagctaaactacaccaacccaataagagagtaccaggtagttgcatagatgtagagagctacccgccagaggaagtgaatcgcttgaacacaaagagggcgttttccaccgctgcttgcccaaaggcaataacaaacatcctagtatcctacagattaagaaatggagtaagcagaggatttctctacatgaattaaatattctctttggttgctaaattacatattgggacaattatatgtacgaagtttgagggaagtataagaatgtgttttatggatgtcaccacacatgcacagaggacttcaaatggtgttactcttgagaacctgcaaatatagcaattattaagcttattagttcaatctaaaataataggtgttcaaagagatgtaaaagtgtggcaaagcctatgacaaatacatatattatttttacatctaacaagtacatccgacactacagttgcattagaattacaataaagtatagtacttcctcaggttggtccaaatattgtcacgattattgccatgatattattaagggtttgtatccctattattgaaaactgaagaactatttctattatcccattacaccaggctgcagcataaaggacattccatgacaaacacttatatccatggctacagcagaggaaatctacaaaaaattgcatattttacaataaacaataaaataaagtaacctatgcagttttgctttgttggtatgagaccggtgatcttattgtacttttgcaaagtacctagtttaagcaaatttgaattgtttgaagaggcaacattattcttcaaatttggatttattgaaggaatttgaattgaaatgcaagcaaatggatcctccttgtccagacaaatacttcataaatattcatcaagtacttagaattgacactagaagtcaaacacaactactctggaaatttctctatctactaacactatggtagtgacatatatatgcactaaggagacctcattagattacatttcaaagttctgctaggattgtactttgtcacaagaacctttagttaattgaattgaaccataaaccctatttctaagaagaaccagcagcttcgacacaaatttttgaggaaatatcaatttattgaaatgcaaggatcaaggtctttttcaaataagacaaaaaaagaatgaacccagtgtcactgtatctgtacctatgtctttcatcatttctctcctgaattatttaatgaaactataacagcttgttctaaatagaattaggcatgctgatttcctaaactcttttagcctagaagagaaacaccaagcaagctaactaatttctttgaatagctcttaaatatcagcctccaacatactcttttaagacttcataaaaggtttcctcaatgtacactagtttcatggtatacacccacaattttaacatttcttacgctcagtccttagtaatccattaagaacggaaatctaaacgccttatattcatccaaatatttgaattaagtcaattttttatctggcagggagtacttgataatgcttaaagttgaggttttacaagaattgtccaagtatgaaggcaaagaaccacactatagacttagcatacgataatattggatgatgccataagttaaactagtaacagttgttccacataataagcagtttgagttgtagactttaatgtatattatgcatgtaagaatacctttgtgatgcttggataactgtttgtgaaattcccctacacttgcccagatggacttacttggggcaagtagaaggctcttcatgtcaaatgaatttaatttttcatccaagagaaccttttgcttaaaactagatagtttttcactaacttctctttgcaggtttgagacgtcaggcacaaatatagtctgtctatctcttgcaacactctttgggccctggaaaccactggatctggccatttccactgcaccatttcttgttgtcataaaagctggaaaagactgcatcagaatttggcactcaaggctatgaaataatatatccacttgaaaaggaaagcaaagatccaaaattgtgaaagagtaagtaagcaattctcatcgttgatttattctaaacaagaaaaatcttcctacttccaatcattatggaagtcacaaaactattcatattaaataatggaacagcaagcattagaaaatgttgaattttaaaatataagattctgacaagtaccactgtaaggaacttcatagagataatttgcaggaaggccaatgccaaagccagcaaaagtgaagcccacactaaatccaacaccacagccagctccaacataaccaataacatcaggaccaaaaccaggaccccatccaacaccacaaccaatccctactcccataccccaaaatgctccatatgttggatgcacaggattccatctttcatatcttctgaacaacccttttattatcattataacctgaggtcaaaattataagatcaataaacaaaataataagaattacaaagagaaaaaaataaagtatattccatcaaccatgttgatgacttatataatgcaagcatcattacataaatgtaagctatgtcattacagtttacttgttttttcttcttcttttctttcattgtagttattgaatattattattactattattattactttgtcagtgggttcacttctcgtttatgcaaatacgtgcaataaaaaataataggaaatgccccgagatgaactaataataaaacaaaaaagtctaggaagttcctgtcatatattaaataatactggattactcatctttttaataaccagcatcatatcataaaggtgaaattaagttgtactatatataaatcttttaatttctattgataagaaacaaggttgtactaaaaatagaagatgggattaaaagaaaaagccttgacttcaccaaacaagatactgatagaacaaagcacaaacaatcctaacgaacactattaagttttctctttatttgacgtggtcttactttctctaactgctacaagctaacaaaagtagagttcctattaaaaaagaaataataaaaaaataatacaatatcttatgctgatttcaagccccctccttttgtggcctattaatatccaaaactacaatagataatttaacacctgccccaatctgccctgttcatgttttgtaatgaaagatttgctttcctttgttatagagtaagtaaaagctaaactattttcttatagtggaatgaccagaaaatacattagccataagtaatatgttgtatcatcaattgaattctatgttataccttgttaattttgtttatatgcacttactctttataatttggcaattgattcaagtaagacacaaaacagcgacaaatatggcctatagaaacataccaaaatttcaaaattgacttgtgtaatctttcaaatcttccactgatagaatctaaattaaaaatccaaatgggactattaatttgctttcttagagtttaatcagcaaaggaaaatcctcatacttaataggtggactatggcacaggcacagacagttacttctgcagtataatgccttctttaacaaatgttctacttttctaatttatatctcagagaccaagaaaatataaatcaataaaactttacattactctcaaactcgtttacgtgtgtacgaatgtatgtagacatacatatgcgtatttttgagttatttcttcaaaattttccagcaaaccaaacacttgttaggttttacaccaaagggtatttgagtaaccgagcaaaacaaaaaaagaaagatttgagggcaatagaaagaagacaaaaatgagatagaaggaagcagagttcacccaaaaacgtataagaatataaagaaaacaaagcattgtagattagaacctgaagtgtaaggaatgaatggatttggttgaaacctaaacaacctgattgacttccatgggcatggaagggaggtgaaggtggcgaagtgagggagtattagagaaatgaattatatccgtgagattggaacgacgatgacacaaaccaaccatatagcttaaaatatgtgtggctatgccaataacaagtggctttcacatatctatgccaatatcattttcttttctttttctttctatatgtaatttctttttcttttcttaagcaaactgttgaacgataaattttaattattattattattattataggaatgggtcagtcaaaaaggaagagaaaattaaggaaatattttctccacctccaccactttcacgattaagtg

SEQ ID NO: 294747 - DNA, 2312 bp, Cannabis indica
tttggggcatacagttgctaactgtaataaagagaagaaaatagtttggagaaagaaacctactgctgacaaggaaaacaagaaggaccagctgaaagagcaaaaagaagcagggatattggctggaatatcggaggaaaaagaatctggtaatagtgctcaagtgaaggtgatgctgagacaatgtcgagggtgaaagatatagtaattcctgagcaggtaaaggaatggatcgcgcctcgaaggaaggcttcgcgacttgcagggaacaaagagactaaggatggtgtagaagtggaaaagccaaataatggctatgcggtgttaatggcagctgctgaggaagagaccatggttactaatccaaacctcattgctgatggaagtaagtaacatgatagggtggaacgtgcgtggaatgaataaaaaagaaaagcaagttgtgattcttgatatttgtaggcttaataagattggatttggtgctttgtttgaaacaaaaataaaaattgagaaagttaagggtatgatggaggagaactttcctaattggaattgctattcaagtgagattgttgctgggagaatcttgcttatttggcagaataaatttgttcaagtggaggtcattcatgaaacaagtcagctggttcactgtaaaataaaattcagtgggcagaaaaagagtacttttgtcacgacggtgtatggaagtaatgctatggagaaccgcaaagagttgtgggataatctagcgagcattggtaagctaaatgagccttggataattttaggagattttaatgcaatgttttgtttccataatagaaatggaggaaggtctattcagaataaggatatagtggacgctcaagcttgctagcattgggtcaagttgaggagttcaaaagttcgggttctttcttcacttggactaacaaacatgaggtgggggacagaatctattctaagatagatagagtttttataaataatatctggttggctgagtttccttactctgatgctttcttcaaatgggaggtcatcttggatcactgttatttccttgttcgttttcaaatgcagaacaatatagggattaagccctttagatttgggaatcattggccttcttatctgggttatgcttagctggtgttgaattgttggaacaaagaggcgtctggtggtggtctgaatagtctcacgaagaaattagtatctgatcaaacatgctctaaaaacttttcagagaaatgaagtgggggatgttgctaaggagcacagagaggtgaaagaggagtgttgcagaattcaagaagtggctgccatgaatccccttcataatcttttgcaactttcagttaatgaaatgcagcagaattacttgacagcaaaggagagaatgagtcaattcattagacaacaaagcaagattagatgggtcaagttcaatgatgaaaactctagttactttcatgctactatgaggaaaagaagaatggaaaatagaataaccactttcatgaagggggatacaatagtagatgattttgaagaggtggttaataattttgtgaagcactttgaaaactttatgggaagcaaaagtttagcagtcagctcaattgatgaaacttgtattaagcagggtaattgtctgagtgtggagcaacaagttagcttgattcgtccttttaataaaggggatgtaaagaaagctctctttagcattcactcctctaaaagcccgagtttagacgggtttgggtctggcttctacaaggatctttggaatgaaataggtgatgatgtttctctagcagttctggattttttctctaccggaagaatgccctattccttaaatgagactataatttctttaattcctaaggtggagaatccttcttcagctaaggattatagaccgatcacctactgcaacacagtctataaatgtatctcgaaaatgatttgttctagactctcagaagttctgccttcactcgtcaacagcaatcagggtgcatttatcaaaaatacactcctggctcataatatcatgatctttcaagaccttctaaagggctatactaggaagaatatttcggataggtgcattatgaaaattgacctcagcaaggcctatgatacggtggactggaactttgtggaagacttgctcaggctcctctgcttcccgtctcgatttatcaagtggattatcatttgccttaagtgtaatacccgaaattaagaaatggattagcaaaaccctaactagataattatgtataattgaggaa

SEQ ID NO: 294748 - DNA, 2229 bp, Cannabis indica
cacatagagattgactgccatgttgttcgagagaagggccacgaaggcacattgaagctaatacatgtcaccaccaaaaacaacatagccgacgtttttaccaaagctctttttcccacttattttcatgaacttttaaccaagataaacttaagaaatttatacagttcatcttgaagatgggtattagaaataaaaagtcttttctcttggcccaataccgacccactgggccttgcttttactgtgtatatatacatgcactttactttgtgaataaaccctacgactattatttctaacagccacatattttcggctgatactaatgtaaataatgagactcttttctctctaaaatttttacatacttttaataaaaaaaattattgatattttatacacaattctattaaaataaagtttattttgtttctaattgtatatttaaacacaattataaaatttgaaccataatattaatttattttttgatctaaatttaacataaaatttataattgagatctaatatattactagctcggtggtccatattagtactccaaacttccgtgtatcatatatagtacgcttaaaccatagaaatggttcgacatctttcatgatgcctatatgtcatacgggctaaaattaggaaattatggaaagctatatatgacaatgatgtactgttgtcgttaaacttaaacctttgtactaagctacgtcattagccaggccaccgcaaaaatccaaattaagctccacatttaagctcaccctccatataccacatcatgttaattaacccaactaattaaccaaacgccacctttaatggtaatgtacaaaatatattaagtataatataattaggatcactacgatactattatcaataatacgtgtatattaatattaaaagcatatttttctttcttggtgtaaatattaaaagcatatttatgaggagagagtccaggattcgtacggaagtgaaggggcaaagatggaaatattgttaattattttgacaaaagaacaagtattgtagacgtaggtatatagaggaggtgggttgtttgtttgggtgggtatccaatccatgaaagaaatcggagaaaatgtcgttttgtgtgagaagagaatagttgtgttaagtttgatgttagttgtttgtttgttgtgagcgttggatgacaaagcttggtgccagaacaaactccaaatggtttccacgtgatgcgggccttttggaagggagtacaagaatgggagtgtcgttgtccttacctatggcggctgtgcctctctactcaaccaaatacaaataacaagtttttgcagtttaaaattgaaaggagttcataaaatatccaatgcaatacaatatgtgcatttgtatcagttggattacaaaatttaaatatgaatatattctaaaatttaatatatataaattatatctaaaaagaaaccaaatgttcactacaaaaaaaccctatctcggcagggtcagaccgctgtgaatttcaatgctgagattgaatgtgactttatctcggtggtccataccctctggtattgttggcaatctcggcggtctaggcccactattattggttatgcaatcttggtgagcttggcccgtcatgataggaatatttgtttcctaaattagcactttttgacacttttcttggcgggcccaactctccgagattggtcgatcttgatggccttttagtagcctccagagattgtctactagtggggaaaaaaatatttttttagattccctctgcaattatattgattatatatatttttcaattcaaatataatttgaaaaatatttttttatacattaaatagatatctaatgtatcactctataaccaaattttataacacaatccatattataattagtttaaaaatttgacaataagtataattagtcttataattaataaactttaatctagatcatatcatatacttatataagtatatgagacccatttttcacgcacttcgttaatctcatctattgtgtatgttttctattctgatcataccactgttggaaattattttaccaggatcttagatctactcacaagtatgttgtttaacaccctaattatgaactttctaaaacgataaaataaacacatataaagttaagaaaaccctacattgatgcagcagaattaatgtctcc

SEQ ID NO: 294749 - DNA, 1704 bp, Cannabis indica
ctaattactgaaataaatccacattatataatagtatattctgttaaagttaacgtagaaaatcaaaaaatatcattaaactaaaaattttgttacatagttacattttatataaaatagatttagagactcagatctcagtatttttttttttaatatattagaaaaaaaaaataggcgtgttggatcaaattcaaaattcaataagtatctaaatattttggatcagaattgatttgtcggattggagcttcaacccgatccgaataaatggatttttttgccatacctaagatacctaagaaggaacaaaggaaaatatgagatgaggaaataaaattgagtgtgaagaaatgagagaagaaccaaattttgagtgattgagtactttgtgatctccatataagttgagtgttttctctaagaaaatttgagtatttattcatgtgtgcctctccaagagagttcattatttctctatgtgagtttctcgaagagaatttgtgtgtgctctccatatgtgttctgggtttcttagggagatgagaggattttgatgtactgttatgagttgagttttgagaactctttgtataatcttggttatggtaattctattcttgaaaacaataataaaaaaaccctagtacttattcctcgtggagactcaattgagttcgaatcacgtaatttgtgtcttttgtttccaattacatcggtggaattcataattttatttatactttttcttaatttcagaactaaagttaattttgaattttaatttggtctgtagtattaatttaatttgaagttattgatgggtgtaatttgtattaaatcaaaatacattatttataatatttcaattaattatacaattatattcacaacttcacttttctccgtgattatttctatgtttatttataattcacttacaatcaatgtcctatatcctaagctacaacactatttctagttttaatatagattttaagaagtcaacacagttgttacttaactgtaaaataatttggtatatgtaatgtattatttggaaaaataatgtgatgggaggaaattacacctagtgatgaaaattttagataagaaaaaagggtctctaataagtttgatggttgtaatttagagggctctttaaaagcttcaaagttgagagttagtttatttattttcattgatgaaataagatttttagagagttttaatatgtattagtaagtttctgtagcataaaatagtagaagatttcttcgaatttgtatgttgcagttttggcttaaatatttttctgattcaaatttgaccaaaaagaataattaattcatagtggaagaaacaaaagaaccttttctatgaagtgaataaattttacaactgaaatattgctttcaaatgtccttttgtgactgcatcattcaattcaaaaagcttacacaacacagaaaataaattgaaggtaggcaaaattgttagattgcatttattgtgcctataaaactttacctaatttatagtctattcatttcatatatgccaactactttgcaaattcacttctttacactagagttcacactatttggattgtgtagtaagtagaatatgtttaatttacttatatatataccctatatgaaataattacataggcaccattttttttgtaaaatatttaca

SEQ ID NO: 294750 - DNA, 3571 bp, Cannabis indica
tgttctatgttatatacaaatagatcttggatttattattaatttttctaacactattcactaatgatgttatcttgtttatagtaatttgtcaatgtaaataatttcaaatgatgaagtgttatatttgaaggaaattaatttatttttctcattaattaataactaaataaattaaaagggtcttaatatattagagactttcagctgaaaggaaacttacctcacaaattaaatttgctactctataaatggaagacttagccattgaaattgaaagtaataataagaaaagttttgggatgagcttcaattaatatgatgctgaccaaacaaacacaagtccattttcttggtccccagtttttaagggatattacaagatgtgatattgtttgtctagttgtgactttaatgtaaacaaaaataggctgtagaacaacccttaggatctgttcggccatgttcctcatattcttgattggttgtttctctaaatttttactctctaaatttgggcagtgcaagagaccttctaagacaattttttgttccaagtacttaacaaaaacaaacacactttatcgaaagttttatgtgtttagcaaaggcttagcgagcaacacctatgaaatttcaaccattttttatggaaattttgaactttacgatcttttaggcaaaccttttcaaaataatatttttgggaccacaagatatcacatctgtgaaaagttgctttattgaaggaaaagaaaaaaaaaaaacaacttgattgagaactttgttttttagggagagatctaagttttcattcaacaaattaagaactagcatttggttggaggtaatgaaatgaaatggaatggaaaggaaacaagtttcattccatttctttgtttagttgcatttcaaagtattgacatggcattccaatggaatgctctttccaccattttagttgaatgacaattccatttaaaaaaaaaaaaaaaaaagacaaatccaatttaacaagagaaaaaatttaatgattttaaattttattccatttcattcctattcctattctcattctcattcctattcctatatttttattcctctcaaccaaacgccacctaaaagacaaagtccattacaaagcttaatgataagcaaaaataaatcaatactgacaaaggcgagcaaacagcaaaaaggccaatagagctacaaatcgaggcacgtacatggttatttttaagtaccataccaccatagatgaaaggtaaagaactaaaataaagatacaaacgctcaaatctctaataagagaaagtccataattagaccaaaaaccaaaggaaaaaaaaacaacataaaacaacatatctaaaaatagatctaaaacaaaacaacaataaaaaataaaaataggagcatagacccaaaacaatgggagaggaagagacatcccgccaccggcaagctctcggtgctagagggaatgtggaaccacaccacctatccacctcggcccgtccccaagcttcaaattaaaaggaaaagggccaaaaatgccaaaaacattcgagcaaagacgactgtcaccaccggagactcatcggtgcctccttcggatcccagccgctatagaccacgaagccccaaaatgatcgacctcccctcaacgacgactttgaaaaagcatacttgtctcggcttccccattctcgtcatgcaaggaaccatggccatgagaaccaccatcaatagtctttcggttagagagcaccaaatgcacaacaaagttggtggttgggtctctagccgagaaaggataagaaaaagagatgaaaccctagcttagagagagaatagataaaaaaaaacctatagagaaatcttatccttattatattataaaatacatttaattaaacaatatttttcatatgagttaattgagaattcaaggccacatttttcataaagttattaaaataatgtgaagattgttatttatagtgttactattatagagaagagaaaacaaaattaactaaaaagtttaggaaatatccgtggtacactctcttaaacggttgtttcagtgttttaacatttgacagagctttttagtttacttttttatgattttgtgtggtgttgttatttaagatcatttgcaattttttagaaaattctacataatttgcagtaacaaaataaaagttaaaaataattgcttatcacgtgtataagaaaaaatagtcacgcgtacaacaaaatatttaaaatttatttttggcactgtaaactattcaaatttttttgaaaatttataggtgatcctatatagttgcaacgtactcgattgcaaataaggcccgttgaaataatttttgtataactttccccataaggatgacatatcaagccgcttttatttttaagttttttgtcctcttctttgtcttgtcgtagttcttcctcttctcaaggtaagcatcgattagatccatctaacaggattatgcttcttttatttgaaaagtcacgtatagttgtaagtgcttattgggctcacttgtattttttagatgaatccttgctattcttccaaactaaccgagtgaagctcgttttgcaagtttgttagctctctcattcatttcatggggcacttgtcttaattcacattccaagaatttgttttgtaagctagcttctggcgatgtcaaggtagttcttcattgcgaagcttctgccatcgaactgtctttccatatgttgaactataaaaattgaatatgtgtgaatttgtgctcttgttatccccattgacaatgcgagctccaactcataaatgaatgcttcacatttcgcctcattattcttgcaagactcactaagcataatggattcttttattttcaaatcagatgtagcttctagcactattcctatctcgactttctagctatttgatgacccatccaaatgaactatccatacccactctgattctattaactttggaataattcctaacgcattaataaacgagttgatctctacagcgaaaccagctagaatgcttgtcccttttttgcctttttgggaagatatgacatatcatatgcccctagcttgatatctcacttttccattcttcctaatgaatctaatttgttaagaatatgtcttaatgaatagtcaatcaacaccataatcagatgcatttcaaaatattgcttcaagttcttatttgtggtgatcaaggctagaacgaacttttccatcgttgtatacctggattcttcttccaaaagtaccttactcagatagaatatcgattttgtttggtccttcttctttgaacaacacatcgctcccaactacttcacttactgctaagtatataaagagctctttgaatggttgaggtgaaacgagaattggtggcaaactgagaaaagctttgatattttccaacgccttgacctattctgttccccacaatttgttgaagctttcttgttacaattgttaggtttatttttatgcatttttagagtctatttta

SEQ ID NO: 294751 - DNA, 5238 bp, Cannabis indica
taaataatttttctgtaaaaaataatattgtgtcacaccacaccaacccaacccggcccggatcggatcggacggcgcgcgcgcgcgtgtgtggtgggtcaagtgtgtgtgtcctcacccattcgcacaaaactgggtaccccttggggcccaaacccaaatgccaaagttgcactctttatacccttgtcaatgagggttcatatcccatgtgggactctttccaactcacacacactaagacacttatatattttgttaaaatattcacaatatttccaacagggaaatatctaaccgtccctgattctttacagttttactatttccaactactggagatgaagctttcgagcttttcgccttgtttccattcacttggccaccactcattttagctctctcaacattggttgtgtctaaatggaaaacaagatcggcataagagagagtaagataataccgttaggctaataacaactaaccatctctaacatatggtccttgaaacccaagattcagagtactataacacagcttacctctttcaaaatcattgtcaaatagcagagaactaataggtttcatctcaggctggtgagtagagattcctttctctgatttgtcttctgccaaataattaatgaggtttcacagtttacttgtatgtctcaagaatcaagataacaaaacaagtgaacataattgaaatataacaaggtggtacctgaaacatctcccattattttttgaggtactggatgaatcactgaatcatcaactttatctgctgtgatttcatcaagagttgattcatattcttgtttgttggattgaacttgaacttcattctttgaaatactgtgttcatctgttcttaagggtggttcatcagatttggtcatttctttcaaccttgaacttcttctaccattaaaaggtatgtcaaatggaacccctttacctgcccacttatatatcgaaaaatgaaagtgtccacttccactattactactggactttcctgaatcctttttcaaagtggctcctttatcgatttgatcaggcttaaccaagtttgaggacacctcagtgccttggatagcttcctttgaagatccaggaagagaagcatcatcattcaatttaagtagactacgagtagggggaccaaaggttggaagctccactcctttgattgtatttggaggaagactaagaaagataatttacaagtcaaaatatagaacaagcaaagcttgatgcactcaagtaccattaaaactaataatattaaggtaaagattaaatttttgactaattgggcaacatgaatcaattgaagagttaaaatatagaacaaggaaagcttaatgcactcaagtactattaaaatcagggagaatttttgagctattgaatcataacatcaaaaattcttctgaactattgagattgttagattttaataatacttttgactaattttactaacgcaagtctaacgtgaatgaaaattcagaatgtatggtttggtacatatcaacgttcgggaacactatatattaaagtttggggacataatttgatagatagacaattgctacataagcaaaattgaacaaaaattgattagatgtccttaaatctaacaatctcattagttcgggagaatttttaacggtgaaatcattagccataaaactactaattttaaggtaaagattaaattttttaactagttgggcaacatgaatcagttgaagaaagaggagtataagcaaaacctgaattgagaaagagacgaagaagttccaaaaggctcagctctaggtgggagaggactaagaacccgggaacttggagaagaaggaaaagggtactcccgtccttgttttttcggagtagaagtaactgacgaatcgcctccaaaaatatcgtcaaagaaatcggaggagctatggtaccgtctccggctcactacctcatcaccaaaaactggtttttcacccgaaccagtcaagggttgttcattactatctctacactcatcgctgaagttgctgtgccttacatccggcatagaaaacctcctgggaggaccaccaaaaacatcttggaaatcttcatcggaggagtttctgaaagatgttttaggtgaagaagacccagaataattgagtgaagacctccgtaaactgttagtatatcctaagagaatgctgctgttctctttttgggaaaacctttccatggttttagccaatgcccatcaacgaaaacaaatcgaaaaattcgaaaaacaaagaaaggcgggaactttttttcttaacagaagagatgaagaagaatggggatgattatggtttgtgggcattgaagttttcgatgtttgaggaagaataggttgaaaaagatgtgacagaggagggttaggggcccgtttgggaatcggagttgggagctttgaaaccacacaattcaagagctcatctggataagttacaaaatgccaaaaccacagcgaccaataatccaaatccaatcctattttttgcatgtacgtacgagtacgacaaaatcccaggacttgaagacccatctttgattccagtccagtccggaggcttacttggttggttggtctcttctcctctgttattaaacatttatatataagatcaaaattcaatctttaaagccttagtaagtgttgattttgatgatcttggattggatatatacacaagtttgaagttcaggtttgatactttgtcaatcttacaagcaatggactgcatgaattcttgtttaacctcacatagctatattacttgatcccattatttcacttgttttactactcaccaattagttcttccttcaatgtttgactttctttttatgttcaatatcagggaaatattatggttggtttgacaagttaaaaaaaaaggaacaagtgactcactgtccttagcaaataaatagaagcaaaaatataatgaaagactatagaatggagatggggaaggtggacaatgtacttcaacagctcctttatgcatttgaacaaccttcctaatgttaggagcaaacaagagaatgctaaggaacccaattatgtttctataagcatctatctcattcctaggatatgattttgtgtgtgtgtgtgtgtgtatattcctttatccagatgaatagtgaagagtaaagggccaagtagttgtttggacttggatggggtctagtaatgagctggttcattatatatgtttcacagttgtttttctttgttgcaaatcttatagcacaagtgggctctattgctgttttatctcttggtaatggttagatagatcacatgtataaatttctcaattacagctgaacttttatgtatgacttggaagacaaagccatgtgaacatcaaatgcttatgtttcgtgcacatatgtcaaagcttcccaaatgtcttaagaaccacttatttaaaagccttattagatatgtatgcagtccattccaacactccattcatctatataaggctacataaccacacacccaaatcatcaaatcctcacattctctactacacaatatttttgtaactctaatatttcttctaaagaaaaatcacaccaagtaagatcaacatggcatttggattaactggttttgttcagggtaagaaggctctccgaagatcactatcaggcattaaagaagcaactttgaagtcttcaagcattccaaaaggctactttgctgtctatgttggagaagatgagaagaagcgccatgtagtacctctttcgtacctaaatgaaccttcatttcaagacttgcttagtatggcagaagaagaattcggatatgagcatcccatgggcggactcacaattccttgcagagaagacatcttcattgatatcacttctcaattgaattgatgattgtaatttgtagcactgacatagaaattcacatataacaaatttgtagatcatatacaattttaccctttttcttggaaaagaaagggaatttttttgactagttgagaaactactaaatagaaattactggtcatttgattaacacttgttgtctccatggttgaattccattttttctttttctaatcaatatctttgtctttgccaatttcaaagctatctggcctttatttgagaataatttagttacgaacataacatttagtgaatcacaaacatcactttcacattgctcataaatataaatttacaacctagctttcatttcagtggtaattagtagatatacaactcaacctagcctttctcaaagctttcattcactattgatggatgtgatagtgtgatctctataggtgatgagttttatcacaaaggttaaggattggaaatatgttggtgtggaaatattggtaatgtagatatttcctcttctaaaaggacttgtattgatgaactgtccaaggcttaatgctggttctactaccaagaacacaacagttttgcctactgtccagtatttgaatcacaaaaagaaagtttctctgtttatggccttacaacaacttatttcccttacatccttggtttttggttttctgtagaaaaccgcggtgcttggcagaagaagggctgcctacttcgttttctcgtttatgaatagcaattcattttcttcactttttcttacacattttttcattgtaccaattgctattcattcaatgttatctgtatgtcaattgtttcatattattttgatcaagaaaaggaattgtaatttcttgtttcatatgagtgctaatccaagtgagtgttggtttgtgttttcatgttgagcccaatctcattttttagttcatagtaaagaagtttatttatgttataatggagtagtgaagttatactattttaccaatctcaaaaaactaaaatgagtattgctcaaagattctaaatactattttgcagatcaataagaaggacaaagattctacatcttaacataaagaaattaacacataaacaaaacaaatgattgaagaaaagctttagtattttcatttgtatcattcttaaggacattttcatttcagtccccaaggaaaaatatttacatggtaatggtattggcattctttggcatacaaaattgtaacaattaatcatttttgtcagagttagcatcaatctatactcctcatcatacat

SEQ ID NO: 294752 - DNA, 2054 bp, Cannabis indica
tatatatttattatgatgaaattatagctaataaaatgaccatgaaattggtaatgatgtatatggttatgctatgtaggttagtcttaggtggatatatgagcaaggggcaagtgttgtagtgaagagttacaacaaggaaagattgaaggagaatcttgacatatttgattgggaactaacagaggatgatctcaacaagattaatttgattcaacagaacagattcaatcgttgtgagggctttgtttcacctgaacatggtccgtacaaatcaattgaagaactctgggatggagagctttaatctgtttgtgtatgtgtgtatatttatgtatcaatttcctactttctttgtgtttgaataaatgtccatgactctgtttgacttcatattccaatttgctattatagcttgtcctaaaactattttgatattaattgatgaaattatggattccacataatttaaccatatactaaattccactaacaagtaactaaatattagtacctcttaagcattacataatttccttgattttaactgaaaaaaagttctatggtgagagagataattttttaattttatggttccaaatttcttgttttatttacagagtcctcagctataagaacgactaagctagcctatcattatcaaaaggataaataggatgtaggtaaataaatatgattggtttggtatatgggaactgtttttaaattttgaagtgattggtaagaatttgaaaatataacaattacttgtaaacaaaatgaaggttataattttcccatttagtctgacgttacaaagttactcttaaaaaattgtaatcgtcgttaaagttaacacatggaacccaaatgtgtcttagtgggaatgcatcattggagtggaaattgaaagggacaggaagaaaggtgttctgttcttacaccagaagacttcaaattgagtacttctaagaaagagaaagaattaaggtgtggtgtgattgaaaggaatggaattataagaataacaatgggaatagaaatatgaatagaatgaaataaaattttaaatgtataaaaaatattgataaaaaaattatcaaatttttgctcatgttaaactggaatggactttcttctattttaaaatgaaatagtcattccaccaaaatggtaaaaagagcattctatgggaacgatattccaatactttaaaatgcaaccgaacaaagaaatgaaataaaaattgtttcttttctattctattccatttcattacctccaaccaaacgccacctaaaagaattgaacacagttccttatgctagtgcaggatgctcaaacaatgcatgcaaatggtttgtataagaccggacattgcatatgcacttagcatatttagcaaattcttagtgaattcaggcaaagagcattggcaagttttgaaatggattctcatatatttgacggataccattgataaaagattggtgtttggaataaacaaagttacaaatgacaacaacagtcaatagctatgtggattcagactatgcagggtgtttggataccagaaaatccttaacaggatatgtgctcaccatgtatggaacaaccataaatttgaaagccaacttacaaaaggtagtggccctgtcaaccactgaattggagtacatggcacaaacaaggttgttaaagaagctctatggcttgctcctttagttgaagaattgaagctaaagttgaaaggaatatctatgcactgtgataatcaaagtgtaattcaactgtctaagaacctagtgaaccatgagaggaccaagcatatgatatcagactccacttcatcagagaagttgctgaaaagggagttgtgatgataaagaaaatccctactgaacacaacccaactgacatgatccccaaggtagtttctagcagcaaatttgagcattgcttggagctaacttgagttttgtgggttaaagccctagagactaggggtgttcataaaataatcgatccaatccaatccaatccgcacgatccaa

SEQ ID NO: 294753 - DNA, 4355 bp, Cannabis indica
tttttttaaaaaaaaaaatgcaagttggcaccgttgctagttattgagtctacaaccaaagtctcacattgactagaaatagaacagatcataacaatatctctattagttgaggctttttgggaagatgcttaagaacaaaactataatggtttaaacccaaagcgaacaatatcatacgaagagtagagatggatggtgtacatcgtcctaacaagtggtatcagagtcagatcctaaaattggccatgtgaatgaatcctcggaataccaaacaaaatagatgaccatcagtaatctcacgacgagattcgtggatgtgctcttgtagacaggttgtgtgctctagaggagttggcttgagaaaagagcaagaactcttgaggtagagtggatggatgaaagatcgtttcagaggagccaaagttgtcctttgtttgaggggaggattgttgagtgtgcaaccaaagtcccacattggttaaaaataaaaagatcgtgggtatataaggatggataatatctctattggttgagaccttttgggaatgcgcctaagaataaaactgtgagggcttaagccaaagtggacaatatcatactaaaagtagagatggatggtgtacgatgtcctaacactggcaatactaataatgtcctaattatctcataaaattgaactttatctcatctaccacctcatcattatttgattctacatcacacaagcaacctactagaatattttcaagtgatgtccttatgccaaacatttcttgtagcatcatgcattggtgatgcacataaatatacttaatttatagcacattaatctaacacattttagtactaagtatttttaattaactttgatcaagtatattatagatttattgacactgaaaaatggccaacaaaaatactatttaataagcgatagttattgagaagagcataaaggaaaaatgaacaccatatttttatcgtaatttactccttgatttcattggtaataggatttgagcttttattgatcaaaagacacttagagcacaattcaatctaatgtttttagtcaagagtattaaaaatctgacttagagcacaaatctaaagtcaaaaagaatgcctgagaactgaaatttttagagagagaaactctaaatagaacgaatgtgtatttaaaaaatgaactgaatcagcctcctatttataggagaggttgcaatctaagtttatttctttctagttgatttgagatcatttaatgatgccacactatctttggatggttgagattttccatctagtttcgaatggtgaccattgattttgagatcaaatgaggtccgttgatcaaatttaggtgctctgataccctaaatttgtacttcagattgcaatttattcttgataagaaagagtctaaattttgatacaaacatttgacactcatcaaaaggtcttttcaataaatttggaattgtattaattcgagttatgtcgagtgagatatgatcaaaacactgcacggtatgtagttgccttggtaatcacaaccagataaacacactcagcgaacaaataagctttttggttcacttgggcccaaattatacataattactcattctttgcatattttagattgctaaagtgatatgggaaattatgaaggtaaatacttggttttttcttctttttttagagagtgtacagagatcactcgggtggtgcctaatgcaccacctggatgcatgctcatctcgaccccccctagttagggccatgtacaattattgttttgtgtgtgttgttttaataatttttttgtattaatttaaactttacaaaacatataacataattacaaaaatattcaaaattatttcccaaaacatacaccaagtacataaaattcataagtatctctaacgacatccaaactaagcttgtgttgtcccaaagattgaacctccaggtctaaccgtctggacaggcacgaccttaggcaaaggcgggctaggcctgtgcctaaggcccacctagactaggggtccaaaaaagtttttttccccttataaaagtacacatttttttcactgattatattaaataccatattttattctaaataagggcccaattttttttttctatggcccactatatttcaggatcgtccctgcatttggatatgtacaatattcacccaagctccacactcactgctattcattctgagcgttacctttatctacacatagaaacataactgtgagtcgacatacttagtaagaaaagcatacagcatacaatatatatatgacatgtaattaggcacccatacacctaattcccttttatgccatttgtcaccttaggatgtttttgttttatttttttttaaaaaaaattaataaaatttgatttgaactgtgcttgtcacgtttgtggcagttttttttttttatatttttttaataacaaataaattaagaaaaaaaaaagtgatgaattactgtctttacccccatatcttcttttcatttttttttctttagtttttaaaaaatttagccacttttatgtgtagattgcggttgtatgttggttttagttagttattgatcaattatttatttctcaaaaactattttcactctaatttctcccggaccattgttgcttttagttctataaatatttatcttattttatttccatggttgtaaacccgttctaattcttcctctccagtagttaaaaaagtccaaaaaaaaaatcccaaacaaacttacctcgattacctacggggagaaagaatactaaagagaatcacctagtcctacatcttcggttgcttttaaatggaagtcagttgttgaatcttcttccacgaggaagtctaaaagacctcgacatattttggaagattctaattattatttcgagcttgaagatgagtttttagaaatacctaatgttcccaaggtaagtcatttgtttttgagtttttttagggtatttgtatcatatttgataagttgtatatatatataattatgtttgagtttattaatgaacactgtttagtgtgttatttatatttttatgtgtatgtgtatgcgtttggtacttttaaatgatttttgtatttttaacaattgtcttggtgttttttcggtttgatttgttttcttgtagggcaagggtaaatttcttgttgttaatattcctcctgatattattttagaggagcttcctggtaaaatggttgttgaggtatgtgatttttttttttagtggttatatttgctatattttttgtttgttttaacaaattttgcacgttgttttcctataggattggtcttgtaagtataggcgttcttagaactatcattcaaaagttatcacttttgggtattttgaaattatcaaagatatcaaacacattttaaccccaacccaacttgacatgtttcccaagacaatattcggtcattttctctgtttacccaagtacactattcacttcgaactcatacatggtttgttcttgagggaggcttaacaactaaataagttggagttttgggttctgcggcaggaatttgcttagatttagtgttgagaagtttacttattagtaactattctagatttccatgtggagtctgatattttttagtacaagcatgataaaaacatgcttgttgaacattgtttaaagggcaagaaaaaaaatttcaagacttctatccaagtttcctttacggctaacaattatagggacaatgatgatctagcagtcaagttggctgtattatattttgttcagtgttatttgatgggtggtcctcctggtaaggtttgttttgattgaggagcttgacatggtggacatgggttgttacaatgagtatgggtggggtaaggagtgttttgagatgataattgaatcgtttaagggtaagatagatacaggtattataaaggttaagaagaaggaaaatgatggtgggtttttataggtttttgggttttctgcttgcattgtaaatttgatttgtttgagtgttatccatatgttgtttggaaacttttgaggtattcaaattttgtcattctgaggcttcttgactggcctaaaatgacaaagctgaaagtatcgcagttgaaaatagataacgtcaacaacatcatatttaatcggccattgaaagaggtatttgtgtgttgtcttacttttgttttattattgttttagtgttattgttgcagatgttatttagttatttgtttgtatttttagtttattcagtttcaaccttttgtttttattttatttt

SEQ ID NO: 294754 - DNA, 2755 bp, Cannabis indica
tttttttttttttgactttagagttctaaatatgtataatttaaaaatatgaagtatcaattaagtattattaaaaacacagggtatcaaatatttttttttcatgaaaatacaaagtactcattcccttacttatacttagtgatatgtaattggtattaggtattattttagaataaatttgaatgaagtaattatttttgttttattatctctaacccagtaaattttttttagagatgtttataaaataaccaatttgtaaaatgcagattgtattggattaaaaaatttaaaatttgtacttgtgcagattgaatgataattggcatgtaaaagtaaccgatccaatccaatccacacatatttaaaaaattatatataaaattactattttaatgtaaaaaaatagtaattttaaaatttaatacatattatacaaatatattttagagcttaatagatcaaatattgtatattctattcttatatatggtattttcttaaatataattcaaataaaattaaatatttctttttacatacaattttttccttttaaatttgttatttattattttatttattttaatttataattggagacataaaataacaataatttattttattttattgttagttatgtgaaagaaatatattttttaataaatattaaataatttaatatgaaaaagtaactattccaaaatagtcaatccaattcgtacttttactaattggatcggattcaaaatataaaacccagacttaatgtagatcagatgcactatgagtattagagtctcgttaagagtttattatggttagattggttattctgttagagttagttgtggttaggttagtgattctattattcctttttaattaagctgagctagatgtaacgaaccccttggttcttaagccttgtataaatactctgctatttaataataattaaacttttaatttctaatatggtatcaattgcataaattttttaccatttttttcatggctagaacaagagctactggattaagaactctggccaaactccaatgccgcacaactcatccactataccagatgctccttcataaattcctctgacttctgctaccacatgagacattcccactcaataaatcatcgctccaacttgccctgctcatgaatatagtccttacttcttgaactctgatgataaccttgatttaaccttagttacaccaccgttgtcggacaagaacttccaaccatggcgatgagattttgagctttcagtaggtgcaagaaacaaaatcgtcttcctcaaaggtactctgccataaccctcagttgatgatcctttacataatcattagctctgctataatcaaatggtgatttcatcgatcctccactctatgacacttgaaatcaaaagcaacatcatgttcttagatacggctgctgaaatgtggaaagaactcaattcaagataagatcaagggaatgatcctcacatctttgaactcagagaagcttttatcactctacatcaaggctatgattttgtaagtgcttacttcactaaactcaaatgtatgtgggatggaattcaaaaacttcaactttgcatcccctatacttgtgatgcttctcttgataatctcgctttcttgaatcaagaataagtattgcaattcctaacgggattaaatgaatctttctttcctgttgtatacaaaatattattaattgacccttttccatccctgtccaaagtattttctatggtcatccatgaagaaagacaaagaaaacttaaaagtcctcagatcccttcccttcttcctttggtccaagattcatcccaactctcacctctttctcaaactccatcagcatcatcagccaccaatgcgaaccaatgacacaacaagaagatgaggccttattgctctaattttcacaaacctgtccatctcaaagaaagtgcttctttctgattgaatttccaccagggtatagagataaaaggaaaactaaaaatcaaccttctacaaatcaaacatctacttccattgatcatcttttcctttgggctaacttgactaaccacaagggcatttagactctaatttcactcctaagtcagaaaatatagccaacaacatccacttcagatgcatctcaaccctttgcattaaacatctctggtaaactcaaaccttctccacaatttttatggatagtagacagtggtgctactcaccacatatgctgtgatatttttcatttctctcgattacatgatatttttattgctacttcattaattctataatgttatgaacattaaaattaataagtcaggtgacataaagttatcacataatctacacttaatgtcctatatgttattgatattaaattcaatttattcagtgtccccacttttcttcaaatattaaccaacaatatatttttcagcaatacttgttgcattctttaggattcacataacaaagggattgggattgctagaagagttggtcacctctatttcttattgcaagattccaattcctctcattttttttgttcataatacacaaacttgtaaaacatcacgtatcaaaattcattctttggacacactgtaacgtccccgcttcaagcctccattgggtccttacacccacggaatgaatggctcttatacacgagtacgtcactctggctgcttcatggactgatgact

SEQ ID NO: 294755 - DNA, 2394 bp, Cannabis indica
aaaatctccgaaattgagaaattataactctaatgctcatttctagtacccacaattaattaaattcataaataattataaaaaatatcaaaaattagtgctaattgccttttctaatccaattactaatgcggtcattacagtttccatcgctctgactgttttagctagaccgttaccaaaaaataacttttccatattgcatttgaataatattgacaagaaaatctttatcacctttcatatacctagaacaacaactataaaaatatcaaatttgaaaagcaatagttttaaagtaagaagaaccgacgaaacatttattttttgacaacccattttcatttttgagagacatgtttagtttgaaatactttaaaatttataaaatatttataattaaacatgttttgcaaggtaaaatatttaagtcgaatgtgatcttttattcttaaaaaaacaagaaagaatggatcaattccttttcttttagaattgtcaaacttaagtgagtacttttttttttctataaaaacaaatctgttagctgtggatctagaaccctgggaagtagagtctaaacatctagaaaaataaatttttagtagcaggccattgatcttcaatgactatggcttcgcagtcgcaggcgattgatcttcgatgcttgtggtggctgggtttaggtagtcggtggctttgaaatagaatcggagagatggagagggagtacaaatatcgtgtagagagaaagagagaaaaattttagttagagagaggaatgaggaaaaatgaataagagaggtatttttgaaataataataaagattaacatattttaattattttgtgaaaataatgatttaaaaaaaaatagtaagtcacactaagcataattctaaaatttctcatgtgccaacaacttttattttactattatcgtcattgattagaccattattaattatttttccctttattattataataattattattaatatatagtaacgtgaatgtatgctattatgcttaatttctcataatatatatcaaattgtaagcatgcgattatatatatataatcatcacttaatgagacataattagtaagttataagggtaaactattaattagtgcttttaagcatatctataatcgataaggaacaataatatctaaacgtgacgattgtaaaaaagtaattactagataagaactttgaaaaaaaaaatactaattaaagagctaataagaatttaggcacttgcaaccattatataatcgtttatgttaaaataatcttttgcattaaataaattaaaaaaggtcaaattttgtaagcatataaaaatcactaaaatgagatcataatcaatattaatagaacctttatattaaaaccacacctccaccacttacgatgggaatttataattcataaagcaaaggttcccaaattcaaaaaggcagaaccactttccattttataaactttttttttttttcttattaaagctttgttgagtgaatttataccacaattcatataatgatggaagtataagactatatatatagttgctataaaaaaatagttgtattaagtattaacggcataattagataaagaatttatgataattaattcgaatcatgactaagtataagtataatatttacagaattaaaataagagacatatacaacactttagcaattaattatagaaaattaatgatgtatatgtcccatatgtatatgttatgatatgaattataataattattgttttgaccaaaaataaggtagcctttttgatcaagtttttagttaaaagtattttttagtgggttttttttcttctattttataatacatgcctcttctacatgagatttttcttttttagtatggtacgtactttgtatacatggttgtggtgtccatctttcaatgtatgtaggcgacacacgtcctcaattaccttttagtacttgcgattgacactcgtccttgctagctgctttcaattattttaaggtcaatattttctctcttttaaatcctgtaatttctctctaagctttattttatcttagttaacttagtttcattttgtgttgagtttatagtgcaatttgttctgtccaatatttttattacttttttttggtttactttgttttatatatatctcgatatggcactgttcttaatttatcttggtattgatctgtttgcgacttttcttgatttgaagtcgtgcttcgcctaccttagcaagaagttgtccttggcctatctcagtatgaagtcgtgtttggcttacctcagcatgggaccgtccttgtaaagcccgcttagttaatttggaaattagcagttgttta

SEQ ID NO: 294756 - DNA, 3186 bp, Cannabis indica
cttgaagaagcactaaaatcatcaagaatagatttgctaatttgagtgggttgagcatctcctttgcaaaagataataagatcaactgcaaaacaaagggagattatcctaaggcttctacacatgtagtgatagctgaacttgctgttaaagctgcaagatgaagtcttctggtgagatactccataactagtacaacaagagaggtgaaattgggtctccttggtgaagacctttctttcccaaaaactttccttgaatcgtgccattaatcatcaaaagttagtttgtgcttctcaaacagttcatgatccagccaatgtacttagataaaaaaaacaaagagctaccaggatgtcttccaagaacccccaatcaaaggtatcataaaccttactcaagtcaactttaatagcacaccgagaggtaatagaattccttcaatagtttttgataagatcctgaaggattattatattttgagctatggaacgaccttttgatgaaagccccttgactttggtcaacaagccactacaacacagtagccaaccgcatgcataaaaatttagagatacccttataaatggtggtataataggccattggatgatggtctatcacacgagaaggacaatctatttttggcactaaagaaattatagtttcatgaagactagtaggagacttaccattctcaaagaattgcaacacaactgtgcatatttcccctccaatttctggccataacttcctgtagaaacttgaaccatggccatgtcgacccagagacttagtgtttgggatgctgaaaacagttttctttatttcttttctggtgaagggatttaatagcccaacttgctggtctagagaaagctttctccccctgtccatacactcccggttaatcaaagaccgtgcagtactcaaactccccataaacccttaaagtactctaaaaaatggtccaccacctcagggaaatgatccacctgctttccttccgtattaacaaaggaaacaattctattatttgttttcctcttcttaagaaatgcatgaaaataggcattattatcatcaccttttcttagccaagtaattttactacgttgtctaacgaagctatgatacattttaccttgagtttcaaaagcctcagctacccttttttcagcttcttaaaaagaaaattcccaggatttacttgagcatcgaataaagcctcacggtatgtctcatttgccaaagaataagattttccaatatcaccaacaatctctattgaatctaatcagactgatttcaagcctcatcatttttagaaaaacactatgtaaccccatgcttgcacaaggcttcccccaactatccatgacaacattcttgaactcattatgctcagaccaaaagttgtagtatcggaatggtttgtagtcaatattttcaagttttccattagacaccaaacacgaacaatgatcagatagggcatcccatttaaatagagcaacagagttaggaaaaatatcaacacattcttcattagcaaacacatgatctttcttcaagtaaattcgctttcttccttcatgtttattggtctaggtataagttgaacctgaacttatcaaagcatctattaactgaagagataatcagttattggagtctaagatctctctaggggaaacaaatttcccaccttctctatcatcaacatgaaagacaaaattgaaatcaccaagcataagccatgacttagctggtaatgtcagactagcaagatcatgccacattattttcctttcttctattgtattcagcccataaacaaatgtgatactaatagcagtagaaaaacctgccacattgacataatagtgaacaagttgatttgtatccttggttacaataacatgagcaaatgtactcctccacataacaagaattctacattatgtaaccgagctggaatagtagtcccaattttgaaacttcttctccagcatatcttttattttgttccacttcaacctagtctccaaaactgcccaacaccaacattattcagattacaaaaattttaaacatcaacctatttattcaaattatttaaccctctaacattccaacttaaaatattgcaacaatccattaacatgtatgtaaagagctagtatctaattttgcaccttccatccattcttcagtatctgcttccaaccatcctgcctgaatatcaaggatgtcaaacgaattttgattgtccttatccacttgaagctcatagcctcctacttctctctgtttgtgtgttattttctttaggataatctatttatccttcacttcttttttgttcagaacaacaaccggggctaccgatttatccactaacttcattgcctgctgcacgatagcagtaggggcttccttttcttcaatagtccctgtagctgccttattactttgttccagcttcttactatcttgactcttctcgactttctgacaatccaccattagttggccataacctgaacatgatttacatttgacggggaaccactcatagttaactgcttgctcgaccagttttccatactcatttaaaaactcaataaaccgaggaggattatcaactatgtcaatctctacaagaactcttgcaataactcactcaattataataaaaattaaatctttaagaactaaaaagcaaaacaagaatacctaataaaaaattataaacccataaattattaacaaaacaagaaagacattattaacaaaaaaaaaacctaagaaaaaatggtagtttttaacctataaattgcaaacatcatgaaatcattcaaatgcaaaagagtttaaaataaataaaaaaataatatatataccttactcgattataggctatcgttgatggagctgtaatgggtaaagagtttgaggaaaaaggccagggttttgatcaggaagcagggttgaaatggggtaggtgggatatcaatgctcgctatatgaaaatgggataaaaggatttcacacgaaaacccttttatctacgttcttaactaaaaaccggaataaaatagttttaataaaacactgaggcacgtttagttatcccataaaaattgagtgttgaactcattttttacttttgatatttttttt

SEQ ID NO: 294757 - DNA, 1160 bp, Cannabis indica
agaatataatttagtacatgttaaaatttatttaagataaaattgatcatttacatctaaaattcttgttattatattgtagcatttaagttaagcaattttttatttttcattcttgttattattttatacttctaccactgacaaatttatttttttcaataaaggggcacgattcgcggattcggggataaaatttcttttctatcatttttttctaaaaagtgggtaaattattatttaaggaaagtcattatttttcactgacagtaatagtttcaaaaggaatcgtgcaatattacaaaaatttgggcaatagtttaaattataggagaataattttttggggggccaaaattcaaatgtcaaaatacctatttattatgaaaaataaaaatacttagaacttaaaaggctatacaatatcaaaaaacatgattttaacagtcaatatcccattattgaatttgtaattactacccgcttggaaaaactccaggagtgttggcacttcgcacgttcaaacttgaaagtaaaacataaaatgtcaacctaacctcttataattttgaattttaagcaaagtatatatatatatatacactatcattacatataagtacatataatcatgattctttaatagattagatttaagactgggattgtgttcaaattttgagttttgaacctcaacacatttaactttaactatacattttaaaggtcacaaaagaaaacaaacagttttaattaatattagttttttactttcttcttttggaaaacaaacatagagtcactcaagtaggggtgtgcataaatcgatctaatccaatgtgaactgaccgatccaattacaaccgaccgccaaacattggatatctaattgtgttcggatcggattgaatgttatttttaaatatccaattagatcgaatcgaatgatggatgtggtgtctaaaaatctaatacatccaatcaaactaattagtattttcatttagtttggatgagtaattagattttatactgttatacgtcaaatctatatgtatatatgaaaattaacattaaagttttactctttttttcttggattggatggatccagtccgatccaatacatactgagatctaaaatattggatggatccaat

SEQ ID NO: 294758 - DNA, 2036 bp, Cannabis indica
atgaataaaaataaaggtgagtatagaaatattatcaatcgtcaaattaataaagttaaaagataacagataagaccgcaaagggaagcttcctccatcttcttgataattaattgattgcagtttagatatattctgtagtttacttttttttttttcaatagaaaatcaatttaattaacccttaatctcgattatcaaacaatataataattcagaaaatgaatatccaatacaaaataataattttagcaaaattttgaaccactacattaattaatcgccttacaaacaagagagaaacatttctaaacatacttattgaatttttaaatagttattgacggagaaacacaaaaaaaaaaagactaattatattgtgaatgaaccgtgttaatttgaaaaagaaaattgttaaaaagtaatattagtaacatcttactcggtatcatactgttatttgtataaaattaaatatcaggtctcatgttatttaagaaaattatttgtaaaaaatattatttactaattgtaagacgacacctataaaaatattagtattcaataacaatactctttgaaaaaagacatatgtgcctatgacatttttcaaagttcgcccaaattaagtgtattctcaaactctcaatatataaagtgttttttttttttcaaagtgaataatgatctttgtataagatattaccacacattgcatgtgtaattttagtgtaacatatataatatcttattatattatgtggtactatatataattataaatgtcttccactaatactataatgtggtataactatatattaatattttacacgagggttttaccaaatcacaaacaataattaggaaaaatagaaatgaacagtgagaaactagaaataattaaagcagtaaaataataaaaataaacactaagatatatattggttcaagtctgatagatcaatgaatctatgactctactctaattttaaaataccaccaaatcttctttattgatttaagaacatgtacattacagtcgagatcgattctctaataagttttctcaaagtgtttcaattctcaccctcttatccaaatattttcatcatctataaaagacttcttatacaatccaatctctcttttctctgtacctctctctttacctctcaatcttttctctctatttttcattcttaatctaatcgtcttcttgaaataataagtgtgggtggttatatataagcttacgatcaaaatcctaaagtccgtagctggaagaattgaggttgttaagttagttaggaaataagtaacttaaccaactctcctatgagagaggcctccctgtcagcctaagtaagagtgcatccgggagcgagtatgagagcttctggagtcacagttcaaggcactcgctgaaggtccttccaggataggaacgagccagctggagttaactatccgggactatcttccaggaggaacagctagccacctggaattccttttcggaggagtactagctttcctgaagatacacccagagtagacatgatagtcattcgggaacaacctttcaggaggacaactatcattccgcgagatttcttccaggagaccaagaaagttgtccgagaatcaacttttgaaaaacaggtaactttccaaaaataactttttgagatttttatatttaaataaactataccacaacaacaataatcaattcccatccacacactatcataattgataacttacacttctctcaactacctaggggtgttcataaaatagctgatccaatccaatccgcacgatccgatccaatccaattcgcaaagtgcggatatccgcacttgtgcggatttgattggattgaaaattcaaaatccgcacttgtgcggattggatgttgatcgacatgtaaaagtaatcgatccaatccaatccacacatatttataacaaaattaaaaaaattatatatacaaataacattacgaaaaatagtaatttaaaagtcta

SEQ ID NO: 294759 - DNA, 4528 bp, Cannabis indica
cgtccaaatattaatgtcacggtacgtgtcacttaaagaaacatgacacgtcatccaaacaagatttgggataacacaaaatattttttcaaaaaatattcaaaaataatattgactcgtgaagtatataaatttaattataaaactatgtaaaaaactatgtattttacatatatttatttattaattataagtatttattttttatttacaaaactttatttattgttaatgaaaatctagctgaacaagctcattaactatagattacatactatatagctgaaacaataaaaaaaaaaaaaaaattaaatctttactttaatataatataataattttagtttttttttttaaaattaaaaatgtttattgaaatataaatttgacctcacaatcgttacaaaatatacgtgctgaaatgaataatacattcgaactatctaccagtaaaagtccactaatcacatttataaatagcaaaattacaagattctaagaaaacatgaaaatacacaaccaacaaaataaatgaaaagcctataacaaaatgaaaaataattctcaatcactcgacaaaagaaaattgatcactatcctaaacttactttccataatgataaatttgtaaccttacagctttgccatatcaaacgccaaacaaataccgtctcgcctcgccgcacaaaacatccaaaaaaaaaatccaaattagccgtacttactagcccagcgccaagcatcatgttgcggtctagcaacaattgaagttaaatattaaaaaattgtttccacataattattggtttttttctttctttcatttaaacagtacagctcatttggccactgagctctcccttccatactaacaaaagatttcccttatgtagtttacattacaataaacccaccatttgcttcatcctcaaaattcgaccgttggagttggacagtcaaaccaccacagagtagaaagaaacttgagaagacaacaaaaagtttgagacttgagagaatgctttctcaaatgtctcgtctaagccctcaaaccccactcaatgttcctccccgttctaactatgaacactctcaaacccagaaaaatgataccatttcagactacgagcagaccagagaagaaagaatcaaacaaaaccttcagaagatgcaaaagcttggcatatttgacctctctctcaaagtcaactccaacattcatcaaactcgtgctcctaaaaaccattcccgtctcaaaagctctcctgccactcccccttcgcgaccttctggacctagtaggcgctcttccaggtacttcttttctttaataatgtgtttatttgtcttggtcaaaaagtggaagttgataggttttgagggtttttcctaataaatcttgatggggtttctccaagtttgtgctttagtctggtttaggttgatttgcatgaatggggattgagtttcgtcacaaatcttagacgttcttttattattttatttttattaatatggaccaggagcatgaatcatgatccaaggttgtatttttagtcttgttcaggttgattattcatgaatggggattgagtttcatcacaaatcttagatgtattattattactatgtttttgtttttcattgtcaaaaaatggaaggtgataagttttgagggttttttcctaataaatcttgatgagttttctccaactttgtgtgtttagtccggtttaggttgatttgcatggatgtggatagagtttcatcataaaccttagatgttttatttttattatggaccaggagcatgaatcatggttcaagattgtatttttagtgtggttcaggttgattattcatgaatggggattgagttttaatcacaaatcttaaatttattagtaaaactattatttggaccagtagcatgaatcatgatccccaagtttgtatttttagtctgtttcaggttgatttgttctgtagaaagtaagtttttatattgtaaattttttgttgatgggtttaggttgaagagtactacgccagtgaattactcagagttggatttaaccaagaaggacaaggcattggaagatggatgtatcttgacagagaagggttttcggcctgagatttatactgaagagcatgaaaagcttttgggtcacacagagaagagctggacactttttgtggatggttgtgggaaggatggaaagagaatctatgatcaatttaatggaaaaacttgccatcaatgcaggtcagattgttgtctggttgagatctgaatctgaatcttgaatatgtgtataaaaaattggtttcctttgcaggcaatattttagttaccaatacaaagtaaagagggaataatgccacttatgaaatccttttcatgaccatgcaagtgtgaggacatgcctaataggatagagaaaaagaaatgaactaataagatctttgaaaagaagctatagaatagaatcataatgcattgagaactagtgaatagagaattctataagagaactatgcctggactccttctcatgactatgctcttatgggtatattgttgtttaaagaaatctaaaagctactcactaatcatttatgaaactatgatgttactttatgattaagagataaagaagcttagttttgtctcagtaatgcccatacttcctgcctggtgccatgtatttgatcaattaagtttgcaattctttcttaaaagaattctatatggattcattattctggtttggctttaaattatgctgagtttgcactgtatctttcaggcagaaaactcttggtcaccgtactcattgcagcgaatgcaacaaggtacaaggacagttctgcggcgattgtttgtacatgaggtatagtactgtattttctaacaactagtcataaataacagtgtcatactgctttagcggtgttttatataacatctattttttttaatgtaaagatatggggagcatgtacttgaagctaaagagaacccagattgggtttgtccagtttgtcgtgggatttgcaactgcagtttgtgccggcaggcaaaggggtggcctccaacgggcactctctacaggaaggttaatgttcaaatttgcctttgttgtcttctttcttttgtgtcttctggtgtcaaatgatactaagtttatttgatcaactttttcagatatcacaattgggctacaaatcggttgcacactacctcattcaaacctgtcgtgtagaggcaaacctaggaaacaatgaaggtgctagcactgaagttcccgcaaaaagatcactacccttctcagacatgaatgaagtcccaaatgaagttaacaatgatcaactagtgtcttcaaaacaattcaatgataaaagtaatgatgagttttctgtgaaacgatcattgcccttttcgaatttggacatggcctcagacagtgtgagttctctggaggacgcggaccagattggatgttcaaaccatcaatatccaatcaaaagagaggtctatagtgacactgatttgaaaagtagctctaaactacagaaggaggagcctgcccaggacttggctgtggcagaggagaaagttatgactgtagaaaaaatatcattggaaaaggaagttgatcaagaaaatgatgttgaattcacttgtgataaacatgatgatcccgagaaaacactgctggtgaggactccattggcgaaggagatttctcctttcactagaattaactcggacagtattgctggaagattaaagcggaggcaggagaaaagctgtgattgtgatgatgagaaaaaagcaaatgtcatgcagactgtagaaggcatttctctaccatctgatatcatcaaacaagctggtgatagcaatgctccactggagacaagtcgaaaacttaaggctaagcgtgctgtagctgttgaaccaagcccagacagtatagctggaaggctgaggcagcgacgtcggatggataatggcatctcatgttgatcattatagattgaaggctaggcacagttcaaactgaatatagatttctggctagtgtgagtgacaggttgtctaatgtttgaaagaaaccccattttgtaattttgagagtggtttctaaatgctgaattttgtctcatatgtcctctttatggtgaaagtaatggtgaagtttaatgatattgaaacttttattgatattgtctttttgttcatttgagctaggaagactggtttcacttttagagtatatatatttaaaacaagccaacttacttggatttagcttttttctgtgtaccattttcaaattgatatgaatatgaattatgggttatattttattaacaaaattatacgaagtttttataatatcttgaatttagcccacttgataatataattgaaatatgtcatattttatgcctttagttggggtaataattgaattgaatgaaaatgaattattagttttttttttttgtaagaatt

SEQ ID NO: 294760 - DNA, 1606 bp, Cannabis indica
agcgtgtatttggaagccatttgtagttttccgtttgttgttacgtgcagaataatgaaattactttcattagatctctggtagagaataaatatcatgctaaaataagaaactacataattaaagataaaattattaatatcgcattaattatggacacggtatgaatagctatgaccgcaatcaacataccatagacagtcaatatcccatggactaggcttcactagcccaaaatgatgcattattgtaaaatctccattagttggaaagggtatctaaatttgatctctactactctataaatacgtattgaataattcacgcaaaggattggaatttcttaactcgtaagcttgagaagagagtagagtgttcatattcattgtgatcctttatgttatttctagcctatctcataataatacagactcgttgactaaggctcattaacgccccaaccacataaaactccgagtgttctcttcctatttcattcttttaaacgtattttctttagctctaatattaaataattcattttcaaaaatttcggtaaatatttttgtgctttcattgagagctaacaaaaacagtgataccatccacgattactattagtaattatggtactcacccaaactcaatctggtattatactgaccctaagaagggtgacgatggtcccaatgctaagatgtgagatgcaaaagatccaactgaggcgatcaatttccataaaaagggtaaaactagcaacaaacttaatcctagagatcctatggctgaagacgatgaatccgacgagaataactctgatgatcttgaagatgatcatcaagacacacgtgaggaagataatcaagatgcgcgtgaggacaatcatcaagatatgcctgtgggtgataacattgaaaatgagggtaatttcgatgaatcagattctacattcatggtcaggaagctaaaaatagatgaggataaattatcgttggaagagcaattctcattgttgatgcacgagaaaaggcaagaatggaggccataatcaaggcattgacggcagcaagtagaaccaataaaatggctccaaaagacaacactgctagctagaatgattgatcccaaaactcaaagaacttatgatcctcacaaagacaaatagaaaggaaaagtaggtgaaactttcaagaaggctgcccaaaatgaacagcaaaagaaatcaaaatctgtaagccaatctcaaaagaaaaaaataggaactcatgcttcaaagcaaggtgaccaaactaattctagaggtagagatacacagtttgataagactaatgctaaagccaagaagccttttactcggaagggtaaaaatcattgtgataattctattagtcgaagtgatgatgctaaagaagtgcatcagtcatcacatgaaaaaagtggaagtctttccacaaattttctgtaaacaaggttcaattatgatcaatggtatgtctaacttctctaaggagtctcttctagagtaccgttttcatcacgattatcattttaaattatcaatactttatggcattaaggtacctccatgagtacctctagatttaac

SEQ ID NO: 294761 - DNA, 4799 bp, Cannabis indica
tattattattagtattagttagtatcattatgatttgaagaaatgccctaccttgcttatacaatacaattattttatcctttaattttctccatttttttttggtatggaaatttttctaccaatttgaattagaatggacaaataattgctccttccaaatcgaagaatttatttctttcttcaaataataataataattattattataattcaaagaaagaaagggattcttaatggttaattagtaaatcccatatttactattgaccggaaaatagaatgagttagtaacaattcattttttttttctttagaaaatttatttattttccatttatgaaaactttccattcaaattctttggttaattatgcaaaaacactgccttaaattgctccaagaaagtgttacaaatacaaacttagctcattaataaattcaatttccaacccaaatattggtcattaatgtgaaattctttttttatgttttccttttttaaatttcttaaaaaaacacacacaaaaaagaaaaaacgttgacatatgtacttcaccggctttgtctgtctgtttgtctctctgctcctaaaaaaaaaattaaacggcgttaagacgacgttaagtcgcatgtgagtggggtccatagaactctccctctctcatccttagagagagaaagagaagagtttttgtcctttacagactgtagttactcagcttcaccaaccaacactgtccacctgacagaaccgccatttttaacggattttctctttccctttctggttttggttcattcttctatcacccccccaaaaaaaaaaccctaactctcattttctctctctcaatctagggtttcgagaacgattcttcttcgtcttcatcgcgcggtagctgagtcgggtgagtgagactgactcggggttactacggcgtactaattttttttccttcaatgaatcattagggttttaccgcgacacccaatgaatttctttcccgctctttactcttactttctctctctacttttggtatcggtctcttgcgtctccgactctgagctccgatccttgctcgagttcaaaaaaggggtacggattgacccgcttcggaaggttcttgacacatggaactaccccacgctcgagagtttttccgactgccctccctggaccggcgttacctgcgacgagaacggcaatgtcactgctgtagtcctcgaagggcttggcctcggcggtgagttgaagttccacactctgattgggcttgggaagcttaagaatcttagtctcgctggaaatggattcacgggtcgggttgaaccaacattgggtacaatgacttcattgcagcatttggatctatctgggaatggcttctatggtccgatcccagagcggatcagtgggttgtgggatttgaagcatcttaatctctcggcaaacaaattcaaaggtgggtttcctcgtggatttaataatctccagcagttgaaagtgttggatttgcattcgaaccagttatgggggagcattggtgatttagtacaagagcttcgcaatttagagtacgttgatttgagtgtgaacgagttttttgggtcgatttctcttcctctggaaaatatttcgagtttagcgaacactgttcatcatttgaacttgagtcataataagttaaatggtggcttctttaagggtgatgcaatagcgttgttccgcaatttggaagttctggacttgggttataatcagatcaatggagagcttccttcatttgggtctctgccaagtttgcgggtcttgcgtctagggaacaatcagttgttcggatcaattccagaggagttgtttgagacttctattccgattgtagaactggatctaagtaacaatggatttacaggttaagaattgaccttctattattaaatgcaggatttgctaacttttgaaaataatcaccttttcaaaccttcaaatttaggtttgtctaatgattttttcatgctaatattgtacgttattctttttgttaacttgaatggtttgatgtgggaaatgaaaaccttgatggtttccttcctcgatctcaagtttttattagtctttacttttaaaagatcacatcactgtaaaggtgtatattttgcaaacttctctaactatttcgtttatatttcggggaaaaaatcgatgtaaattttatgtatttctactctgtccatgttgaaatgtgttgggcttatttttcccctgcaattggtcttgtaagatctgtataaagtcccttgtaattattttttaacctttgaactaatcgccattgctgctgtttatcaaatgtatgatatgttattgctcttttatctacaggttctcttgtcggaattaactctacaagcttgcaacttttgaatctttcatccaacagtttgtctggggcattacctgcaactgtaaaaagttgtctggcgatcgatttgagcaaaaatatgatatctggtgatgtttccactatgcagaactgggaagctcatttagagtttattgatatgagctcaaacgagttatctggaagctttccaaaactatcttcacactttcagagtttaactacaattaaccttagaaataattcaatagtaggtactttgcctcccatcttggtggcctgtcctagattgtcaacagttgatgttagttcaaatgaactcagtgggcctattcctgcttctttcttcggttcaaggactttgctaaccctcaatctttctggaaatcatcttatagggccaatttctcttggaagtgatcatgtgagtgaattattatatttaccttctagtccaatgatagaatacctcgacctctctcggaactctttgtcaggtgtcctgccttcacacatgggtaatatgatcaatctcaaattgctgaatctcgcaaagaatggcttttcaggaaagttgccaaaggagttggacaaacttagtaagttggagtaccttgatctatctgacaacaaatttaatggtgaaatccctgataaccttccctccagcataactttctttaatgtatcaaacaatgatctaaggggtcctcttcctggaaatttgagaaggtttcctatatctgcatttcatccaggaaatgacttgcttatcttacctaagggtatgccgacatcgaattcagttccagaccatgttagtgatctaaggaaaaatcgaccttcaaaaagtagtaatattaaagtagcaattattcttgcatctgttggagctgcctttatgatcgtttttgttttactagcttatcatcgttcacagcttaaagatttccataggagaagtggacttggaggtcaaactacagggagagacatcaagataggaaaaatcacaagaccttcgttcttgaagttcacttccaacactcaggccccaccatcttcattgagtttttcaaatgatcacttgttaacttcaaaatcagggtcaatatctgcacagcgagagattgcaactgaagttgtacatcgggaagtggcaactacttcagcttctatggatctccttgataataatcctgcaacttcgggaaggaaatcctcttcagattctccattatcttcatctcctcgtttcatagaagcacgtgaacaacctgtaatgttggatgtatattcaccagatagattggctggtgaattgttcttcctggatgcttcaatggcattcacagctgaggaactatctcgagctccagctgaagttcttggcagaagcagccatggaactttgtacaaagctactttagacagtggacatatgttgactgtcaaatggttacgggtaggcctggtcaagcataagaaagagtttgctagagaggtcaaaaggattggctcgataaggcatcctagcattgttccgttgagggcatactactggggaccaagagaacaagagagacttcttttagcagattatatccatggagacagtttagccctgcatctttatggtaagactttaaattgatcttcctggttcttatatactctatcttattaaattttcttacgaacttcaaagtgagccatctttaataatgttatggtgcatgcattcaacatgttaagatttaattgttctacatattagtcttcttctttctttctccccactggtttattttttattttggctagtcttgtttttttcggttcagtatattgttttggtgtttgattgaataggcttttgttcctttaggtcaaataacttgtcagacaacttttttgcaagccttctgccattacaatcaagaattgtggttatgggtgtgatttcctacactatagaaaaaattgaaaagcttaagttcttactaataatctatctaggattcagtaaaagtttattggaaatttatttggtgactgcctctttgagaagtatttggaagagtgactatcagtacaactttgaagtaattacgtataatcttctgcaatcggaacctttattgttatactcttttctaattcttcacaaacaagtttgttgaatgttaggttggtttattctcaatttcactagaacttactctcatttctccaaaagctttttatggggatttattgaaggttagaacttaggtggcgtttggttgggaggaatgaaaatataggaataggaatgggaatggaatggaataaaatttaaaaatgcataaaaacaattgataaaaaatcattaaattttttcttttgtta

SEQ ID NO: 294762 - DNA, 880 bp, Cannabis indica
tttagaaagttttaattaataatgtttgtaattagacaaaatataaatatatatttacatactacaaagaattggtttggtttagtggtaagatgttaaatagttgtatttgagtttattggttccacattttgatccttcattttatatagttttattttatataattttgcactgaaatttattaaaagaaaaaagacttgggacttcaacttggtaagacaattgtgattcttacaacggacaccttaaataagttttgtgtgtctaatattataaataaatatttatttactacattaaatttataaataaaatatatattttttggggggtcgtacggtaggagccctagctacgggctgtctagtcttagaactagccctaatagctgggtgacataattttcacaaatagtaacttttgtattgtgttaaatgactacattttgaaaaatagcattaaaagtttgtaggttttaaagagcaataaaactgttattatgaaagaattccgaactactttatcggttgtgaaagatttaagaattttggaccttattaaataaaaaggaaatttacagcaaaagtccccaaaaagttcacgttgatgctgattagtccccaaggtccaaaaatagcggcaatagtcctcaaggtcacactttttatttgtccgttggtctccaagttaacagatctgttaaacccaattcaaatgccaagtgtcgaaatattattggtgggtattattattttaatttaaaaaaataaaaaaaaaaaaaaataattttaaaaaaaaaattacctttttctttcttttttttttacttttttcttttcttttctttcttccatcttcttcgtattcttcttcttct

SEQ ID NO: 294763 - DNA, 4523 bp, Cannabis indica
catctatttttatatctattaattttttaatatgattattgtatattataaataataatagatatctacttaagttttttttcaaaatttaattttttgtagtaaattactattttaatacagttaaattatttaatttaaaaaaattaaactatttactataaccataaataaaaaaaaaaagttgaattataatttttccatacaaaaccaacctaaacctaatgaaagtgatattcctagctatagagctaattaataagaagaaaaaaatggcattatattattattatcataacatcaattgatgagaattgttaaaaaaatattatttcaggtagctagcactttttttttggtgtaatactaatattagtgtaattaagcatgagaccccttataacttaaaaaaaatagttttaaaagaatattgttaacaaattgtgaggtgtcacctataaaaggtgtttagcatcactgatgtccaatagtgcattgctattgagcaccaattggacccaacatcttctataagtagcgctctacgattagtaagcgatattccttaaaagttattttttaaagttatatggaatctgatacttacttacactaataacgatatgacaccaaagaaagtattttaaccattctcgtatgtacctcttcggcgatctcaccagccttgacataagattttcgaaccctagcaataagaccggtagcaatataagcgtagacacctccagccaatgcaattaatgggactatagacagagtcaccaaacttatctgccaaacccttgcaaaccctactatgaatcccaccacaaatcggcttatgtaatgcaagaaattacccacctgcaagaaattactaaaaataatcacactttttacaccaaaaattattacactaccataaaaacactaaagtagttgtaaaatgactataaatttaccattactatccaaccataatagtgatcactgtgtgtgtatatttaatgtgattattttacatgttttttattattattattttatatttttggcaaagctagaaatatatgcatattattactaatttactacataatgactttcaatgttaatgaattgaaaaatgctttgaatattattcttctacatctcaatatcgatattaatacaattaaataataatttttaagatttatcactaactaattttaatgtaacacgtttagaaggtgttaagtaccactaatgcctaatagcaatgctcgaattgaagaatattaaaagacaccaataatacttagagaaatattaaagggcaccagtggtgtctagcatcctcctatgtgtcaatatcgctattgattcaatcaaagtatgaggtctcatatagtttaatataataactttttggaggtatcgttagctaatcacaacgcaacatgttgagaaattattaggcaccacctgtacctaatagcaatactcaaatgtaccatcctcttctaatgaatttatttggtacctaattaaattgatatttgatgtccaaataaatatgaattcatttccaaaaaaaaaaggtgagtttgtgtagctggcaaaaccctagaaaataataaatgaagcccaacaattcatgacacatagccccaacggtctacccggctcataaatgttactaaataaataagaataacgctttgcatttattcaaaaacacaccccacacctttaaattaaattaaattaaaaccacatatatataattaagattaatttgaatatgcatgtgattatatttaattaactaattaattaccttttcagaaagtgcatcttgaacaacaataatatcacttgtaatagcagaaataacttcaccagtagaagcttcagtatcaaaaagactaatatcttgacttaacattgctctcaaatatgccattctcatctttgctgcttgtctttctccagtatgcatccaacaagccacctctattatatattttaattaataaaatcaaccccaaaaaaaaataattaaataaattccaaaaataattaattaattaaataactatatatttatatgtacctgtccatgatgaaaacaatatagctatacttagatatacaaaatccaacgaatactgacaaaaaattaaaaaaaaatggtttatatattaataataattaaattaattaattaattattatacataaaatatatttatttatttatttatttaccttggcaactttgtgtgaagcttctttgggaaaaagataagccattccaataacgtttattaattttccaaagaagataaagaaaatgggaaccgaagctccatgaattatggctccaattgtaccaatgcccatcaaaacataatcgtaaaaatctgcgaaactaaacagtttaagcaacgaaactttgttgctgttattgttgttgttattctttttagtgtcttcttgatcttgatcttcattatcgtcaccgtcgccgttaccgccgcgatgtttgttggtcttgttatccatgttataatattattggccggaaaatgtttcaagtgatggaaaaagagagagtagttgttaattttgtgagtagagagaatagtataatggatatgtaatgaaactgaatgtgtgtgtgtatttattatggattgttgggatactaactattggaaaataatatttattacaattgattaataaaataaataagtaaaaatggaaggtatagaaagagaaatatgacaaaagaccctaaagaatatttagagcatttttaatatactatttgttaaaatgtttggattatttaaacatataatatattatatgtgttatttttgtcaatatatattttttctacaagtaatcaaatgatatggggtaatttaaaaaaaaaaaacacacacacacaaaataaccaataaattataaaaatacgatttgtacgaaaatttttaattattttatagttttctagattttattacataaaatgcggtcttttaatgtatttttatgttgtactcttgttattttgttgttgattttttgttatttgtatattattttttatattttcttattattttcatgtactttgtatattccctccttaaaaaccatctcttatgttgttggcatattataataaaattttcagagtaggttcagtttagatgaatgaaaatatagtaatgagaataagaataaaaataaatttaatacatataaaatatatatatattttgtctatattagaataattcttttttctatttttaatatattaaaataacattttaattttttgctttaatattttagaaaacaacataacaaataaataaaataaaactgaatttattcatccagttcaaaagagaaattctaagatgcttaaaatatgtgttgagtatagctaataaattattattaatgcaattaaatatttagtttttatttttttatttaataaataatataaaaaaattacttactgttcataatgcactacatcagtataatattaaacaacttacaatgtctactacctaatagcaatacttatttcaaaatctcattcaaagacattgttaattataagagtattgttattaagcattagtagtgtctaatgctttttaaatgtgttactttgtgattcgtttacaatactttctaaaaattattatattaagttatatgaaatctaatacttaattacactaatagcgatattaatacatataaatatactagacatcactcgtttcttttagtaattctattcctccaacactcacacacccacttatgactacttgagctagcctcaagtgcttttagtaattctctaattgttagtttgtaaagagattaataagtgtggtgtgagtgaggctagctagctagctaaggattgggatgggttagagagttggataggatggggtccataattaaaaccaaataaataaaggaatcaatacattattattaaataataataaaaaatagaattaaataaaagaaaataataataatagggagggagatagatgtggcggcattaagtggtggttgttaaacttgcttaggtaataaggtgaccatgtccatgttaatgaaagtttgttttgttgggtaatagacacatcacacatatatatacagttgtagctttcagctggggcaacttcattattttttttctcacctgtaaatcacacacattcactactttagataaatgtttcctattcttacagatagattcattttccactctacctgtttttgaggtttctaaactactatttcggattccgggtgataatttgtattcgtgttgtgtcaagatttaagtattaaaataaatattaaatagataaataacagtataagtacttaaaatttcaaatttataagtggcaataacttaatgcttatttttagcggcataagtactcaatgtttttttttttttttgt

SEQ ID NO: 294764 - DNA, 2818 bp, Cannabis indica
caattaggcgcccatacacctaagtaccaagtttgaaactcgtgtccaacacatataactgattctcgaacgttcttgactatagcatgatttactataatatcagcctatacttaacactctagtcatactgatgtgataacattaatctatactataagtacaactagttataataccacatccactcagtactctaggcgtgctagtgttggttgcactagtttgttctccttgaaagcataactaaatatgttgcaaaattgctcagccctagccacaactcaaggtttggtgtgtctcaacctgactgctccttacttgcaaaattgcaatttcacgaaataggttgcaacatgtggtttggtgtgctgcagcaggtgggaaaatgctttgcgtgctttaacagtattttgaccataactcatttaatacaattcaaaatcatacgatttaagatgttctaaaaaactgagaacaagatctaaaactttatgtttagctccaaatccatttataactttaaagacatcaaaatcccccaacaagttttaacttgcaaaaataagctctctgatcttgaccttttcccaccaaagtgtgttaaaaattaaaatcactccaaaaaactttaaataggtgattgtccttctaaattcttaacaaatcaaaatcacactaatcaaattcttaaagtgtttaaagaattcattggataacaatcataaaagaaaatatatatatatatattttttataaataaatatacacttatcataatgggtcaagattcataggtttgttgaatggtaacgatgttgaggacttagtttattttttcttttcttttttgtcctaatattttgtcattttgagattgtaataatgatgtttataaccttaccttgaaaagactatagcttcaaccaataattttgtaatcgatcttttcctcaataaaaagatctaaggttgtggaccttttatgtcattgttcgttgtttgattatcgagtgtaatattctttaaaagcaacttatctatgaagggggttcaaattaggatatcatattttactatcttattgattagtaatactagtgtataccacttggctacattttattcgagtcatctccttcatgagatttgtgtggctctttgaatattatttgtgttgtaaatagtattttggatttgccaactgaaccaaaaaaaaaaaaaattgaaggattttattgttaatataaaaaaaaatgtaaatattttagtgctccatatgtaataacaaaagaaaataaatttggtcagcaatcagtagtttttttattattattgaagggtctatatatattatattgtacaatttaatattaaatctcaaaaccctatacaaccacttaggttacattatattattttattaattattacgactaaaatcttttatacaatgtaagttatcttatttaatacataataaatagttcgtatttacttgtattataatatttacaaaagatttggatcaaccccattcttcgactcggacctgggacccgtgacttggacccaagactcgaacctggactaaagacccagacccagactcgtgaactggacccgaacctagacccaaacctagacttgaatccgaatccagacctagacccggactcaggacccagacccaaaaattagactcggacccagacctagacttaagacccaagactcaaacccaaactcgaacctgggactcgggcccggacccaaaactggacttgggatccggactcgaattcggacctgggtcccgtgtcctggaccaggatccgaacccggactcgggacttgggatccaagacccgacccgtggtgttggggtcgagtttattgaaaatatattataattttacacaatctattaatacaaagtcaataccaaacataatattgtaatggaatcaaaattctcgttgatttattttaaaagtggtgtaataggactacaatataatgatgattacatcatatatagaattctcattgcaccaaaaaaatttgtgtaaggattatattacaaatggttaaataagataaaactaaaataattttaatacccttttatttataaatataaaaattaaagtaggaacaattttattaatttatcacttattttaatattccttacaacatcaaaccaaacatcctaatcaatttatattactattcttatttcattataccattatcattttattctaccaaaccaaacatcaattaatttgattttgttttttttttttgaaaaatttacaaatataaaaaacaaaaataaatacataaattatttgtgcacttatataaaagaatgtaaatggattgggccacatgaatattttccttcaaacaatgaatcttgagaatctttgtggaataaacaagcacatgaccgaataattttgtatttttttaagaaaaaaatctctccccaattatttcactgatatttttaattattataattaaatccccaaattattaatatatattttaacatagaggaaccccatgcttatctgcatcttttgttatttttggtaaaataataatcattaatgattaccacatatctctttttttaaatcgttttgttttttcatgataggttgttatatagaatacatgaactaatgatctgtcaagtactttttttttttttttttttttgtacgtgggtcaattactcttatgtgaatccctttcaatgaaaattactttttttttttatgtgtgagataaaaaaatttac

SEQ ID NO: 294765 - DNA, 7337 bp, Cannabis indica
cagtactggcgaggagaccgttattttgaagaaaaagaaactaccactaaaatgaatttgaaaatatcggccaaatgtttttatgattcacatacatttgtcttatttgtattgaattgtctacaattttgttgtaaaaatgttttgaattaataaaaaattacaagtagtttgttttaataatgtaaaactaaatctgtggagctcatcacaatatcaatttttgctatatttttttttatgtaatcttttaagcattatgtttgtggaccatatagaacttcataattctcttatgcaggtcaaggatatgactccattttacccgatgttccgcatgaagtatctgatcctttgactgagaaattagcagataaagttggtaaagctgtggaacaatatgttgaagcaatggaaaaggtaattgatgtaccaagtaataatttatatgtaaatccaagcttcttttcttttcttgtcttaaaatgtgttttcgtatatgcaatgtaggtcaaactaaagcaaggtctaaagactgcaatgagtatttcgagtgagggaaatgcgtatctgcaagtaagaatggatgatttgttacatgtcacttgcctgaagctggcaatgccctaaatttaatatattatttgtttgcatttagatgcacttttgattcaattttttttttaattgcaggaaagtcaattctggaagttatacaaggaggatcaacctcgctgctctattgttatgaaaacttcagtggggctagtacatattctcgcatgtctcttagaaccttttatgccgtctttctctcgggaggtaataaatttttctggtggttttcaatgcagcctgttcttatcgagtatttgtatttgtgcagcatgtactgatgttttctctttaatctttttgatggtatgaaggtattcaagcagctcaatttagaaaccgaacaactttcactttccgatgaaaaaggagacattgatagggcaaaaaagccttggaatattgtaccttctggccacaaaattgggaaacccgagccattgtttaaggaattggtatgttaagcacctttctccttttactccccagtaaactaagtcaaactaagttttaattatatattcccgaagatcttcttatatgatgaaatctgttgttgacagaaagatgaagaagtagaatctttcaggcaaaggtttgccggaagtcaagctgatagagttgagagggcagaagctgaggcggctaaggtagcccaacaattgaagaagaccaaaattacaggttacagttaatttatagatttaccttttcgtcgactgtatagtaattcatgtacttagtagagtgatgaataccttactaatagtttctttgtaacagagaataccggaaagaagcaaaagtcagcaaaacctgcaaccgaagcagaaattactatttccagactcgatattcgtgttggtctgattactaaagctcaaaagcacccggatgctgattctctatatgttgaagagattgatgttggcgaaggacagcccagaactgttgttagcggacttgtgaaatttatacctctagaggaaatgcaggtatttttactggtctttttcgtcgatagtgatatataatttataaattaatgtaaccttttcaatgcttgaaagcatttatcatatgtaaaattcattttgcagaatcggaaggtctgcgttctttgcaacttgaagcctgcaaacatgcgtggtattaagtcacaagcaatggttcttgctgcttccaacagcgatcacaccaaggtaagaaattgacgattctttcctggtacttgatcgatcacgttgagtcactgatgttatggtgggaaattttattatacaaactaataatcgataatgagatgcgaactgattcttcattgggttcataatggggcaattagttagtgttgtaatttaaaattccatgaaaagatggaatttttattgttttacatatttattaaactttcattcagtaaagtgtccccgaaaattataattgctgaaataattttctcaatttcaggtggaattagttgatcctccgaaatctgctcaagtcggagagagaattacattcccgggattcgaaggggagcctgatgatgtgttgaacccaaagaagaaagtatgggaaacattgcaagtggacttgcattcaaacacagatctagttgcttgttacaaagatatcccgttaaccacatcggccggtatctgcactgtatcaagcatttccgaaggatcgattaggtaaaagtggagttagctagttagtgagaaaagattggaagaggataaatggttcttgtaaaacttaagattttgattattacctctaattgtctgctactgtatttttcatacatatggttgtgatattctttctgtaagatctaatttttaatgacaacaataaacaatccttttactttacccatcaaaagtgggagtcttctattttgttttgtgtgcttattacacatgaaggcaatttcccttgctaaaatgggaaaggaaatagggtagaatgagaaaagtaaaatctcgaagtcaatacagtaatagtccgattggtatttaacggtaatatcagagttaagtatataaattcaatagatttatagtgtaacggtgacattttggtccggcgaacgggcaagatcctgcggtgacacatcttttagttcaccgcctttgtcatcgatcatcggaggcttttcaatatcagggagagttcttaaaacctgtttaaccataaaacaccatatataaatgatgatatttgtagtgtgacattataatttattgaaagaatttgaaggtgttgattttgattattacctcatatagataccatgagacaaaagcatcagtggcagcatactccaactggtcctttgataaaacattggtttcccaatttcctagttgaattcttttgggcttaaggagctgcaataatgcaacaacctcattaaaatattcttcagaaatcttttttacaagagtagctcaaatgggatttaagtaacattattgttttgagtggaaaaataagaaagtgagagagagagtgtcactacttaccactgaagcttaagggtgcgtttggttgggagtaaacgaatagaatgggatagaaaagaatcaagtttccttctattttttttgtttaattacattgaaaagtattggaactagaatgacattttcactatttcggtagaatagctattacatttcaaaataggtggaaatgccatttcaatacaagataattcttttatctattttttaaatgcatattaaatttaattcaatttctttcctaatcctacttatgtattttcattccttccaaccaaagtacccgaagagagagagagagattacttaccattcaagcttaagggttatacttagaaaatcataatgttaaaaccaagttgaaaatgaaaagtaaaagattaataatacataattgtattcaagataccctctacatcaatttgcaagacccctacacatacccctttcgcaacgtcatttgattgatcttattacgaagggtaactgtgatctaatcacgaaagggtaaaagaataacataatagctgataaccagttcaatcacaattacccttcctgataagatcaatcaaatggcgttgcgaaaggggcgtatgtgtaggggtatttttgagcgtagatattgaatttaattgcagcttaaaagaaattaatgagcaactaagttatatgacttctgtcaaaagacttttgggatgaaatgtattcagcacagagtggtgtggtttaagctgaaaatttgaaattgagcaaaactaatacctgtttggagatgagattctcagttaaagaggcaagactccacttttgtgaatctccaccgagcttctgtttggctagataggaaagatcttccactgcttggatggaaacattatagtcctttgaaatcttaacagaatcattgccaatgccaactccaacctgggcatggataaagagtgttatcacaacaatacttatattataaaattgctttgcttccaaaactaaaatttcatatatctgcagtgataaacataccaatgctgcagctcttttagctttaattacataccttggaaaacatagaattctcaagaagtaattgcagactttttggtattccagaatggaagatgtgcatcacataacaatgactagtgtccaaacatatctgcataaccgcagccctcccaggcggaacacctgcacttttttttagtttcctttaacatcaaagtctatcaatttagtttgattgatgcataaattcattgggaaaaaaatgaaaccaagcattatattgagttcataaagcagatactttcaactaaaaatcccattcaccatatcccttttagctaaaagcttaaccaagttaattgttcaatcataattctaatgaaaaaatacagtgagcatgcagatttcatatgcttgaaactaatcattttcttggtcacacctaaaattttctccaatgtggtttgtcatttgactccttgtctaaacctacctagtaatatgctagagttttgttagtatcccacttcgactaggtgtgggattagttggtggtttataactatttgagcacgctcttctcttaagctactcttttgggagtaaattctacctaaataattgtaacaaacgaaacgacatcagagtcacacaccctcaactgggactgactgacttctccaaaggatcaacctatggaaggggcgacatgcaaaaaatctcagagtgagtgggccattaaggacgctggctctaagggggtgtattgttaggatttcacttcaattaagtatgggattggttggttatatctcggttaatatcagcatcagagtcatgcaccctcgagtggaatcgacattgcaaaaggagcagcatatggaaaacccgagagtgagtgggccactatggacatcaggttaggatttcacttcaattaagagtgggattggttggttattactcggttaatatcatcatcagagccacacaccctcaagtggaatcaacatcgcaaaaggagcaacatatggaaaaaccgagagtgagtaggccgttatggacatcggctctaaaggggggtgcactattaggattctacttcaattaagtgttgaattggttggtcattactatggcactctcctctcttagcctcttttcaaagtaagttctaccaagtgattaagtgtagttataaacaagtttcccatctccaaaagattacaatagtgaaaaaacaaaaagccaataaagtgaaaagacaaaaaccaaactaaccttttacaaatgaggctctccactcaatatcaaacccaattgcaactttaccaacttccattttctttgcttcaacaattttcaaaatctccattgaagctctctccacatcaacattcgtcctactatatttaattgcacccaaaaacttcatcacagggtatctaaatctcatcttcgcctttgctacttcaatgaaaaaataaataaaaaactgatttttagggtttcaacaaattaacccataaattcttgactttcttggcatccaaacagtaaaatatagaagaaaacggaaaagggtgaaatgcaaaaaccttgacagggcgagagagaggagttaggaagctggagagcgagaatggagttgggcaatcggcgatggtggttggtggaaagtcgaggcctttttgatgaggcggattggaaaactgcatcgatgggcttcgaggtcttctaaggtgaaaggatggtcatcgtcgtcgtcgtcccaattcgatgatctgccatttttgggctcttctttggaatcagagcactccattgtagctcatttttggacactgatttttgagtttttgaatttttgtttttgttttttttttttggagggaatcgaattttttttattacaatttttctttttctttttttggagggaaatgatttttgtttttttttatgaaaaaaaacaattaacatatatattttttcttttttaaagtagaaaattaacatgattttctgtttacaaaaagtctttaaattgattttttaatataataatcaatttattattgagagtcaaatgatatatattagttattaaacaataaaaaatttcttccaactaaattaaaattcatatctcatacacaccatgtgttacaatattattttttcacgttacatgttgaagatacacttaaaaaacacatgacaaattttaccatttaaaattttgatatttataaaattttactttagtgaacaaaactttcattgaaaaataataagaatgaatacaccaaaacataatggaaaattatttaaagaagtttaatcttgtgtgcatgcactactaatttatgactatgaacacgaattagggaggtcttaataaaattggaaaataaactagacgatcctgtaaaaagatccaattcagtacaaataaaaattacaaacaattttcatgtcaaaaaaaaaaattacaaacaaatgttatcttggaattttggaaataattgtaaaaattacctttttggttgcatttgcttcttgtttacaaacaattttatgatggaagattgatataggattactctatttgagagtccaaacaaaaaatgattcaacaaatagtaatttaatgataaaatctaagattatgtaattttatagttaaattaaaatgtttaaggttataatgctcggttaatttagggatacgttgaaaaatacttcttttttgttttcattaataaaaaatattctcgtattatatatatattttttaatatacccacttttttgagtgggtttcccaatataccctcactctctacttaagtctagcatataatttgcattaacctaaggacttaatggggatataatctttaaaagtatgtgtatcttaaacaatatgaaaatagagataaaaatgaaaacaaataaaataaagtgagtatatcatgtaaattcctcgttaatttaaccaattaataaaacagtggattgggccactcatgacccgtgaattgggtcaaacttggttgtcacacaaatgggtatgagtataattttttaaagagaaatttatatggtatattaacttttgttattttttacttttttactgtattttttttataagtttcacactgcagtatactg

SEQ ID NO: 294766 - DNA, 2403 bp, Cannabis indica
atatatatgtgtgtgttattgctgttatatatatttttattctggacacgccaaatggtgtccactataatttaggtaaacaaaaaaaaattcgttcacatccacctctctcttctttaggctccaaatgaacttaacccaatttcacattgtaatcccattatcattgattagaatcagtcccctaggtgagaagaaaggctacagtgtaaaaataagtattccatattttccaactcactactctgcaatgggcatgaagaatcagcaatttgtagtctatctccaaggattttcctaagaggaagagatttcgagaagatactccaccgcatgattttatgtcattcaagaatcttgaagttctagagtttgttccactatttagggtcgacatcgatgggtggggctctatccaaaacttagattaagtattcagatttggtgtttaacttgacactctttttcttgacccaaattcaatgatcactaccttggccttttcaataacctcctttttaagataacatcaataatttcctgctcataaaggatgttaagtttaggaatgtcccaacccccattgagttgtaagaggtctgctgcataagtaaaaccagccctcgtattccctttcggttttggacaaaactcattaccatgtagtacccaagggtctttccaaacgttgattctattaccatctgtaattctcatacatgcacattcccttaagacatctttggctttcaccacatttttctaaaaccaaaaattaatatttttatatttacttcgaaaaaagtgggagttgttaagatatgttgcagccaacaacaccctacaacaaaggaagttttccccattaagaagttgtcaaccctacttggccaggaaggctctattcatttctgtagttttgcaaaatcccaatccatcctagatttagaaagacaaagtttgtcccaagccttaagataaaagcccttgtttcattttttaccaccccaccaaaaatatcttaccaaactatctattcaagtagcaagttgattagatagtttagtattttgcatagagtaagtgggcggtgagagaacaacagatttgatcaatgtagcgcgaccaatcttaaagaaggtcttcaccttctaaccttgaagtttatagatgagattatctatactaaaattaaaatatgcatcatgttagtgaatacaaaacaaaagaaggccaaggtaattaatattatcaattggccccttaatccccaaggcttccttaatgcttctttgcataccaccactagtatttttactaaagaatgtgaatatttttagtttattgatctgttgtctagaacaattacaaaatttgtccaaacagctcgacataccttgagcctcagtcaagttagcctatccaactaagatgagttcatttgcaaagaaaagatgagacaaccgaggccctcccctactaagttacaaccccttgattgagccatcatctaaactttcctcaatcaatctcgaaagaatttgcattgacaaaataaatagatgggggagagagggtcgccttgtctcaatccacatattggattaatttttcacaccagacccctattaatacacttcagtgaagttgtggtgatacattgagcaaaccatgagcaaaacatctcgggagcatgagagtttttcaaaacatcatccacaaactgttagctcaatttatcatatgctttaatgagatcaattttaattgtgaaaatccctatcttacctcttttgagtttgaaaggagctacaagaagctagttgttctttgcataagaagagatctgctgatttttgcacaagaagattaccctatattgtttttgaatgagtgtttgttgatatggtgatctttcatcgtaaattgtaggaaatagctggcagtcccgaaactgcccctacacacaacacctaacgttcagaaacaaggggcagaattgtccttttgctttggtgcggatccaaagagaatattctctctcaaaaccgaatatgccccttttgaatatcagatctatttttctaaacctaatgccttttccatataaaaccattcttttcttttcaaaaccctagcaaagtcactcttctctcttcaagcaaaggcagccggccctattcttcttctccttcttcctcgagctttgaaaaaacgcagcagcacttccttccttcaatctttgaaacgcagcagccctatttcttcttttcttcctttttcttcttgttgcaaaacaccccagccgagccttattcttcttctccttcaagctacggttgtagctttcatggcagcccttttatcccttcaaaaaacctgcaacacaaccaccacacaccc

SEQ ID NO: 294767 - DNA, 5929 bp, Cannabis indica
acttagccttaaaaaaaaattgaaagagacgacttaaacatggtcgtttaatacaagatccgttaccgaccttctcgccatttgcaagcgcttcagttaccaaatatcgtcgttgaaggttcgcagtgttcgttttcatggacatggaggcatcacaaaccaattccgagaaccctaaccctaaccccaaccctaaccccagccctacacctatccgtaatgccaattcaatatcttcttcttctccggtgtggccaaccatagacggcccactcggactctcagaggaagactcaatgaattatgcccgcagattctacaaattcggcttccttcttcttcccttgctttgggcggtcaactgcttctacttctggcctgttctgcgtcattctcgctccttccctcgcatttaccactgtatgccccagtatccctctccctctctctatctcatttctttaattttgatttacgttttaaatttgtactctttttgttgaatgtgatgaaataaataagcagtgttaatttgatagttgagaaattttacgatcaggttcctcgatttctgtccttattctgttattggtggtaattgtgttttgctcactaccattttattttactttctgcgttttgttggagacagtctattgctaagtttaaagagtgtttgcttaaacaacttcattttaagaatatgtatagttttaatttatattagcaacctcagtggcacaatgctcgtctgttttcatggtttgagttctgttattttggtttatttattggctttagtacgagatatgagctctgtgtagtttttttgttctatcactgtaaatttgtgagaccatagccaggtgttttagagcagctatagtgtagataccatgagaggtatgattgtatcaagttaggaacttatttacgaggtatgttaatatcattatgagatattcttgaatttaatttagtacttagaatggtggatatgaaagagattgagtttttaatttgacaacggaaggttattttggttattcttgaaagaatgcttaatgtacaaggagaaacgatgaagaatgctatctatagactgaaatttgtttagtgaagtcctattataagctcagagagattggttgataaagaaatgagtgatagtctgaatgtaactttagcttgacttgatttagtttatttcactgttctttttgtttgtttgtaattttggacatgtttaaatagcaaatctactgaagctagaagacttcaaggacttttgatcgttgagaagtaaatccaacttagatgttgaactaaggttgcatgtctataaggaaggagttaaactaagccagcttactgttttttctgaaattaatatgaataaaatgtagacgatggctgggtgcaaattgaagcttctaggatagtgatgcgtttgtggtttgaaatatttgggaatgccttttggtgacaacccaaggaatgttagtttctgggaacctattatggctaaagtttcgaaaggattggatgtttggaaacacacttatctatctagagaagggaggcttaccttcattgaatccgttttaacctcgttatcgatctattacgtcatttgttcaaggtaccaaggttggtcttttagtgtttgaaaaaagctgatgtgtgacactttttgagagggaggtgacttagatggaggaagttgtcatttggtagcttgggaaatggtgtgtagatcgaaatgtaaaggagggcttgggataggcaatttgtgagaaacaagtcacttttagtgaagtgattatggagattcccaaaggaccaaagttccctatggtataaaagtcaggttgtcaaaagaaaagaaaatttgggctgagagaaggtaaatgggaagtaaatagaggtgtaaaaggatgactgctcgttgcccttggaaaagtgccacctctgtgtaagacgagttttggaaatggtgaagttcaaaatggaaaatggtcaagagatacggttttgggatgatgcttagttaggaaacatgtcatttaaatgcgcatttccaagcttagccagactttttagtaagaaaaataggtatatagtggattttttttttgaaagatgatggaacaaggactgggatctacattttgccagaaatcccagtgacagagagctcctagatgtgatagaattatttttgggattgtacaatgttaatctatgtggaatgctagaggataggagagtttggttgggggatagtattgaaatgttctttgtaaatcagcttttgagagtttgggtgtgaatgatattatatagaattatcattacccatcgctcaaactttcaccttgtcttcaaggtgagtgttaaatagtctatttcgaattgttccttcaatatcttgccttgatatttaaaaaaaactcaaagggtgtgcttccttatcaaatttgaagtgagctaatttgcagttggattctgatacaccaccacttaagacttacactaagaggcataaggcaagtgttgatgtggcagttagaattattgacaacacttattctaatgataacacttagggattaattgtttttagttgtgacttgtgagtttgtttgtataaatataggagatgattcatttgtattcttttatgaaaagcattgtgaagagagttgagagacttgggagttacctggctgacttgaaaagctaggaaattgttactgtaagtctttgacaatcaatatagctcatcttcttcatttttttttctcttctgtccctttgtgctggtgtgtatcatttatggtattagagcaggtcgactgggataggtcaagatgcccaagaaaccaggaaagtcagattaagaaaaattaggggagttgttgaatatggaggaaacggtggattcaagaattgtggccgtgtgggatgaactagggtctgttcgtggggaagttggctctatctagaacgatatgcaacgattccaggaagaactcctggagatgaaagaaatgatgagttcgcttcttgaaaaacaaaaagaagggagtgggtcggcgagaaacgccactcatgaagtcccacaacgtcgattaaattcatgttaagtcaatagatgagttgcttgatgaactccatggagcccaagtgttttctaagcttgatcttaagttggggtatcaccaaataagggtacgggaggaggatctgccaagatttgattgcatgatgggcactatgagtttctagttatgccctccagcctcaccaatgagtttctagttatgttgtccgacctccccaatgcttcgctactttctaatcgttgatgaatgacatttttcagtcacatttaaggaggttaaagctggcatttttgatgatatactgattttcagttaaaacgaggctgaccatggggaaaatctctctattgcgctgaagtacttcaacaacatcaaccttttgccaataaaaataagtgtgaatttggtcaaaggcagctggcctttttgggacatattatttcaggcaagggcaaacactattaaagtggctgccatgaagaattgggtaggtcccttcgcaacatctgagagctaagaagattcttgggtttgactggttattaccgtaggtttgtggctgggtatccgcaaaatgcttggcctctcacggaacaactcaaaaacgacaaactttggatggaatgaagaggctgataaggcttttcaagagttgaagcacgccacgtgcactgtgcccgttctagctatgccttcccagcatttcattgtggaaactgatgcctccggttatggtcttggtgccgtgctcatgcaagggtctgagcctattgcttattatagccacactcttggctaggagtgggcatccgatccaatccaattagtaattagatttgaaaagtcattatctgatccaatccaattaaacttcaaaatccaatccaatctgatgcaattactaattggattggatcgattttttaattggatatctaattacacacctaaattttagtattaacataaaaatataaagaaaaatatgtaaaaattaaatatctccctttatttaagtttaatactcaataaacataccatcgttacaatgtaatgtaactaaaagtttcaaataattaaaataacatttctaagtaataaaatagaacaaaacatcatgaaaataaatttacaaaacaaccaagtgttacaaattcaacacacacaaaaaaaaaattcaataaaaatataattagtatatattatattgtttattatataagtaaatataaataaatttttaacatatataaatgtaatttgattggatcggtttttaattgaattttgagattgacatccaataaccgatccaatccaattagaatccagcttttagcatctaatccaattgtaattggattggattggatcagttcaattagattggattggatgtcgccccatccctcttggcccgagaggaagattaaagttcatttaccaaaaaaaattagaaaaaatggtaaggacagaaaccttactgaaaatttcagtatctttcgaattgttacactttagtaccaatttaattgaattattctatttcagtatccctaacagctctgaacttgacgctgaccatttcttccaattcctgcagttcttcagaattttcatggtcatttttctctggtttctttggttctgccctcccagtcgtctactcttataccattttatacatagagtaccaattcaattttcaaaagatttagagtatcggctcttcattgacatcacaaaagaatttttaaatttccaagcttttcgagatacttggatatctccctgagtaagttttactctctttgtacaaatcaattcttaaatctttacaattaatcagcccctttatgctaactcactcccaactgatttttaactaacaccttaggactattaggagagctcactcaaaaacatttcatcacagccactaaagatctgacaactcagctaccataatccttatcaattatacttttgagactaatatcaaggcctatcagaagatttttattcggtttctgtctttaaattgtataaatgtcaatgaggtttggcataaaagaagaccttattacgccccttctccagggtggtgtgtgttgtgcaaatctaatggagaaagtgcttataatttattttttcattgctgtttctccctggagctatgttttaaagtcctgaaggaatttggcatggaatgggttataccttctcaaggcatagatattctgtccatgtttatagaaggtgataaaagaaggcagctgctatggaaggtggtgaccgtggctgaattctgggctttgtggctggagtgaaataagagaattttttttgcgataaagaagaatctggacagatgttgtgggagaagatcagagtctgggtggctgtgtgattgtttgaaaaagagtggaaagatatttagtatagatcctgtttggaattggaagtgtaatttgtaacctgtttattttgtttcgttttttggaaaatgttatacatattttcctgttttttgttagttttataggtagtacatttttgtattccaatctgccagcaatgtcttttggaaaatgttatagctacgcatacatattggtagcactgctgccagccatacgtttgttactaggaacgtttattttgcgttttttacttttctctgttctttgggtgatatgattttttattttttgaattgggtggtatgatttttgtacacactgtaacttaaattattctcttcattactaatacaattagtgttttatatatatatatat

SEQ ID NO: 294768 - DNA, 2375 bp, Cannabis indica
ttatggctccaataatcctaaattaggacttgataatactagcttgtaaagttcctttttatttttcaactcaaaattaaacttaataagcaatggaatgaatgaacaatagtcttcatatagggttttacttgcagagaaataaggtttttacctgagagggctaacaatggcgggaggagcgttagggaaccaggtcaagacaagtctcacaatcaaaaccgtattgtagagattaagaaagttcgataaaccattagccaccacaagtccagccaccgaatctcctggaagaacagcagcgaaattatgtgtagagatcgaatttacacaccgataatttcttctctcacgaatctgaaatacacacaaacaaaaatcaactcactaaatttcaaaacacaacatatatataatcaaaatgtatgtaactgccattagtgaacctgattgaaggagtttagagagagcaatttgttgagaagaggattctgagaagcgaacgaatgaagattttgagcagcggagagaattgaggtgcgaagattttgagcaatggcgaaaatttctgattgaatgaaattgtgctttcttgaagatgatggaggaggaggagaagaagctttgagaaatggagagaatttgggggaagatagtagtaatgtaccggagttagggaggaagatgagtttggaggtttccgccattgatgaagatgatgaatcgttcggaatgggagccatgtttggttaactcggtcagttttcactcactgagtctgactcggtgagtataatgagtgcatgaaagactgaggtgaagagctgaagaggataacgattttttgtttttctcgtgtaacgcgtggatcagtaaaagcatgatccgtggcactttcccactcatccaattacgacgacgttttacttataaatttcttttgaaaatgttaaagggaatatgcgttttgatgaaaaataagggtggacatagcgtgcgttttcgggttcgggtgtataaaattagtaatccgaacctacctggttgtgtgacagggtttttgggtttcgggtgtgggtgggtcgggttcaagttaaattggattcggatggattttgctcgggctcgagctgggttgacctttttttttttgggtgggtttgagtttaactcaattatgtatttagataaaacacatggtaccaaatgtgtccctaaactatgacctatatattattatgccccttgaatttttcaactcgttaaaaatagcctctgaactattcatagtgtcgtaaattagtcattctatcaagttttgttacatgtagcaaacaaaatgatgacatagttatttagataattgacaagtcactttgaataattaattaaaaaataatttatttacttttaatttaattttgcgtaattcttttaatcattaattgatcttcagtttaatgatcttttaaaaatgcatatttttttttattttttttattttaaattatacacgtggcaattgactaagtaattaagttgtcattttgtttattacggatgacaaacttgacagaagaattaatttacaacattgtgaataattcatggactacttttaacaaactcaaagatttatggggcacaataatgtataaatcatagttcggagcttaattaggattaatccctctgaataattttgacatgtaccgaatttctttgaactttttaggtcgtcaaaaatcgccaataaatttttaagattgttaaatttaaagacttttattcaatttaaaaattgttcagagatagatttagaatattgacaaagtggcgatgagacatttattagtaaaattgaatgaaaagttttgaatctaacaattttaatagctcggatgaaatttttaacgacctaaaatatttataaaacataatttagattatgtcaaagtttagaaaaaatatcttaattaaaatttttatattttgatacaactaattatattctaattgactatcaaatttaacaataaaaacttttgatagttattatttgaaacatatttatggtatttattatttaaaactactatcacatgtatatttataactttgcagcatgaacattattttataaaaataattaatttcatggaatattggcagctaaatcacctgaactttatactttgtaataattaaccgcaaaaatagaaattttggcggctaaactatctaaaccctgatttcgttttgctctgcacccctctgtccaaaaatcacagttaagtgccacggtagactatctacgtgtacacacttgtacatgtggcaaaattttagtggtccacgtaatattagtttaaaaa

SEQ ID NO: 294769 - DNA, 1428 bp, Cannabis indica
tttttttttttttttgtctattatatatactttattcacaaaatttatccaaacaattttttaaatatgtttcgtacaaaacacaatttaatttgtagaaaaatcgatgattttttctttttattggcatgaaccactttcttcttgtttttggccttcgatcttctcagtcgtacaggtcttcggtcatctgtggcaatggctgccatggaagaaaccctattattattattattattattattattattattattatcatcacgccttggattaatatcaacattatttctctctctcatcatcaattttaatttcccagctttcacttctttcaacttagccaaagccaagtcacgcctcgactcagccgccagcttctctccttccgcaacagaaacacgccacgtggcaatagagtcgctctcctcaaatctctttcgcaagccttgatactcttcgtggctgagccgaacgacactgacagccgagttatataaatccatatactgagtcatttcggctgcggatgcaccgtaagcctcggcttcttcccgtgaagccgcaagcgccaggtgtaacgagcgaagtctttgcttcctgagccgcgaagctcgtttcagcttcagctttgattgtcgtttcttggccgcgctgagcttgagctcctccatctcatcacgtagccgatccaagtccctacagtacttcatttcgttgaccatcattgtggcgttgacctcttctttcttctttgactttattctctggttgatggactccagctgtgattggaggtcgaagactagagtgtcgttttggtcgttggagtacatatttttgtgtcgtttttcagcacgtgcgaggacttgcttgagccgttcgagctcgtcgattaagggacgtgagtcgagccatgattgcgtggctttttctttggcttctttaagttcttcttttaccttaataagctcttccattttttttattttcaataattttgtttcattaatttgataattttgtgtgaagctctccattaaaatcatttgggtgtgaaaagaaatgatacttttattaatgcttatatataatagttttttttgtggtttggggtttatttcaataaattcccaggcggacataatgatagttatttccaataatatggataattattccaatgtgaaataattcataattaatgagcttagttctatccgacttttattacatgaaaacaaaagacacattaatttgtaacacagtttgtataatacttcttaagatgctattgatgtgatcgtacgaccaatggtttgtatggttttttctaaaatcgttgtttttttttttcccttttgtaagaaaagtattctttattaagtaggagctatcgctcacaagaatggataacaactctagggg

SEQ ID NO: 294770 - DNA, 6085 bp, Cannabis indica
ttttgttgtgactaaaaataaattttcttatagtgtataatgtaattaaagaatccataatagtagctattattaagcatatgatatattaatgcaatcaaagagagataatatgtattgatgataaatgcgagttctctaaatgttatatatatattatgagttgttataatttaaaagagttatatgtgaagaaatgaagaatactccagccttatctcagcaatgaagtgtggtcttatgctgtgccatgtgtcactctgatgtgcaatgtcaaataggaaaatcatagaggataaaagttgttattttgtaatgatgagaatatcattgaatagggaatattcttacttttctatttttatttttccagctgtaattgagcatgtgctcttatgtgtaacggctcttttgagccttgctcctataaatagaaaatcacaatcttagcattgatttgagctgagcttttacaattacatttactcctaaaatttgacttggtatcagagccattactgactgacaaccaatcatcaccacaagatccaaccgcagatggaggaaatttcactgcaccaccaacccctgtccctactgttgctagtacttttactgcaacaagctccagtaatactcaacttcatcaacctatatctcatcacttcagtaccctaaaccaacccttctccctcaaacttgacagaaacaactatggcttgtgaaaaataatggtttccactattgtaagaggtcatcgacttgatagattcctgaatgaaaccgatgtttgtcctctagagtttatcactacagaaaactccacacaagtgatcagatctactaatccagactatgaaaactagatcatcaatgatcagctgctaatggggtggttgtatagttccatgatagagaccatagctttggaagtcatgggagttgcaaccgcaactggtttatggcaagcactagaacaactctatggtgctcactctaaatccaaaatagatgagacgagaactttgattcaagtcactcaaaagggaagtactctaatgattgaatatctcaaacaaaaaaaaaaattggcttgatctgttggctcttgcaggagaaccttatcttaaatcacagcttactaatgtgctttcaggtttggattttagttatctctctattgttactaatcatagaggctcgaccaaagaccgcatggcaagagcttcaggagttgctgctcaattttgataacaagattgcaagacttcatgcacaatccaacaacaacaataaaaacaacaacaacctcacagatccacaagccaacttagctcagaaattacaacctggaggacatggcagaggttcaaaccactatgctcaacatacaggagggaggaactccaacataggaggtggtgaaagaggcagattcagtggcaaatctaatggatccaaaccaacatgtcaagtatgtggaaaatatggccactttgctgccatctgctacaataagtttgatgagaattacatgggaatagatccaaatggtcgtgggaatggaactcaaaacaaacacactccatcttcctgtcgcggctccaaaattcttggagagtgatgctcagtttgctgataatgggaccaacaatcacatcacttctgactcttcctcaatgacacagaaacaagagtatggtggtaaggaaaaagttacagttgataatggtactaaactatctatttctcttattggaaatggaatattacaaacaacactggtcaaaatttagtgttaaaagaaatgctattagtacttgaaattgccaaaaatctgctaagtgtttcaaaattgactcatgataataatgttctcattgaattttactctgattgttgtgttgtgaagaacaaggtaacaaggaaggttcttcttcaagggatgcttagggatggtttctaccaacttcaagcaccatgctctaaacccaatccgagagattctaggaaaatcaagtcaaataaacacatagttgaagtgggtcttacaccttatctcaagctcacatacctcttaaatattggtggaaagcctttcaaacctctgtctacctcatcaatagactttctacaccaattttagataacaaatcacctttgaagctttgtattcaaagaaactagattatgcctttttaaaggtttttggtgttgcttgttttccctgtttaagaccttagcaagctcataagtttcagtttcattctctcaagtgtgtcaacctagggtatagtgagtctcacgagggatatagatgcctaacaccaactgggagaatctatatttcaagaaatgtggtctttaataatgagcttgaattcctttttgaagctgatttcctaaacaactatcaattagaaaaaccagtcatcattcagaattcatcttggtctgtttttccctctatctccctacgtacctattggtcctatttcttcttctggtacaccatcgctcagcactcatgaagaacaaccctcctcaccaacacactctcaagtaagttcatatgaccctatcactcctttacactcacctgtagcttcaacacctatttcagctccaggtagtgagaggggaaatatctcatcagcagggtcatcaacatggtcttttgctaccagtaatgatggccaacctgatcatcatgatcacattgatgatgacatccctcctccttttgttgacactcctcaggtcattggccaccctatgacaactcgtgcaaaagctagtatttttaaaccgaaagtatttttgggacaagccaagtggacatccattttctctgaactagcaagcattgcagaggcttagcacatcctagatggaacaaagcaatgaacacaaaattttatgctctcaaacacaacaaaacatggattttaatcccagccactccagttcaaaatctaataggcaacaagtgggtgcttcagattaagtacaatcttgatggctctttctaaagattcaaagcacgactcgttgctaaatattttcaccaaagacctgggattgactttggtgaaacatagagcccagtaatcaaagcttcaacagttaggattgtcctaaccattgttgtatctcgaggttgggacattcgacgactggacataaataatgcattttttaatgccacttggaagaggatgtctacatggtgcaaccacaaggttctgaagaaaagggcaaggagaattttgtttgcatattgaaaaaatccttgtatggacttaagcaagccccaaggggctagtttgacaaagttaagagcacactaatcagctggaacttaaagaactccaagtgtgacacctctctattcttttaccaacaaggtactgtcatcatattggtgttgatctatgtggatgatatcataataactggaaataactgcaacaaagtacatagcttcattattgaattaaataggaaattcacactaaaggaccttggtccattgcactacttccttggaatagaagtgtacaaggatcacactagattgtatttaacatagagcaagtacattgaagatctgcttaaaagaacaaggttcatgaacctaaaaccttgtcccacaccagcaactgcaggaaagcctatgtccttgattgatggtgagccattaactaaccctactacctacaagagtatcattggaggacttcaatacttgtgccatacatgatctatcatttcatatgctgttaacaagctcaaccaatttctaaaggatccaacgacaactcactggagtggtgcaaaaagggtcctaagataaaaggtattgtcaccaaggggctacatatcagctgtgatgaaagattaacaatcaatggatactctgatgcagattgggcttgttgcccagatgaaaaacgctccatataacaggttattgcgtttactatggcaacaccttggtgtcatggtcatcaaagaaacaagtggtggttgccagatcaagtacccagtctgaatacagagctttggcacaagtagcagaagaaatcacatggattgaatcactcttaaaagagctcaattttccactcctacaacagtaacctggtgtgacaacatgggagcaaatgcattggctacaaattcaattttacacactcgcactaagcatattgaagtggatgttcatttcattcgagataaagtattaaacaaacaattagaggtcagatacatcccatcatcatcagatcaagtgacatattgtttaacaaagggtttatcgagtttaaggtttcatttcttaatcgtcaaacttggcatgactgaatcacccctgcatttgagagggaatgtgaagaaatgaagaatattgcaacattatttcagtaatgaagtgtggtcctatgctgtgccatgatgtgcaatgtcaaatagggaaatcctagaggataaaagttgttatatcttgtaatgatgagaatatcattgaatacggaatattcctacttttctgttttgattttgccagctgtaattgagcatgtgctcttatgtgtaacgactcttttgagcctttctcctataaatagaaaatcacaatctcaacattgatttgagctgagcttttacaattgcatttactcctaaattttgactttatatataaatgaactaattatagatatgattatgagtttaaaatatgttacaagtttagagactttatattgataataaatgcaagagaaaagcttccattagtaacatcacctaattcgatattaagcatgaacaagcaaagtaaatcaaccaaagtttgtttaaatacatcccaatcatatcaaataagtgatttaaaaattgttatacattcaaattttctcgtatatttacattgtaaattagttccttagaagatatttaaaaagataaaacaaagaacatatagtattaacagaaataaaagatcacatgtatataccaatcattacttagaaaatttgtcctggtttcaaaaaattatattattcaatctaattcatcttttcaccatttgctgggttgaattcgcatcgatagaagctacaaaattccacccatttcttcattttattacaaaatatttaactaacaaatttataaatatcaataaataatggatcgtgatcacagataggccatatcataaccaatgttttaaaaagcgtttcaagcgtacgtctcgaagtgcgccttgaaacaaggcgttcaaaaaatgcctctgaggcgtgcaaggcttatgtctcagctaattgagttgttttgggcattttttaaagagtttcattggacatttttaaagagtttcagtgggtctttctaaaagagtttaagtgagcttttttttaaagttttttttgggctattttgagttttattttgtaaattataaaagcccaaaactagataaaaaaaccctaaacattcatcactttctctcatcctccacaacttgccttgcacgatactctcctcctctcctttctcttcacccacacagcagcaacaccaacacaaggttctcctttctcccttctcttcacgtacacagcaaaaacaccaacacaaggctttcctctttcccttggaacatgaaatatgtcttttaatcttaattaatgtttgaaactttagactttaaatttatcatttgcctattaactaggattttaattttgaacctttttatgcttttagttatattttaagactcatagctattaatttcatgaacttattataaaattatgtgttttctattatgaattttgttgttacagattcacttatttacccttaagttgaataacaccactcatagggtttgacaaatatacccttacatcagatacaacaaatatcaagactaaagaacataaagacagttacaaagacagttacaactgaagcagttataaaaatagttacaaatatcactagggctctgccctagatcagatcacagaacagtatataaaaggaggtgcttttctcagatacaaca

SEQ ID NO: 294771 - DNA, 7131 bp, Cannabis indica
aaaagaggtaaaaatgatagattttaaaaaagaaggtaaaaataaaagaggacattataaaaatggtatagagtgtaatttgttattataacttaagagagccatttacaataactaagaaagtagccgtgaaaattttctctaacctaatacaaatattatattatctaacgctaaagcttgttttgctaatctataagcgcctaaattaacatcacgacgaatgtgagaaaaacaaattgtaaggagataggataattgaatttgaacatcctcaaccaaatctttgaaagacgaattgatagatgttgaactattgatagaattatctaattaattttttatcctttggtaccgttaatacactagtgaaagtataatttaaatccaatctaaatttgtgcacaactttttaattccaaaattaacacttaggaaaccaacattcgatccgttaggaaagtcgggatttcataattgtatatcatgttcccaatcatccatattatagattcccaaacaaagttgtaagaatcattttctctgagaaactttaacgtgtgaataagaaaaaaaactaataaaatgaacatgagttcattactactcaacatttaggtcaatctactattaatcatcattatgatatgaattaggtttttatagtaaacaataagtttgataaagacaacctttttcatatcggtcatcgtcatatataatctctattttatacaacaccttcacttagatgtcatactacattagtaattcgaattgagattacttgtaccgaataacgggcatcagtgaatcacactagcaaccattgattaaagatttctatggctaattgatcttaattctccgtacaattacaagtcacagcctcatgtatgaataatttttttttagatatttatatatataaattatttaatataaaatattaataatttaacattcatgcatgtatcaaaatattcatctcttattaataatcaaaaatatctttacatatttttcacgacataaacactaacacgaccttattcctttcaataataaatcttgaccccaacaaataccgtgccaagttaaaggtaacataccgccactttcccttccatgaaactattattggtaaaatatattctcttcaagagacgactgagaagagaatctggattctaaagaattcatcgcttatttttctaataaagtttggtttaaatgaataaaatctcgaaaacccattcatccctccattttagatttgcaaaagaactttcattttttttcaataaatctttttcttatccgtagtggttccccaccagaaatttttcatcactgacttaatttgtcgataaaagttagtagaaaatttgaaacaggtcattgcataagcaggttttgattgaataacttcttttaaaagaacatttttttctccgatggaaaaaaaaaagcttatttgtctaagcatgcaacaacttccatatgtgctccttgatgttattaaataattgcttcttatcacgttcaaaatatggagggaggcctacgtatttttcatgacactcacagattggcatacccaatattttttgaatgagagcttcactacctcagacatgtttggtgaaaaagacatgacaaattaatgcgtgtttagttgttgagcaaaagctttatggtatatatatctgaggcacgcttagcaacttcacatgatctattgttagcttaacaaaataagagactatcatctacaaaaagtagaaaagagacagcagaagtacgacaagaggcaaccatccccttaagttgactaatagactcttcatattgtagtaggcaagataattcttttgagaaaaataggaataagtatggagaaagcaggttaccttggtgaagaccctgttaaggtgtaatcaaatcagaaacaacaccattgattagaaaagaaaatacttaaagggaactaataccattaataccattaattcactagtgaaagtataatttaattccagtctaaattgatgcataacttttaagttttaaaattaacatttatagggaaccaacattcgatccgttaaaaagtcaagattctataattgtagatcatgttcccaactatacatattattagattcccaaaacaaaagttataagagtcatcttctttgagaaactttagcgagtgaatcaaagagcctaataacaagaataagagttcacgattactcaagatttaggtcgatctataattgatcatcattatgatatgaattaggtctttatagtaaatgataaatttgataaagacaactttattcatatcggtcattgtcatatataatctttattatatacaacacattcacttagatgtcatacacatcagtaatctgaattgagattacttgcactgaataacaggcatcagtgaattgcactagcaactattgattaaagattcctaaactttaacatattgttgactgttttattcatggctaaatgatcttaattctccgtacaactacaagtcacaacctcatataaattattcaatattaaatattaataatttagcatttatgcatatatcaaaatatttaactcttattaataatcataaatatctttaaaggcttttcaaggcataaacccttacaattttccacaagccctaaaattaaattgggtatctcccttaatcccatattagttatttgacccataaaagattttgctggtagtatttttatgaatggatttgccaggttatgtttcgatgcaatcttcaagactgtcacatcacctctctctactatatttcttagtagatgatactgcctcttaatatgtttgcctctcttgtggcttcttggttccttggagttggaaaccactccacagttttcatagtacagcaccaatggcttttctacttctgaaactacttccagatcaatgtagaatttcttcaaccaaaattctttgttagctacttcacaagctcctatatttttagcttccatgattgaatttgtaatactggtttgcttaatgcttctccggactatagctctaccaccaagagttaatagtgatctagatttcaattttttactatctttatttgattgaaaatcaaaatcactatatccagtaggatttaactctccaccataatatacaagcatgagatctctcattctctgaagatacttgagaatgtgctttataactatccagtgttttaaacctaaattagattgctaatgagtaacaatgcctatagcgtagcatatgtcaggccttgtacacaatatttcatacattaagctcccaactgctgatgaataaggttactttcttatgttctccatttcttgaaaagtctttggatatttatccttacatagagtaattccatgtctagagagtaattgtcctttcttggaattctccattgagaatattttgagcaccttatcaatataagttgcttgaaaaagtgctaattttcttttttatctctatagatgttaataccgagaacatagcttacttctcccaaatctttcatttagaatttttcagccaaccacttctttatgtctaataaccgttctatattgtttccaatacgtataatgtcatcaacataaagaacaagaaataacactacattacctttaatatttttgcttacacaggctttgtctttgttttattagaagacatactctttaatagtcatatcaaatgtgatattccaagatctagatgcttgcttcaatccataaatagatttaagaaatttgcatacctttcgatcttcccctggtagcacatacccttctagttgttccatataaatggtttcatcaagattgttatttagaaaagtagtcttgacgtccatttacgatatctcatagtcataagtgacaactatggaaagaagaatatgaatggatttaaccatttccacatgagagaaggtttcatcataatcgacgccttctcactatatgtatcctttggctacaagcctagatttaaagttctttaccttcccttcaaggcttcaacatttttcttcttcttaaaaatctacttacaccttgtaggtgtaatatcctcgagtggagtttcatatttcaaggctttgttggtgcacatggaatctatatcttgatccatggcattgctccactttttttgagtcaggatcttccattgcttctttataagtcaatggatcgtctatgtctatgatagagacaagaacatgtgcttcatgttcatactggacaggctatctcacaactctcccactacgaagatgtactggggtttccttctcaagaattgtggtgacctatgttagtcgttcaacaaatggtactgaagttgacagttcaaaaatttactcatttctaattttctcgatagccacttgactgtgtggcttatgacttttcatatagtcatgttcaagaaaagtagcatttgttgatacaaatactttgttgtcttgatgactatagaagtatgcagctcaagtttcctatggatatcccataaacatacataaatatagaaatgtttcaaaccggattttgttccattccatagttctattggagtgttgcttatacccttcgagggtacatttaaaatgtaagtagccgctagaagtgcgtatccctagaagcttagttacaatgttaagtaacacatcattgatctgaccatgtctaataaggcttggtttcttctctctaaaacaccattctactgagatatttcaagtgttgtaagttgggacaagacccattcttccagtaaatattctttgaatttagaatccaggtactcgccaccacaatctgattaaagtgtctttaattatttacctaatttcttttaagccatggctttgaagttctttaaactttccaaaagtttttagactttttggccaatgtgccttataggcttgtaacttctttttcaatgtggtctttaaaattttgttgacaacttccacttgcccatttacttgcggcctgcccactagtgaaaagctcttgattccatgttttgtgtagaaattagtgaagtgttaactagcaaattgctccccattgtcagaaacaattttatttgggaggccacaatgacacaatattttcgacaaaaaaatccaaggccttcttggaggtgtatgtattctttggttctacttctacccacttggtgaagtagtcgacgataacaataacatagtttactcctcctttcccagtgggaagagattctaccaagtcaattccccaaacaatgaatgaccatgtattattcatgagggttatttgagttgtcgaagcccttgggaccttggcatagcattgacattgctcacatttttagacttagtctatgtagtattttttcattgttggtcaaaaatacccttgctagatgatctttttggacagagttggtctacacgtgtggtctccacaaaaaccttcatgtatctcgtggatcactgcaccaatttcagtcccgacaatgctttttaagtacggtacagagaaccttatgcgtacaacccccgtccaagatgaaatatttaggagcttcataatggacttttcttgcggttgctctatctgtaggtaactttgcagaaattaagaatttataaattgagcacatccaggaggtggaatggtcgatgacatttacccctagtattttggtacttggtgcgacaagacgagatatggggaccttttcgtgttactctatttttggatctattgctaacttagccaatatgtccagaaaggcattcttgtccctgggcacctaccggatagaatatattttaaaattatagagttgttcttaagctttggagatataggcaaccatattttctcctttagtttgatactctcctgatatttgattcataactaattgggagtcaatgtaaacctcaatgtttttttaccttgacttccttagctagatgaaaagtaaagaccattgcttcatgcttcgctttgttgttggaggtgatgaatttgaatcggagggcactttggagctagtgccctcgaggagaaatcaaaataattcccgcttcataacctttttagtctaaggctccatcaaaatagactttccaaatcaccaaccttggaactggctcttttgatttgacattgatctcgatgcactccattataaaattttctagggcttgacccttaatagagattcttggttagtactgaatgtcaaatcggctgatctctttaacctactttggcagtctatacttgagaattttggcttctgtaggacttggcaaagagggtggtttgtgagtaccttaatggcatggactaaaagtatggtcttaacttccttgagactatcaataagaaataggaaagcttttcgatcatgggatatctggactctacatccagtaatctcttgcttacacaatacaccaaaagttgtacccttccttcttctcatactaatgcatcactgatggcttgatatgacacgaccaaatataggtacaacaattctccctcaatcggctttgacaaaatggtggctctagccaaatgttcctttaacctttgtaagtcttcttcacagttagtaatgttgggatcttacgccctaaataaaacctatttcaagataatcttatttgttatcaatagaagattagaagtcatttatgtttacatgtagtcattcaattttatggtttaatatataatttctgttaaatccaaaacatattgtaattcacaattacagtgatgtcaacacagtggaaggtaattgtgattatatgcttcaaaagattatgtcccgtgattcatcagtgcactgtatttacaccgatgtgatagtcagcgataaagtttacttacaccttggataagtgttatgttctttccaagacattggaaaagtatgctagtatcaaatgtatgaagtatacattggactgggaccgatattgatcttggtaaagatattataatcttaccgttgtat

SEQ ID NO: 294772 - DNA, 2076 bp, Cannabis indica
ataataataaataaatagaaaggagagagagaagaagtaacaaatggtagcaaggaaggaaggagagaatagtggatagagaaactgtagcgtgtgtaatgtgcaagtgtaaagcgtttttatttgacattaactagtgatgtgagatacgatattaaatttcgtgagtataatattttgtactaatatttgatacaattagaccatcatttcttttgaatatcgttaactttgtttgctatttttagaaagtgttaaacactattggtatctaatagtaataaatagtatgtaatagtaatatttcaaatgtaaaattaaaatacctttcacttgaagcattgggagtaaaaaaagcattgagttgaatcaaaaagaaagcttggaaggaagttgtggttgaaacggataatcttacacacttgcacaaaaattgagaagtttgattcctatgttttcttattttgggagtattatttcagattgtaagatgttattagatgagttgtgtgatgtctctgtcatttttgttaggcaatctgcaaataatattgcttatttcttgacgcgagcatatcctatttagttattgatcttgtaatcagaaatagtgatatttctcccgattttaataatgtaattttgatgcattgcgtttaataaaagctgatgaatgtttaaaaaaaaaacaatatagcaaaaattaataatgtaccaaaaaatatgcaaatttggcatataataaatgaacaaatattttttttttctaatgcacaatatttattttatgatgcaaattgacataatatttactatactataagttacacattattttgaaaatgaaagtcatcatttatatattaaacgaataattttgttaccaatctcggtaacagctcaaccggaacagtgtacaaattgaaaggcgatcagggtgagatatagaggtccttgaaaaggaatgagccgctacatttgctgatcattttacaaaataaaagaaaaattacgcaaagtacttaataaattcttgcaatcactaacaactttgccaaacaaggaaagcataaccacagagctacggatagcttgtacaaccgaaagaaaatccgtttctaaaactacactgagccacaaatgatctttgatccaactcaaagcctcccgaaccccaattgcttcggccaccacagaagaaatcgaaccatggaacaactttgtactgccctctacaaaaaagccgttggaatctcttgccacaaacccaacaccataggtagagctatcattaaacacatccgcatcgacattaatcataatattattaccgcttggaacacaccattgctccgccccatcccctgaaataaaactagtgaatagtagttcattgttaattttgagcaacacgccattgataaagtagtttgttgcagacgccacaatgctttcgacccccatcattttgttttgtcaaactttaatgataataaattataaagtaaattaatgataaaattattattattatttatatttttaataaaaatattaaataaatattaaatttacatcaaattttataataatatatctgagcacaatattaaaaattaatataaatttttaatttatattttgtatcaagtataataaaattttagcattgatggtcttagttagtaatttttcaaataatatgtgtgcattttagggatagcaaaataagtttcgaaacggtacacgaatccggatgcaatacaaattttatagtttaataattagacgatggttaaaagtgaatcaacatgatttgaaatagaaataggacaaacacgacacgacacgacttgcttaacacaaatttgacacatttaatattgttcttttaaataaaataaaatagaaaataattaataataatataattatatatgaatatataaacagtgattcaatattaagttaaaaaatttaaaattatttttttaaaagaaattgaaaatgtttaaaaaagtttaattttaaatttttaaatatatacaaaaaaaatatacaaaaaatatatatata

SEQ ID NO: 294773 - DNA, 2390 bp, Cannabis indica
aataaagttccagttgcctggatcgatcaatgaaaccccaaattgatgtaatatattttctatgtgctgctggtttaaattatacccaatcgtaatacttgggagcgtaaaatttctatttgtttggtctgtttgtttccttcacaattaaggcagcggagacgagctctgttagtgtcataccagagaacgatgtggcaaaaactgataaaactgaagatacattaaaggaacgaccatcaagaagaacaggaagaaagataaagaatctgtagctgctgtggaaaagccatctatcaagtctaaaattgagaagaggcttctggttttaccttttgaggcatctatcatagcaattttcttgcttgttttgcttggtgccttctatgtggtaaaatttcttctaattctaatttcttgattgaatcacatgcaatcatgggatataaataaacaacaaatttatctttaggagctttgagtttgagttaaactatttccttgtaggttcattgtgtctgggcagcagcagaagcgtattcagccccatccattgttctaacatctcattcccacgatggtcttcatgtttttgatgattttagagaggcttatgcatggctaagccacaacactgaggtggatgataaagtgagaacctccccgttttgttattgcattttgttccctgttactcagttttcctctcttattgtgaatttttcctactttttgaacttgaggcccatcgtctcgcctctgattgtacaattaaatattgcgcagctgaaatcgtgtctttactgaaccaaagagtaactgatgccttgtctttctaaaacttgttttgcaggttgcatcttggtgggattatgggtaccagactactgcaatggctaaccgcaccgtcattgttgacaataatacctggaataacacacatattgcaactgttggtactgccatgtcttctcctgaaaaggcagcttgggaaatctttaactccttggatgtaaaatatgttcttgtggtttttggaggttggctttctagatctattctgtgattttcctaaacaagaactggaactttgagatgatacgttgcttttctcattaggtctcgttggctaccccagtgatgacatcaataagttcctgtggatggttcgtattggtgggggtgtcttccctcacatcaaggagcctgattatctagtaagttatcagtcaaactgctaaaccagtaattggctttttaaaattttttcaaataagaaactagattatattggaagtttggattttatttgaaatgctaagagaatcttgacaatatctcatcttgtttctgtctaaagagagatggtcagtatcgtatcgattctcaagcaactccaactatgctaaattcgctcatgtacaaactctcgtattacaggttcgtgtttactcggaagttggtcatttcactcatttttttagtcattttgttcttccttctacattaatattgtgttaataattataaatctgtttttttctacagatttgtggaaacagatggtaagggctttgatagagtgaggcggacagagattggaaagaaatatttcaaacttacccattttgaagaggtaagaagacagaatcaatctcataatatgagcagaagtcatgagtacattaaactcaaagtcaacctttggcatattagttctccaatcttggataacaattaactttaataatcttcattgcaaaccctggaaacatatttaatagaaaaaacaaaatttcaagtaatttgtgattgttctccttatatagtacctccccaaatccaatgttctgataatgcattatggcttttgattataatgtaggtcttcacaactcaccattggatggtccggctatacaaactaaaacctccaaagaacaggattcgaggaaaaactaagaagtctaaagtacgtataattttttcttttcgccaacttgctcgcgcgttttgttttggacatgtattgattcgattttctcttgaacatgacagaaacttacaggtacaactcctaaaagaagcggagctggaaagaaaaatccttggctatgaaaattgagtagtcctcaacgtaattcgaagttcgggttacctgtaatccttacttataaacgagagagccttttagagagattgtggaggtgtagtggttaattttttacgatgatgctaattatagacaacgattttgcaggctcagtcacctggttttgtatctttttttgactcatcgttgggttaaagaaaaaagaaagaaaaaagagaaccatttttgttttactttcttttaatatattaatttaaaaggctccaactccaataag

SEQ ID NO: 294774 - DNA, 1327 bp, Cannabis indica
agaaataaaaccaaacccccaatctatcaaaaatccaaatactgaacttgtttattgtttcggtttaataaggttttcttaacctcaaatttgtttattgtttattgtttgtatatgaacaggtgggatgatcctcctgagcagaacatgagtatcccctgaaaaaatcaaaccaacttcttcttccctatctagcttatctcaacccacaattgttagctaaaaagacaaacatgcatacctttattgtcttcattcccggaagcattcaactgaccatgaatggactggttaaagatctagaaagtaagtaccaactgtcagtatcacagtggaaaaaatatttaaaatctttaactctttaaaatcaggaaatataaaataaatgaagtcgaatttcttaccttatttgaagcgcatacattgtacagaacaccacaaatcagaagcaaaaacacatgtttagctatatggttcatctctagcacagttaactcagaaaccctagaaagaaagaaagaacaaggttctatcagtatgacaattcacaagtaagaacaaaatagataacagatatcaccaattaagccaacattcactttatttcatcttttttttcattttcccaccaaccaaacgcatggcaacattcataccctttatgaaaagaagccaacttcacaaccatcaaaacatagtatgcccaaaacaacttatatatagtaacattaacaaacaaaaacccctagctttttctatgtcaataaacagtaacccagaaaactcgctagaaaaaaataaataaataagcgcacgctgcaaactaaaacgaaaaaatgaaagccaaaaatttcagctcataaggtcaaataatgatggtgaggtttatgagttctttggggttgcaacatgaagaaaaaagtaactacatattaccataaacatgttgatatgtataaatatatatatagcttttccggaaatgtttctcggaaagcaaacaaatgggtaaagaatagaagaagaaaggaaagaaactgggagagtgatattagcagtagttgcgataagaaggaaaacctggaatccaaagttcagagaggtgtttgagctccaaatgagaaagaaagtggggtattccaccattgttgacagtcagtgtagtaggtagagggagttattacgatgtttcttacagcaagtagtagaagaggacatgtggtcttttgctaaatttctattttggttttagctacaataataaataaaataagctttgattaagataattttattttgggaaatttgcagcaaaagtccttaaaaa

SEQ ID NO: 294775 - DNA, 4337 bp, Cannabis indica
aggttaaaaagggggaaaatgtacagagagcgagggtttaagtcggaggtgaactcggttgatcggaagcagcgaatcaacgaagtcttggataagcagttggagagatcgtcgccgtctacgtcttctagggctgtgggaatgaacgagagggtacagtctatacgttatggggaagactgttactccatctgatcagagggactctcgctctgcttctctctctaaactaattgctccgatggttcgtctcttcctccatccttttctttatacctaactcattcatttctttattgttattgataatctttttgagattacaaaagggtcgtagaaatgcaaaatgttaagttattgtatgaagcgaatctgtgatttttgttttgatattagaggatttcattaaatatttgattcgtgggtcctttgaatctgtttcatttctcctctttcattcgcataattgaagttttaattctttttaatggtatgttgagaatgtgtaacggaaagatctgttttctgttttaaagttccgaacttgcatatgaaaagtgaagtgaaggaaaaaagtaaatacatttcttggagtagtcagaagatattatttccttttattggagaccctttgtcctaaaataattgactttcaaagcctcattaaattttatatttatgattaatcttctggggtttgaccgattgtgttataaaatatactttttcgttcattgatgattttccttaaacgaatatatatgcttagtcatagtattctcgtgtttaaatccttatgcctgagaaaattaaacctgggcttaacgaattttcagagtgagtcaggtacactagttcatctgatcaatgggtgtctgtgaagtacactagaattttgtaaaagatatagttaatgcatttttatgcaagagcattaaagtgtccttaaatggttggatagttatataaatatttggaatgctataagcatgtaatttctgtctgcactatcttttctaatcacataattcataactatgatttgatttacgggtggtgaaatttttgccagtgtatctctaaacaaatgtacatggtcccaaaaacaatcaagggataagatagtactataggatgttaaattgtgttgacttgaagcaactaatatgtgctcattttaaatcaaaatatcatttcctcttgaaggaaaatagtggggtttcagtttataatttcaattttcactcgttcatctttgtttgcataacgaatgacctagtgaaattgcggggttctttttatctttcactttattgatttctgtttcgaagttaaagtgcgaatgtaaaaaaaatatacatatgaatataacagctggattttacctgcttgattttactttgttgtctttgcaaaatagaatggttgtactttatttagtgtataaatttcttcttagtgctatctgtttgcctactcataaacttaatttattacaccaacagttgaggaatctgaaacagacagtgaagaatctgatgtcagtggttctgatgtggaagacacttcttggatttcatggttttgcaaccttcgaggaaatgagtttttttgtgaagttgatgatgactacattcaagatgattttaacctctgtggcttaagcagccaagttccttattatgattatgctcttgatttgatcttggatgtcgagtcttctcatggtaagtttgtatgtttgttacttcatttcatatccttgtgttaattgtgcatagaatttttctaatattatctcttggaatatttttgctatcttcttgggagttatttgtgacaccttttttaaggtttcaagtcatatgttggaatgttggttattattctcttctgtacaatattacgtaaacagtgtttgaaaatgttcccacttcccgtactcactctagttgaaagctttttcgagagaagcatggatcctgtactagtttttcaaggaagtcaggctgtttttaagttctaatgaaatcttaatattttctctggcgaaagatttcttattttctacttctattcatttaaaatattcattttcttccttatttgtttcattttatggtattcacacctctaattataatatattttttcacctgaattttattgttaaggattaagaaataaaagaaaaggaagcttatggaatgatatatttgttatcaaaatgaatttcaaaacaaatatattcttacaataatatttttttaaaaaattgtccaaattatatacaataagaaattaattaaaatgaaaaactcatttgaaatagacatatactgtccttgcattaaaagtagacttttgcctcttattctactgtctggaaataaaagcaaaagctatctaaaatagcagcacattaggtcactcagttgaatactcataccaaaatgtgcaggcgacatgtttaccgaggaacaaaatgaattagtcgagtcagcagcagagatgctttatggtctaattcacgctcgatacattttgaccagcaaaggcatggctgctatggtaaggtttaattctttattctgtaattaaaggttcttgtgtcttccctttttttggtggagcgggtagaatgacattgttgcaaacttattcagttagacaagtacaaaaactatgatttcgggaggtgtcccagagtttactgttgtggacaaccctgcctcccagttggccaatcagacgttccacgagcaaccacagttaaaatatactgccctaaatgtgaagatgtctactaccctcgctcgaagtatcaaggcagtatccttatcttttcataacacttatatgcttttgcgtcgcagtatgtagcaacttgctaacatccatgccatctcatctcaagtcttttgtgatattctaaatcatcacaattatctttcttaatggattggtttgcaatttcaatatgcttacaatatatacttggtaaatgtttaggcttttattaggatatagacaatgtattgtataccatgatggcttttgatggcctaaaatttggtttcaagtctgtctgtttctcagtttctgaacatattcaaatactttgctgctacgtatgttattgaaccactccagaaatgttgcaagagaaagatattagctctgtttctaagtactctagaatgattaattactctagcgagcccatgcagaattatgtttgttcttatgtcaatacttgctctgctttcaccctattccttcgtaaattttatttgaagtttgtgcattcgggtctgattatcccaactgctgcatattttactttttatcgtaattgcagcgatatattagttttgacatagtattcatatggctggactctggtattaatttttgaagcttctttaaccgaatctagacatcgatggagcttatttcggaacaacatttcctcatttgttcctgatgacatacgggcacttaaagcaacaaaaggcatcccagaattatgttcccagggtgttcggattcaagcttcacaagccataatgctgaagtttcaaccttcatttttgtcaaagagtttactgaagaggacttgaaattgaagttgcatttgcaacaagcaagatgatgcatttgggaatccagtgaagcttgaaaacccttttcctatttgtcatcataatatagaatttggttgtgttgtggaaaaattgatattttatcattgcatatttacagtcaagtcaagaatctatctaattttcaatattagcttagcttaaatagcttgcccttttaggccagcttcttcttggtgtcttccctttcatagagcgcttttgcttatgtagtgcctcctgcccttttaatttttttacttgattttgtttttgttgcctgcccttcagaatgagattgttattgccaaagcaaatttttgacttttggtggtatcttgagttgccaaagtttttgctaaaatcctcattatcattgcctcttcttgaatctctttgatcttgcaaaaatgttataagcattcatcaaaaaaaatgttataagcacttttaatagaaaagttacttgagcgttaccaacgatcaaaattggccgaatggctcaagggaatgaggaaattatattctgtacttattttttatttcttattttaatttttacaggtcatatccaatttattaggaactctaaatttgataagttacgtgaggttatattggaaacttacaaaaatactaaaatttgggttaatttttacaaaaatattacattttttcaaaaatactgtgttt

SEQ ID NO: 294776 - DNA, 4969 bp, Cannabis indica
atccatttaaaaaatatgtcgagctaatccatgctcagttttattagttgtttgaggaacatgaattaggaatagaatcgaaaaaaaaagaagttatgagttcgactcaagacctttaaattattaaattattatttaattgtaaaataatattatattacattttttatattacattttttttaaaaaaaagaaaagaaaagaaaagagaaagcagttccttcctattctaacttccttatcatgaactgaaatgaaatgagtcatgttgttaggagttgccacgtggtaagatggcgcctaaccatttcaaattctcaccatcactcgccacgtgtcctccaccctccctccttctccatgtctttccccgccttcctcggttttcctctcacccttctctaatctgatcaagtttcttcttccactttcatcgattactgtttcatttctttccttttctctggttactaattccaatgaggcttcatttctcttaattctgaaaaatattgcaaattcagacacaatgaggggaaccccacctgggatttcgctcgtcagagccattagaggtaaagattggagccttacgagttacagatatgtgatgttgttagttacttttgtagcctatgcatgttaccatgcttcccgaaagcccagcagtatagtcaagagcgttttgtatccagacccgactaaagttaacggtctagtcactggtttctacccttggccgatcggtgaggtctttttgaagaaggaagaatttgttaacgagcacagaaatgtgtctcgagagaagggttgggctccgtttaatgggaaagatgggacatcgaagttgggggaaattgatctagcttttttgggatgttattctttggggatgtatgtagctgggcatttgggggacactttggatcttcgattgttcttaacgacagggatgattggaagtggtatttttgtgtgtttgtttggaatgggatatttttggaatgttcactcttttgggttttatctagttatgcaaatgcttgccggtttgtttcaggccactgggtggccttcggttgtggcggtgatcggaaactggtttgggaagaggaagaggggtttgataatgggtgtttggaatgctcatacttctgttggtaacataagtggttcacttctagctgctagcgttttggagtttggttggggttggtctttcattgttccaggtggattgattgtgatgggtgggattcttgtttacatgttcttagctgcttatcctgaggatgttggattctcgtgttctcaaggctcagctacaaatgaggaagaaagtcctattgagaaaagggaaagtaatggtggtggtggtgttcttccttcacatgggtcagtgagtagaagtagtgttggacttgttcaggcctgtatgataccgggtgtgattccttttgcattgtgcctcttctttgccaagcttgtggcctacacgtttctctactggttacccttttatttaagccaaacaggtaatatttcatgtattggtttttggtttcaattcataactattaatgttagagaccataatgcaactctccaacttgttgaatattagagagtaatgaaagttattacattcaattatgcgggatccgaatatttaattgcgccggtgtggtgcctttaggtctcgagtatttttattgggcactagtgctagacaccactggtgtcttttagcatttctctttaatataacagaaagagtaaggctaaagggtatctatagtgcttagcactctcgtcattgtaatattgttattggtgtaacttaatatcgggtcccacttggtttactttaataaatattatagaaaatcgctaattaattatagagttacactttacggtggtgataggcaccatctcatagcaatgctcgaaaatatctgcactagagagtttaagatttaaagtagaaatgatgatctcgggattgatgtataacgtttttttgtaagcccaaaattcaaatttttttaccagagtttaagagcttgttaggtttcccagttcgataaatgtgtagttgtacatgtgtcccgagcgtatgtatgtgcatttatcattgcagtatgacatttatcatatattgtgcatcaagtacttttgtataattaccctgctctctgtttgtatacatgtcatattttctttctaatggcttttgtttgtttttaacaaacaaatttaagatacacaaagaaagtattgtttggtagacgcactctcaatggatgtgtaattgaaagtacaaattgggagtttgtttatcattggatggaggacaattaagagatcattctactcattgtctcatgtgctataagtatgattgacttcttactcactctgcttagccacttgctgaaaagttcaatgataaaaaaagcaacttcatgtaaatcagacttggacaggacacacttatagctgaggctcgttttcaatggatatattgttttttttttttgtatggcatttctttctgcttgttatttaatgttagagagaaacagaggtgaaaagaaatgcattttaaaagagactgctgatgtattggtcacttctacgagtccctcttctgtgttcatgctcctagaattattccttgcatgagtgctcttaaatattttgttttgttatcttggttgtgtttgtgtatttgtggatggttcaatcactaagaagtgacttgttccttgtttcatcactccacagaaattggtggggagtatgtttcagtaaaatctgctggaaatctctctactctatttgatgtagggggcatatttggtggaatccttgctggatatgtatctgataagctccgtgctcgggctacaactgcagcctgcttcatgtatgctgcgattccttcccttcttctgtatcgctcttatgggaacatttcaaaaactgtcaacattgttcttatgatgactgctggcttgtttgtaaatggaccctatgcactcatcaccactgcagtttctgcagaccttggcacacacagttctcttaggggaaattctcgagcgctggccacagttactgccattattgatggcactggatctgttggtgcagctcttggccctttacttactggctttctttcaacaaaaggatgggatacggtatttgtgatgctcatgttaggagctcttattgctggactactgttatcccgtctggttgcggctgaaatttctgagagagcttccaaacagttgccagtttccaacgggcaacaaaattgtggaggtaaccctgtgttcctttcgctttgatagctagacaaaagtgttgatatccaacatttatgtaagttatatttttatattattttctcggaaatcaaaattgtggaagacttgactacaagaaacagaggcacatgtttgaataattccagacattttctagcagaaacaccgaacaattaaattgaaacaaaccaggcagaaaatttacttgttatgctatagaaatttgctcgaatgcatagaatttgtcgtagatatgcattgcaaggatacaagtttttgttgctgctctatcttgctcttttttttgcttaatgcaagagacaaggaatatataagcattttcagcatcaaattcaaatccattgaaggaagtaaaaaactttctttctaagattacctgtctactatttcatcagtcttcttactcaatacttatgtcttctattgcagcttctgcatctcaaccactactaggtgaccagaggtaatttttaagagatttggcctcctcaataaattttgtcataactgaagagactcatatttaagtgcccatgctgtagcagtgtgaaaatatcggtaagatatcttaaaccagattgttcttttggtcatattatatcattaaacaaaaatagagcacaagtattatagataattcaaatggttttggagagtagcttttggcacatactttatgttagtatgtgcattcttgtaattgtaccctcattttgtttaccactgtgcttcgtcaatgtcgggctcttgaagctggcatatggcgtatcgacacaaatcacagactgagttcaagtgaagttatagcttgctgaaaaaaatgcccaaataaaatggttttttttttgtttctttgtagagactgcatttttttgaagttggctttttgttctttgatttatttattattagtgtttttgttggtaatgttgttagtctaagatcttgtgtagtacaatccagactggtgttgttggtgcatttttttttatcgaacttggatttatcattacctattacagacccttcaagttttgatttttgacactgacaataactaagaagtgtattataaataaatggaatcattgtatatttatcaaccgatgggccttccaaatttggtacaagttcacatatttatttaactttaagcataggtttggtcaaatatttttttggactctagaaactccaccatggattgcatggtcatttctttcacagtttctggatctacggttccggtgactttggggtggtgttgctggtaggacttggcagactccaaagtatcgtcgtaacgattgttgttgacggtgaaaaatatcacacttcaaaatgatcggaaaaaaaattgaagacaaaaaagagagacggaaaaggaacctaaataaagcacggatacacaaaaatagtaaagtgtaaatgataaaagagtaattagcaacaacaatttttattcaattttccattatcaaatcgtgatcttattctattataagacttgttaatagtatttttcgaaatattattttttacaataatacaaataaatattttttattttttattaagaaaattaaaaatgtaaatataaattatta

SEQ ID NO: 294777 - DNA, 1188 bp, Cannabis indica
agtgaaattgaaagtttttaatacaatacaatttttatttactttatacaattcaattcaactgtgtttggtttatatgttgatggaattttatcacgtgaaataatttttttttaagatttgatcaaataaattaaataaaaaataaagtccaaaagttttcaatcaaatacacacaagtatatattaactattgtatgctctcaaaagtcatctatatcaaagaataagaaaatgtctttataaaaatttcttgttatatactcttgaattttgttattgaaaataattatagtacaggaatgtgcttcaattgacgctttacattgttaataacttaatactattagaagtttatgtcctatgatgctatagagaaatgctatattgggtggagaagagaaatgataaagaatgtgttgagtgagcataattattcattgattcttctcacacactttagtgattaatgaatttactttaatctttactgattgttgttttcttccatatttactgattgagataggtagagacaagtagggaaagggaacttgtctgttttaagtttgtgttactatgtcatttttgtttttatggatattttgaaatagagttatatatatgttgtcatgttaaacatccattttgtttgttaaaacttttgtcaatcttaagcattttgctttttaaactttatctttcatttaaatgtttgagctttctcttcccctattgttttcaaattttaatcgttgaataatgaattcattaaaatcacttgaataaaataatttctccaactaaagtaaaaagttacacctttattagttaaaagaaaaagatggaaaggcattgaatctctttcaatcccatgaaaaaaattcaaaccaggtaatcaactaaagaactcatgatacccttcattcattctcatatctcctggaccaaaaaaattataataattattaattattattctttaatatctcaattcttagaaaataagaggccgtatgcacttaaaaacacctctcttctttgtttgagctcataaagttgagatggggtaagtattaagtctcttccagttttttgttcacttgatcgaaaagtagatagcatagttgagcgtagcattggtcaaatcctctacaagcttctccagtgctacataagaataacaag

SEQ ID NO: 294778 - DNA, 1560 bp, Cannabis indica
ctttctctgcttctcaatcttcacaaagtagtgtacataaccatattccatatctctacgttaaacacataaattttatacaaagaaaaattaaaatgcatacaagtatagtaattaattacgtgttcttattaaaatttataaatgcacttctgttttgtttattaatttgcacatatattacttgtcctatacaatataagtacagttaaactggacttaattggatgatcatgatccatatattttttgtgaaacctagctaataattaatcaaagaaaactactaatatatacgtcctaattaattagagtgaaaaggtcgatatgattaaaggggaaaatatatggaagtcaacataaccgctaagacattttaaaaagaaaaataaatgagataaaaagaagaaagaaaaaaaaaatgtatacagttcgaaatgccattgttaccataggatcgatatgaaactggcacacgaaaactcacatatatgaccaaaaatatcgttttgtcttctctgaataatcacaaggttgagttgagccgcccttctcaattttagcatccgattgaccagtctttatataatatagcgcctcctggtgaaacccaaagttaataattaatatccatcgtcactttaatttatttaatttattttgtaataataaacaataattataaagataatattaatttgagtggtttggttaaattcttacaagaaatttgtttggattttgtctccatttctcagtacttgataaaaaaaataaaaataaaattgagtttgtcccctagctatagcattattctcctcggatattctagttaggtatttccttttatgtttttcctcaccaaatgtatctaatatcataactaaactaaaataaatccaataaatatattgccccgtgatcttacattctatcataacaaatttttatttcattagggaaggatagtactgtatataatatatataagaaacttttatacataggtgaggcatttgtaatagttactcttcttgtttttttagttatattttctctaatatcgacaggacttataattttgttacccataatgtggttaagtaggcgttttcccacaagttgttaatttggtgatatccaccatcccttaaaacatcttatataatgaccgtgatgtctaacttgttgtttaattaaatacgcttttcatcaaaaaaaaaaaaaaaagcatttaaaatgctactctatttggtgaagtgcagagtatatattttatgtaattggttgtaaatcctgccttaaataatcactgacaaaggaagttctttttctttagcttacatcgtgaattggaacattttcaaggagcacattaaatttgttgttacgctatcattaaatttagtgtcaaaattatttcaactcctacattgaaaagcatgcacctgggcttcactacaaaaagtctaataaaaaaattgtgactaattataaattaatattcttatgtgactaaaaggttcgtgactaaagttatcagtcacaaaaatcacaatt

SEQ ID NO: 294779 - DNA, 2454 bp, Cannabis indica
gctgccagtcttgggaagctcatgtgaatctagaattggtgttatcttcttgggaggagctgatgatagggaagcactagctatgggggcacgaatggctgaccatccaaacatcaccttgacgatgactagacttgttgccgatggaaattttacaggtaatgatccggaagaaagaaggatggataatgagtccttgagcgagtttagacaagccatgacagataactaccgggttacctacatagaagaagtcataagggacggaagagggactgctgcagttatttgttccatggaaaacagttatgaaataatcttggtgggaagaaatcatgataagcagtcaccattaatgtcaggtttcgacgactgtgttgatcacgcagagttgggagccattggtgagattttggcttcatcacattttaagggcaacaccacaattttagtggtacaacaacgccccatagtagtgaatgagcatgagtgtagtagacaggaccgtggagtcccatattcgataactgatgaagaagagatgccaatccaagggagatctccaccgtgatagtatcagaagaatgtaacctgaaaagcagaatagatctttaacatctaattaggttcacagcaccccaaataaatacccccttagcatgaacttactacaaatagaatagaaacttcatcttcatttcaagaaccagcatgtccaattgcattgatgaccaacactgtgtaagaaattgacatttcattgcttcttatttccatgctaacaagtcaacgtcaaacttcttaactgcagaatcatgtactatctactaatgaaaagttcacctaggtggaaatgatctactacataacttatttccagaaatgttgccaagacataaattttgctccattgcttcaagtaactgaagaattgcctctggttttgaggaagatgaaactgatgctgaaagtgcagaagatatgacttgcagaaatgaggatgaagcttgttgaacccatttcatgtgtttaatagcaaatggaacttcttcagcatcaactaaacatttaagcaaaatgacatgggagtctgaatgcacttgatgacattcgagacggcaaagtaactcagaagcagcaaggaaaagacctgctcaagggtacggagatttatatcacaaaagccattataggaaagcaataatccaaaacaatgtagagaactccagagattacaatacaccacgaagtgtgaaattttgtaatgttttaaaaaaataattaataaagcacacacctttttggcatagataaagaatatatgcatccaatacattttttgcaagcatcaagtcctgttttagagacatgttcaagacttgaaaagcagcttctagttttgtttcgtcacaaagtccccgaaccagagatgtgtaagttgtggcatcaggtgccacccctctttccaacatgtggtcaaagagactttgagcctcttcaacttgaccaacttctgaaagttttcgaataagggtgttgtacgttttcaaatttccactacaaccactggtaaacatctcatcccacagtcttttagcaggccgcaataaatcttccctacaacatgcttccatgagagaattataaaatgatatgtctgggttcaaacctttctttttcatatcctgaagaactctatatgcttcttttactttcccagctttgcacaaaaatgataccatcacattgtaactctccatatctttgaagtaattatgacaggacaaaacttcaaacatttctaacagttcatcaatcttttcatacttacataggttcctactcaagttgctcaaagttaatagagttggcaatcgccctttcccaaccatgaaattgaaaaacactagcgcagaatcagaatcaatggtggacactgatccaatcagagcattgagaacatcatcctcaattggaaagtttccactaacaattacttcacccaactcttttgcttcatataatctcctctccataatcaaacataagataaagtctctatagtcattagtccttggagctaccccaagctttctctttttctttaaaaccttctctgtctcaaacacattccctgttgatcgaaatgcttcggacacaatcctatacgccatgaaatcaggtttacagttcctacttcttagctcatccaaaaggaacaatgcctccgacactcttgaacccttgcataggccatgaacggtcaaaagagctataaccgacccattaatcattgactcacatcgtttaacctcatctaacacacttaaaacaacacccaattcagctttctcacatattctccatataaacacaccaaatcctagagtcgtgaaagggacaccttttttagacatttcatcgaacaccttctgagcatgctcaaaataacca

SEQ ID NO: 294780 - DNA, 10642 bp, Cannabis indica
aaatcaacactaataaaacaccatattcaacatgtaaatctaatatgtaatgaaacctaaatcttaaatctataaatgtgcactaaaaaataaaaaataaaatattttgtgtgatttacttgttacaatacttccaattaactgaaaacaaaataccttttctcctttggttttaaatttaagatttaaggcctgggcttttctgttttaattttgacaagtttcacttggtaccagatttagttgtaaataaaaatatggggaaggatttcttcaaaaaatcataatggattctctgatttagctaaaacaaaaaatcataatgtaatcctttgaaagtgaggcagaaattaaaaaatataaataaattttacatctatggaactaaatagagagtattaataagcaatggattttttaactttaaaattgtccatttgtaaatttatgaatagctagtagtatttttcacactcttgatgaactacaaagttccaaataagtatatctataaccttttattctattttattatttaatgaaaaacctccaagaggaaaactacagtcaaaggggcgcccatagaaaacacaaaaacaaacccaaaccccaaactagttacaacaaaacctccaattctcttaaacattttcacaatgtttagccacacagcaactcagaactttatccattcccacaaagatgcaaaaggactctcattaccttgatttctctataaccaaaccacacacacgaaggtcagcactcacaatttcaaaacagttttgtaaatcccaacaaaatcttgagccacaaaataataacttattggaaattggaatagaccaatatgatttttgtttatacagctccttcaaaacctctacaatcattgtttactgggtggactattgtaaaagaaacttttcatctattatcattgtatggagaaaaaccaggtttaaacagcacacctatttagatcctagcttcaggtacactagtccaaaaatcaattactatctccaatctaggaatgcattttattacttgctaatacatgcattttacagaaagtttgaaatgccatcttaacaaatataatcaaggtcaggtaagctaacatacagcatcttggaacataccttttcgggtctgttcgctcaatggatatcttctttgcttttgaggggaggggaggctcacctcctaagaggggtttgacaaaatcaaggtccacagatgtttgggctatggcaattgtaacacctagatcgttggaacttgatgcaacacgttctatgcactcgctcgaacttggaaaatcaggaccataatgttctcgtccatgtcttccattcggcagatctttctctcccgggaatggctttgaaatattttcatctttacatgatagagaatctagagcatgaagttaattcttagtccagcaaacacttaaaatacttgatctttacattattgaatgaaaatacatacacacatatatatattgaacaatacttaacagttgtcaatatttactcaataatggttacatagatttcagctgttagatctttattcaatagttatgatcaatttgaaaataaccatacgaatttcaaatttttgaaaaccactataaagactccatatacatatacacgtataaagtaaaaaaactgggtttctcataagtacatctacagctctatcaaaacagatccaacattttaattgttttattactatgtaagatatttagtttataggaaacccaacccaatctagtttcaaccactagttgtgtaacacaatcttcacaaatgattttgaccttacgtctgtcgtgacatatagtgggaacaataaacactgaaattatcacgagaacataatatcctcaatggatttcatattctcagcagaactcaaacagatgcaagacaaacagacaatgcacaatattcaagaacagcagaatttgaaattgtgatgtttccagattacattgaggtttttgatgtaattgagaggacaccttgttctcatttatttcgtattctaaatagttattaacaccacatcctctgtttctttaagaaaagaatgtcagaaatgcggacggcagcaacttttgttaataagtgtgacacaatagcaatttgtttagctactaggaatgaacttgagacatctgcaaaagtcaggcttactcaagtccatccttgttgctataccaatgcccttggggcatgctgcagtctcatgtcaatatgaaatagggattcataccaaaaaaaaattgttttcattttctggttgaaagcctagaaaactaccttcttgttacctagttttcccaaggggaaaaccatagtgttaaggaataaaaaattaaattccatcatagtttttaaattaataattacacataagcacacacacaccaaaaaaaaaaacatacttggaatattcattcttagaatgtaactaaacaagtaaaaaatagtcaatactggaaagacaattggaaaacctgctccaaggagaataatctttttttttttctaaaagaggttataaatgaacttatatgcgaaattctgaaatgggatatgagttcttaagatttggagtatataattttattttatttttgttcaatatatgttatgctatcttttgcataaaataatatcaagccaaatgatttttcaatgcaataactcagaggttatgagattgttaacatcaaagttaggatcccaccctaattagatttgcatcagtaaagaacataccatcatccttctccaaagcacccgtttgtacattttcactaggtgagtccaactccaagaattgcacattaacattattttcattctgaacaaggttccttcgccgacaccttcttcgttttgagctggacaaacaatttttttcaccttctaaactctcaatattttttaaaaagtataataagttataatctaaagtagtaagttgtacccaaggatttcaaaccgaccagaagaagaatgtttgtagctgtggcactgccctatctgctatggtctgcatggaaagcatattaccaaggtagtataagcagatatcttgaaaagtaagaagagaaaaatatatacatgtcagtgcttttcaattactaaagtagaactgttgctatgttttcaaatgtttgacaaggcacaaatcagtgggaaaagaatcaatagaagcatacattcaagatacagtatgatgttattaagataatgtgatgcctgttcgaatatattagctgtgttaattgtatttgggtagtttcctatttactctatttagttagtttcgtatttactctctctaattttgtatatatatacatactattctattaaataaaacacgcaattcattcaccattttttacatggtatcagaacaaaatttgaaatttgaaatttgacattagggtttaacccaaaattgaggtttgcaattagggtttgttcttcatctatcttaaggttcattttttgggaaacacatttagagagcacgtgagctctcaccgtcgccaccaacggacaacccaacctacaatctgctagtcgcaggagtttggtgcccaaaaggcctacgagtgggccccacgcgccgcaccattacgttgccactgttcccgggcgtcgtcgtgtggggccacatggcactttccaaatcactgtttttcttctcgtcgttctcctcgacctcccatatggtttcgttgtccatttttgttagtacgccttatatgcttccctgatttgtgcttgtgaaggtttgagttctcctattttggttgtgagatttggattgttggctcattagctcatttttttctggcttgtctcaatttgtttgctcttttatcgaattttttggttggtttattgttttgagttactttgattggatggacataatatttgtaatggcttctagaagaccagttcttgtttctgcagttgaatatgccaaattcttacagtatcaggagtctcataagtattcattttcttctatcactactattgttgattcaggtatatcaaattcgtgtcttctttcctcgtcttcccaattggtcattgattctggtgctatagaccatatgacaggtaattttagattcttttctaatcttcaacctcatgcttccacttctactattaccttagccgattgtttttaggtctagtacaattactcctgctccaatgattcctttgtcgtttgtcttacatttgcctactttttcttttaatttgatctctgtcagttaacttactcgtgatcttaattattgtatcttcttttttcttattgcttatttcaagatcttatgacgaagcaaattattggtaaagggcgtgaatctggaggcctctacattcttgatacaccaataccaaaatcagttacttgttctggtgtacaatccccccttcgaggcacattgtaggttgggtcacccatctcttcctctgcttaaaaacctttgtcgacaatatagtaagttgtcttcatttgattgtgaaccatgtcagtttactaaacatcatcgccttagttcaagtcctagagtcaataaacgtgctagtgttccttttgaattagtctattctaatgtttggagttcttctcctatcttgtctaaacctaattttccttattttgttacttttgtcagtggttattcttgtttcacttggttgtttttgatgaagaatcgttctgaattgatctctatttttcgtgccttttgtgctgaaattcaaaatcaatttaatgtgtctattcgtactttgagaagtaataatgccaaaaggtacaaatctattttatttcaatcttatatggctcaaaacgacatgcttcatgaaacatcttgtgttgatactccatctcaaaatggtgtaggagaacgaaaacatagacatctccttgaaacagctagagctctcttatttcaaacgcatgttcctaaaacgttttgggtcgatgctgtttctactgcattttttttaattaatcgcatgccatcttttgttcttcatggtaaaattccttaaaaaattatttttcccaataagccactatttcatattgagccaagaatttttggtagcacttgcattgttcgtgatgttcgtttacaggtaactaaattagatcccaagtcattaaagtgtgtattccttggttattctcgtcttcaaaatgggtataggtgttattgtcccgatcttaataaatatcttgtttctatcgatgttacttttatggaaaatactacttatttttcatcttcacctactcctactcgtcaggaggaggataatgatttgttggtatattctatcacatcttttgcactagacacatgttctgacgagtctcttgttcccccacctgacttggtcacagctcctgacatgcttacacctccgcctcctccacctccgcctcctattatagtgtactctaggcgcccgccccctctgcctcctctgtctcctatttcatgtcctgcacatgcttcttcgtcattggatccgaaccccagcaatgatcttcccgttgcacttcgtaaaggtaaacgcaaatgtacctatcctattccttcatttgtttgtaataatcatttgtcctcttcttcttcctctttcattgcctctcttacttttatcactattcctaaaactattcatgaaaccatttctcatcctagttgacttgctgcaatgatagaaaatataaatgctttagttgcgaatggtacttgggacttggttcatttaccttcaagaaaacgggtcataaggtgcaaatattttaagtcaatccataaggaacaattgttcgcttaaaggcccgtcttgttgccaaggtttatgctcaggcctatggagtgaattattatgatattttttctcctgttgctaaattgacatctgttctactgttcatttttatggcagctactcatcattggcctttgcattagcttgatattacaaatgtttttcttcatggatatcttgaggaagaagtgtatatggagcaacctcctgggtttgttgctcagggagggttagggggagttagtcatcttcgcaagtctttatatggtttgaaacaaagtcctcgtgcttggtttggtaaatttagccaggttgttaagaaatttggtttgttgaaaagtatgtcaaatcattctattttctataaaagatcaagtgctagtattattttgttggttgtgtatgtggatgatattgttattactggagataatattagaggtatctcatcccttaaatcatttcttcatacctagttccacacgaaagatttgagggtgctcaagtatttcttggaagttgaagtcactcggagtagacaaggaatttttctatctcaaaggaagtatgtacttgatttgttaattgagacgtgaagatttggatcaaaaccttgtagtactccaatgaatcctgctattcatttaatgagcgatggagaaccatttaaagaccctgcgaagtattgcaaattagttggaaagctaaagtatcttattgtgattcatccagatattgcattctcaattagtgttgtcagtcaatttatgtcatctccaacaattgatcattggaaagcctcagagaaaattttgtgttacttgaaaggaacacccagacgaggtattgtttacaagaatttttcagatgcaaattaggctagttccaaggtacataaaagatccacttcaggttattttgtctttataggaggtaatttggtctcttggaaaagtaagaaccaaaatgttgtgtccggatccagtgcagaatgagattataaggctatagcacagtttgtgtgtgagatggtatggatttatcaacttttgactaaatttgggtttaaaacttcagttccagcaaaattgtggtgtgataatcaagttgctcttcatattacctcaaatcctatgttccacgagcgaactaagcacattaagattgattgtgattttgttcgtgagaaaattttataaggcctgatctccataggatatgtgaaaattagagaacaattaggagatatttttacaaaggctttgaatggggtgcaggttgaggatctttgtaacaagctgagcatgattattatttatgctccagcttgagggggagtgttagaatatattagctatgttatttgtatttgggtagtttcctatttactctatttagttagtttcttatttactttatttagttagtttcctatttactctctctaattttgtatataaatacatactattctattaaataaaacacgcaattcattcaccttttttttaccatgcctaaaaaacaagcacagggtccatatttaatgtatgtgttatgaacaagacaaccttttttgaaggtttgacatgagaaatccaatcaatatcaatctgaaacataaaaatcttcaataataattcttaagagaataaatgtcctgacctcagataatacatctatattcactgaaacgttcactgcctgatactcttcagtcacctacaaataaatgtgtctacatttagcctctataaagttatgagaaagcaacaacttgatattataaattacaaacccaatattcaaagttgaaaaggtcgtgtgaagaagacaagtgataacgcaaaccctgcaagcaaaaaattaagctcctttaatatcataccaaacatgtaatgcaattttgaaagctaagattagtatctttctctacatgatgaaacaaaatgtactaaagaatataatacgttataaaggacggaaaaacataagcttctaatactaaaaatattatgaaaaaatgacctcatagcagctttctaagacaaaaaggttgagaaaaaggctgaattcaggagttacagcaacatataatgacaaaagagtcagcttctattgtttaattagatgaaattatgataatgaaaatccttattgaatataaaagacaatgaaacaagaagtaaaattaaaactctgaaaagtgagaaaactctgtgtgcaataatagtacaatgagatatatatcaagactgatgtctatataatgcctattatcaagaagaattgacaataattcatataaaagtcaaatatctgttcatcatgagaatcaatctaaaaggcttccataacagaactacaattcatgtcctaagacaagaaaaaacacctacaaagatggtaatcttatcagatattatctacataaaatgccctatgctttgttcatgaagcctcaaggactttagattcgcttgaaggaaaaatatcatattcaaaataccttaaagctggcacattgcatcaagcaaaatggacaagcaaagtcttcagtcactgtgttagacacgtacacaaaacagttagtattaaatcaagattgaatctaaagttttaactttgtcggcaatataataacatatgagacaatattttagaaaagtataaatatctctgaacactgtcaaacatgaaaccaatattttaggaaaggaattaaccaataacaagctctgtaattcccgatacatactacatgctctatacttccaactacatacataactcccaaaaatgcaactatataaccattcttcttagcaacgtaattcttgaaatcagaatcctctaacacaccatcctcagttctcactatcccccattgaagttgaaaattacttctttcataccttcagtctttcgaagcatgttgttacagtccctataattgaatattacagttccagccctcaacctacacaattatttaaaaaacaaactaattgagcagccaatttatgcacaaaacaatcattacaagagtgaaacaagtaagaaaaattacataagaacttgctttaagctttaattcaattgagttgcatagtaaattatatttatcaaactacagttttgaaccaatccttgagtattactctggcaaagtgaaaagtatagcaattaaaccatctgaattcttcattacaccaactacttaattactgaaaaactatatggaacctaaaatagtagtcttgaaaattctaacacaaggcgagcagtcaatgaaaaataaaaaacaaaaaaaaacttagcttcaacaaacaacatactgaaacataatttggcagcattcagcatctaacttgcctaccaatgacccttctcaattttacatatgcaatatgttaagtaatcagatgcatttgggtagtactgcgtgcacacgcagctgtgatagagtatgaataaagaaatgaccataaaataggccatgaaaatgctaaagaccattgaatcatgggacttggtatgtctccatttattatatgctaaaaataccaaatgagcagcaaagactacaatggagatcagagtacatcaagcttttgctaaaactcaacagacaatacagaaacctctactcaaagacttcagtagaattgaaaattataatattatgataagaatataagagagagcattaaaagataactgtaactaaaataatacctccttttacgccttgcttgaattttgtaattcaaacatctccgaaggaatgaaggctacaaagagaaatgttctcaattagaaaatagaaattaagctaagggtaatatcacaaacaaaaattctaaccagacaatgggaattcaatcaaacaaaaaatataacgtttatagcatcaatatgaagatgaattaaataaagccaagcccaaatatcaaaatgactccagtttataatatcaaatagtttaaaaactcatgctttcttgtttttgtgagatcaaattcaaagctaaaagttttacattcaagcacaaattctgtacacttagacatagtccaggttgcattataataataaaaaaagaaaataacagtaaaaatcacacaattatacaaatcaaaagaatcccaattacactagatacgattccacacaatatgaaaataatgtcgtaaaacgttacattatcaagggcacggcatcgaagaatgttgtaaagctcaactggtttacaatacacaagcagagtctcttccacagccactgcgtcctctacagacaaatgcacacaacagctctggcgacacatatcttctcttatctgaataattgtcataaataataacaaaatcccagattcacaattcacctctataccacaatatatttatatatatataatctctgaaaacttgaaaagaaaatttgattgttctgagaaaaatgttattactgtgtacaggttaatgattagattaattaggaagatgtaggaagctgcttacggatttggaaagtccacggcaatatcgccggcgatcccaaattttatatatgtataatatatataatataatataattatattctcgggaaagggtaatataataggataataagtaattttgttcggagaattgactaaaaaaaaagaaaaattattagtatcaagtatttattaaatatctgtctatataaaa

SEQ ID NO: 294781 - DNA, 4424 bp, Cannabis indica
tgcaacaaaaaagactttttttgggttggattttagttctgaatagctatatataaattcatcaaaattgtttgacttttatttgtttagaaatgaatttctgtcttttacaacagataaaaatgttcccttttttttttttggtttttctcagaattgtagaaaagtttgctttagtgagattttaatgccgattgtgatatgggtttatgttgtaaaaagtaaaatttaattattggaattcagttcttgatctttttttgaccatttaataatattttcaaatctttaattcttatgatgctaaaaattgagtctttatatttagtatcatatcaatgtgatgatgtaattgctcataagctattgaagggaatgatatttatttagtttggattaaacctttgttgctttgtgtaattttctctaatgtatattgtttctgttaagtacagtgaagatttaactctttatgttccttttgattatcctcttcgaatcagcaaaccgaataaatgaatccttttacaaatcattcctcttcaggttcatttttcatttcttgaacaaattatactttggctaaacttagaccggaatgtcctcattattgttactgtgtcttgtaggcccaacagagattccaggtaggaaacattcctaaagaaatgggtcgcggtgcttggggaactaatgcttatcgtgcctcgagtgatgctaccttgttttcgagctcattacctgttcttccacatcctaagtgtatgaatgtattttgtttatttaacttttgaattgttgtctagtagttgttttcttatctatttgcatacacttgcagtgaacttgaatgatattgggggtagctatacgtctgttgatgatatctcgtctggtatagagaaacttgaccaaaatatcgaagatgatgctttactagaagatggtaaaactcatgcgattggaaatttgcttcccgatgatgaagaggagctcttagctgggattgcagatgatttggacttaagcgagttgcctgcctcgttagaggacttggaagagtatgatatctttggtagtggaggaggcatggagttagaaactgatccacaagagagcctgagaatgagcttgtctaaggtgaatttatctgatggttctgttgcaaacgggctgcctccttatgctgttccgaatggtgttggaactgttgctggagaacatccttacggagagcatccttctagaacattatttgttcgaaatatcaacagtaatgttgaggattctgaacttaaagctctctttgaggtactttgattttgtcgttaatcatttttcgacgagcacacatacctctaatgcctcgagctatttcaattctagggtctaaattatattctatttgtttgttttatcattttgtagcaatttggaggtattagaactctttacacagcctgtaaacacaggggatttgtgatgatatcttattatgatattcgtgatgctcgaacggctatgcgtgcattacaaaacaaaccactgcggcggaggaaacttgacattcatttctcaattccaaaggttgaaactaatatttcatacatttgttttctacctatttaacttttggcatcactttttgacttttgttttgttgaccataggataatccctcagacaaggatattaaccaaggaacactggtagtttttaatttggatccgtccgtttcaaacgaagatcttcgcctaatatttggtgtttatggggaggttaaagaggtatggtatatctttctaatgtctaaactcatttatctatgcttttatggtgttttaacatccttttggtatctattggacacaacagataagagaaacaccacataagagacaccacaaattcattgaattctatgatgttagagctgcagaagcagcactcaagtcattaaataggagtgatatagctggtaaaaagattaagcttgaacccagtcgacccggtggagctcgtcggaagtgagtatatctgttatcatttattaccctatttagttagtgtccactaaatgaattttttgttgttgatgctctttgtttcattactgaatttgctgttgctgatgtaaaagtctaattttcgtctttctcggttttggttctttgttagtacctagttatgtctattgaaacaatctgtctttgttctgtactttttagcttgatgttgcaactgaatcaagagcttgagcaagatgaaactcgaacctttcgacatccagtaggttcgccattaaccaactctccaccaggtaaaggtttttgcaagaggattttgacttgcgagcaaatggcgagttatgagttgtttataagtataactccaatttttttggtctaaaaatcttgacaggtaactggatgcagcagtttaacagtcctattgaacagagtcccatgcagagtattagtaactctcctggttttaagagcttgagcccaaccaacaataatctgtctggattagcatcgattttgcatccccaagtatcaaatactgtgaagatttcaccgattggcaaggaccatgcgatcggtagtcatgtggagcatatgtttaacaatggtagctcagtgcccgggtcatcgtttccactatcaaattcatatcccgagctgaagttgggtgacttccatggtagtgcaccgtcatttggtccttcaacatcaaatggatctagggtagaaactttatcagggccacagttcctttggggaagtccaagcccatacacagagcgtgccaattcagcttggccaagaacaagtgcgggacaccaatatacatccactaacaaaggccttcactttccaatatcagctcgccaaggttcttttcttggttcgtcccaccatcatcatgttggatctgctccctctggtgttcctctagagaggcatttcggttatttccccgagtcaccagaaacttctttcatgggtcatttggcgtatggaagcatgggcttaggaggcctcaatgacaggaaagtattggcgaatatgggtcctcgtactgctgccatcaacgctggaatgtcattaccgggaaacatgtctgaaaatggttcttcaaactttaagatgatgtcctctgcaaggcttagccccatgtttttaaacaatggctcataccatggacaaccatctacaaccattgatggttttgctgagcgtggtgcccggagcagacgagttgagaacaatggaaaccttgttgatagcaagaaacaatttcagcttgatttggataaaattatcggtggggaagacacccgaacaactttaatgataaaaaatatcccaaataagtaaggctaacatcttaaactccacaccctattattatctaacttcgtttatggatatggtgactgataatttttgtttgtcttctagatacacttcaaaaatgttacttgctgccatagatgaaaatcacaggggtacctatgattttctctatctgccaattgactttaaggtaattatttgatatatcaaaagagaatttttatataaagttatgaactttatctaacttctttcatagaaaattattactgattgatattcctttctgtgattgcagaataaatgcaatgtgggttatgcttttattaatatgctgtctccttctcacatcattcctttctatgaggtaataatattcctccatttttgttagatgtattctgattggtccattatgttctttcgacttacctaagagtcatttagtttgatcccataaggtctgaggttcgagttctttctgggtacctacatagcaattgttatagttttttggtctccaaatattgtacggttaagtgaggattctaatttcaaagaagaaaaatttcagattgccttaaattcctaaatttgtgatgcaggcatttaatgggaagaagtgggagaagttcaacagtgagaaagttgcatctttggcatatgctcggatccaaggaaaggcggcccttgttactcactttcaaaactcgagcttaatgaatgaagataaacgttgccgcccaattctcttctattccgagggtagcgatgaggtaattaataatactcgataatcttttgatgaaagccaatggtgttttcaagttaaattcttaattctcgatgattgcaaactttatgtcattgtgtttacgctatgtaggttattcaggaacatcttctctcaaacagtttgaacatccaagtctgtcaaccgaacgattcacacttaggtgattcgttggatagtcccgccagaacatgtctttcatgacaatcccgaaaaagagtcaatagtcatggcacaaattgccgctgacctattttgattgcggctgt

SEQ ID NO: 294782 - DNA, 2299 bp, Cannabis indica
gtactacatcttcctttaacctgttttaaggctgaacaccggtcactgcagtctgcgggtattgttgtgttgtgtgatactcattatttcgctcacagtcccaagtctatgttcttgtagtaattcctttttagtgttttgtgataaatgatacttttttcactttgattggaagtttttttgtttttttttttttttttttttttctatgcttggtcccacatatatttgggtctatttttttatcacaatcgatggtcgtgttttatgtgtttgtcttgttctacagtatacaggaatctatgcgttgttgtagcattgggacaattcttttcttaatccgatcaacataatcaagtaaaaaactaaccaattaatttaaattatctacaactccatggataactctagtccttgatttaaataatgctctttttcaattataaatcttgaagatatttgcttgtccttaattacttgttacggctcatccatccccagatgtaaaacactttgttttgcaaaagtgtttccaaaaacaaattatagttgggttaccttgctagcagtacaacaactattatttgctgcataaaataaaatttcgttgctaaatggtcttttgcttttcgtcttctccatataacgttattatggtctcttttaatttaatgaattgaaacctttctctaattgcagcagccggttgtaaatttgaggcatcatatgcttaaattttactcctcaaagaccatttttcactttgctactgaaattattttaagaaggaaatcttagcagttttctttttcacatggagatgacaaagaataagtttcatgaaccccttatataaagaaaagttaatttcacatttctatgaaaggaaagtttgtaatctctaaatccctatcgattatatttgtatcgttaaatggaagagtcccacatggaacacgcataagtgaaggtggaggttagtagatgtataaattaaacataagtagctctggattaattacttacctggacggggtcaatggtcgatcaagaaggaccatggcctgggcttgtgacttccattgcacttaggaagggtgcttgtccatggtctcctcaagtaggagaactaacgtcataatttgtggcagcgggggcctgcgttcgcgcggcccctctctaattgtatctcaatttttctcttctacttttttcaatgtattttagttcttaatgttatatttttgggagctatttatgatttttttggtaagatattaatgaatttttaaagcttattcctatctgtataataaacgtatgttaagtttgttttctattgctacccattttatctcattcatgaaatctttattaacacccaaattccaaaatatatttatatatatatatatagtaatttgaacaatttggataacatatactatatagtcccacatcaggaaagaacaaaagaaggggtcaggagtgactaataaaacaagaataagtagaaatgaaaaacttacatacctggacggggtctatgggtgatcaagaaggcccatggcctaggtaggtggcttccattgcactttggaggtgcacttgcctaacatctcccattcgaggagattgtacgtcgtaatttgtggtagtgggggctgtgtacgcgcggcccctctctaaattaatttccaatttttctacatttatgtgttttttattgtggcaatttgcttattatgtatattgaaagtaccccatttttctactgtttattatattttatatatattttttcaattgtggtaattagattatgtatattgaaagaaagtacatgtttgcacaaaagtgaaaatgtataattcaacactaaaattaagccctctccgaaaaaaaaacactaaaatttaagttatcatatatattatattaatgtaatcaatgtagataagagaagaattaagatctatggtgtctcataatgcaataaactaatctaattgtgacacatcaattgatttaagtattttaagaaaagaaaaaattatctacataattaatggaatctacaaaaatagttagttgagttgacacacttagattgatttaatattatgtcacatcaatgtttaacaaattatcttaattcataagataaattgccaggagtgcacaacttactcggtatttaagctgtgcaatcccacatcgcctgggaaggtcaagcgggatgattctgagactgtgtaggtatgtgactacataattgaagagggcttaaatggattga

SEQ ID NO: 294783 - DNA, 2548 bp, Cannabis indica
cacggtaacaacacatatcaaacaattaatgaataacgatattaattatcattcaaattgtgtcaattttatatctttttttgcaaattatagtaagttatttaattacctaaagtgagtataaagggtttgcctaaacctaataactggaaagacaaaataaaacttgtgaaaaacaagtgacccagagtctaaattttgctcggtcacttgggggacaactatacctgtacaagcataggtaaaaaataagctcaaagcaaaaagtaaaaaacaaaacattagacttaaaagaaaatatttatattgagataacaaagcaagataagttcgggattaaaaactacctggctagccagttgtcttgaatagaatgaaaatattttccaagtttaaaagttgcctggtcaaccatcttgtgctaaaaggtaggctcgtaggtcaaaacagaggaaaaaagttttaacatatcaaacagcaggagtcctaggctctttatactaatcggataagtcttcagcgacaggaatttcatgctcttggacggtagaagagttgttgtcaaccatcttagcttcttcatcggctttttgtgcctcatagaagctaagataagcatccttcttgtcattgagataatcaaagttagcctctagagttgccttacaaactcataaaaaaacatccaaggcagctaattcaaagctctcaacctcctttcgaagtgcctcccattcagcatcgaaagctgcacgatcagcactaaaggttttctgtttagagtcaagagtctcagttaagagtctcctgcagagtcttcttctctttggtaagctcattggctttgccttctttattttgaaggagaatacggaggttttccctttcttccttcaaagtgttcacttccttggtcattacatacaagtcttcctcaagcttggttgtggatggcatatcctcaatctattgcttaagatccttgatgagcttctccgaggcaacaatcttcttgtttgcttctcccagctaaaaagtcttgtgctcaacctcctttttggcatcttccaatgttgtcttcaatgtgatggtggttgttatgacttttagagcagtaaatttagctcaggaataagtgtatgccatcttaaaattaagctacacgataaaatagggttaaaacatgcacgacataaaacctgtacataataatggaaggaaaagtgcttacacgggggcctccttcaacattttcccaatagcagctccgttgacatcttctccaccccagcaagttgctcattcacctcagacatcactcaatcctgatagaaagtgagcatctccttatccttcttggtctttagatggagtacggatagagtagccaatggctttggcagctcgagctcctctgtgcttgcccctttagagcctttggctggagcagtagaagcttgagacttggaattcttcttgggcaaaaaaatagaatcagagaccaccacctcgggaacattcgaagagacaatagctaggggtctcttagtggtaatctgaggagttttagtgctcagggtgataatatttggcaaagaatcgtctaccttcgggcatttgttcaaagatttttgaccagaggcatcactagacctcttattaagagcatgcaatactctacgacatgactgcataaaaagaaagaacacttgttagaaaacataatcaagtaaggacaacaagcatctgaagtaaaaataatctaccctgcacgtgaacaggagcaccctctcgaataagtaatgaaggagcatcctcattagaagagtcctcttcttcttcatcgaccacaacaacctttccctttccttccacctggacgaaaggatgagcagcctcttcaggatcatctctgattctaatgggtcgctcaataggtactcagaagggagccttcttatttttcttttttgaagcttcttgcttgggtgaaacctcctcaatcacatgctcgacctcctagacttcatatgatggatggagcccgtacttaatataattggccttagtggccaagagtgagatattttgagcctctttaggaagttagagtattttttgggctcttttcataagttccagggtgaaataaggtcggcagtaagatagaatgtattaaaagttagtatggttggtgcccatgtccttgacaaaattgtagtcttctacaaatccaccaatttttggacatgtctgtgtctggggtactggaaaaccacttatgtttgatctaaaaaaagtaaaagtacccagatctattctatttagggttggacttcaagtcaaacaaccaattagtgtcgtgagtggacgactaaccccatccttgggaaacgtacaacacaaacaaggcataaagatactttatgcttttgggagtaagttgggtcaggcagatgtgataataatttgttatttcattgagattaggatgcaacaacagcattgcaccttgcttggcgtatggcccttgttggaaattatttta

SEQ ID NO: 294784 - DNA, 3669 bp, Cannabis indica
taaattttttctcatcatgcattggaatggtctttccttccatttcaaaatagaatagtcattcaaccaaaatagtggaaagatcattctattggaatgacattccaatactttaatatgaaaccaaacaaaataagggtaaatactattttggtcattatgttttgtaaaagttaccaattagaccctctgtttagttaaatgacaaaatagaccatatattttccaaaatagtaaaaataggaccatgagctcaattttcaaccattttagtgttaatataaccaactttaagataatttctaacacaaatagatacagtatatgtaatcagttttgtcataacatttctagatcaaattattattaagctctattttaacaaaaaatcagtccatggtcctatttgtataattttggcaaatacagagccaattttgtcatttaacaaagtagatgatcaaattagtaacttttctaaaatacaggggtccgaaatttgtattgaatatcttcaaattttatgttgttggatcggtcctaaggacagtaggagaccatctataaaatcaagaagtgttacctcggggagcctctttttcaacctcaacggcttcctgagtggatacatttttaagtgggtgcagatgacgtagtcgctgtctcttcttctttaggcacttgtatttgctgccaagtagaatacttagggtccttaaaatccatggtctactggtcttttgcaaagaaggccacaagatttcaaattgttatcatggagcaagctcgcaagctataaggcagatttaccaggattttatgccgccattgaactactggtgttgaaattagtctctttgtagcagctaaaataagagatggaaaagcagagaattagtaaaaatatccaatcataaaaattctaaaactcaaaactaaaattttgggactaatggatacttacgtaaaattctgaattgggtagtgtttactgggtggagtcctatcgtccaaatgaaatcatccttcaactccttattgggaagtctaacaatgatttttaatcattggaatgggtgcccaagtaatagaagtcgtatgagcaattctttctcgcatgacatgctttgatagagtagaagtaagtaatctctaaaggggttgggaattcccatcccaaaatgtggtaaagcaacttcaaaatgagaagatcctataagagtcaggaactagttgaaagggtgcaatcccaaggtaattacaaaagtccttgaagtattgcctatggggaagggcagctcctgccttaacatgctcgacactccaagctcctatccttgaagagtcgctggtactatagccttcatcattcaataggaaggttggagggagcaactaaactcaccaagcatgatagagcatatgcgacatcctttttcatttttaatgccataagaccttagaaattaacccacgtagggagcaatcgatctgaccttagattcacttagctctgcctcgaatgtaacatttggattttggggtgtcttagactttggagctttaggagccataatttcaaattcaagatcaccaactgcaaaagcagcagtgacttgaggtaaaaataatggtcttgctaaggggattgccattaaattgggtaattcaagccaggctacttctcgcagataacgacgtttaccctcaatgattttatctatatatcaccaatagcaagatgatgtttcttcttcactagccctaaggaagtgttttttaattttgtcgtcattaatctcaagtgtggattgaggtttataggtctgagatttaaaaacattggctcaaaattggggataatcagatttcacgaggtctgggtgttcataaacttgatcagaatgggacattttcttgattacaagaaaaatgtctcaaaactctagaaatgcaaaacatataaactcagaaattgtgaaccatgtagccctaaatttctaaccctaaattgctaaaaaaaaaaacccatataaagataatcccactcaagtaatggacgatacaaaaatatatgtaaaacaataagaacagaatagtcaaaagaacaatggtgggaatacacttactggtttgctgagagaagggtctttaagaatcccctcctgacaacttctgaaactgaaggtttgatccttgacaattctgggattgagagaaaaaattggcaaaaactcaaaagaaatatgtgagagataaagaaggcatgtaattttagagagaaaaaaggttagaatttgaattccttcgaagctcttcaaaacgttaatggcgaaataggggaaaatgctaaccttataacctttgatagagtaacagatgtggcttgtctcaggtggcaagaatagaaaattcttccataaagcagcttctacacgtagacaagtcaaccaaattctcagcctaaaaaatgacaatggccaagatgttgattgggattctgttctggctaatatgatacaagattatttcaagcagctcttctcatcttctagttgatcctatgatgaggtattgagctgcatccactcaactattacagctgaccagaatagctatttgctttcacctgtcacagatgaagaagctaaagctgttgttctccaaatgcacccggataaatcgtcaggcccggatggaatgagccctgcattttactagaaatattggcatattattggaggtgatgttttcaatacagttcgtaaatttttcaatactagtttaattgctcctagactaaatgatactcacattgtgtttatccccaagaaaaagcaacatgatgttatgcatgaattaaggcatatttctttatgtaatgtcctatataagatcatctctaaaatgttggctaataggatgaagcctattatgagtaatgttatttcagaattccaaagtgcattcattcctagtcgcttgatcacaatagtatcattgtttcccttgaagttctccactatttaaaaagggaacaagagggtacatgtggtgttatggctcttaaaatggacctaagtaaagcttttcactgtgtcgaatggtcatatttttgtgccatgatgattaagatgggcttcaatgatcgattcgtggctcttatcagacaatgtctctcaacagccagctacaaagtcatttgcggtgtgcatggaactgactttttttaattcttatcgtgacattcggcaaggagacccactgtctccttacctcttccttgtctgtgctgaaggactctcgggtttgatcaagaaatatgagcaacatggctggattcatggatgtcatgtggctaggggcgctccaattgtctcccatatgtgatttgctagtgacagctacctttattttcgtgcaaaccagccaaaaatcatcaaagtaaaagagttgttgtctaagtttgaattagcctcaggttaacaaatcaacttcagcaaatcctcggcttttctcagcagcaatgttctgttggaaattattttaccaggatctagatttacaaacaagtatgttggattaacatcctatatgaaattctaaaacaatgaaaataaacacatataaagttagaaaaccttacactgggtgcagcggaataatatg

SEQ ID NO: 294785 - DNA, 4019 bp, Cannabis indica
tagcatgatatgttgtttatatgcgaaaggaaattgttttgatataattataaccattccaaatggttactcatattaatgtatttgatgggaggtgaaagcacacgtactaacttttcactttttgcttgtgttttttatactcatttttccagtatgtatatttctaatgtgtattgatcatcttttgattgtacaattacacctatactttttcaggtggaagggatattgctacgagcagcagatgaattggaggctctacaagaagaacgcaaggtattttataagtactttcatttcctaccttttgttcgtaccccataaattgatggctaattaggattctttttcgaactttaacatgtgccaaatcatgctctctaaactattgagaattgagatagttagatttaagaatttttatctggatcaatagaaatgtgaaaagttcaggtggcatgatttggtatatgtcaaagttctggggacaataatcctaattagcttaaattgattttcagcatcttatgtggtgttgtatgaaatttgcagaaagtgaatcctcaaactgccgaagctatagatcaattcttggtaaagttaagagcctgtgcaactggagcgtcacccttcacttttattctagatgatcctgctggcaacagcttcatagagaacccgtaagtatggaaataacataacataacagagacatgattttatattatgattcgtgaacatcatatggagaacataagccgtattggatggatgattggttgaactaatgttgctgatcttgtgaattgaactcttccattgggtagtagcatcatcctttctagaccttagtagataatatgcagatttgaaaggaaaaattccagagctgtcattcagccaaattccctcatctttcatattgttatcgatactttgctccagtgaagccagcaactctatcattcagattttttatgaaagaaacaatgttctaaatctaatagatggtacttgccagcttaagctctgggtcaatgtcatttcgtgggtccttatttatttatttttaaacaatttgcaaaacatatttttcaataataggaagctatgtgaaaaagtaataggaagaacacctaagcatcatagattatgctttcgtttcaaaactgtgttttataagattgtgcgttatattatgtaggtatgcaccatcacatgatccagcattgagtatcaagttttatgaacgcactccagagcaacagacattattagggtatcttgttgacccatcacaaacagtagataatattgacggagcatcaacagaagaacaaaatggtggttctactcaagtacaaagagaaccacatggatcagttggagcagcagctggtcatcgagccattgctcaaagcaacagtgcagaaatggctgaagctctgtttcggtatactgcaccagaagaggtggagctcattaattttgtaattagaatgtcgacattttaggtatgattaatatattatatattgattcagtaactgccattatttaacaggtaatgactttcccatcgacatgtggaacatgtgctgcaagttgtgagactcgaatgtttgtcaccagtatccttttatctattattaccagccttgagagattttaataattttctgcttacagccttcaaacttgcatgttttgccgtttttaattaattagttagtcaagtagttcatgatgattgttttttctttactcccttttatagaacaatttaaaatgtcttgtaagatgctttgacacatttcatttctgaagatgaaagtttttctttcttgaaactaggatcctcgcctaacatatagcctatagttgtttattaagattcagttcattgtactgggcatgaggaccccctccgttgtattctcccgttattaatatttttgtgtctattgaaaatacccaccccacccaaaaaaaaggccctgaaaatatattcaattgtgtttttgattgtgctaagatgtttagcttaacaacttaaagatattccgtacttcaaagaagtcattgtcatggcatccacatgtgatgcatgtggttaccgcaattctgaggttagtagaattcattttctgttgcttgtacgggtgatctctgattatgcctttctctacatcttttagttttaatttcaatgtgttttttcttcccaactattatgctctgtctttatgcagctcaaacctggtggaagaattcctgaaaaagggaagaaaataagtctcagagtgactaatgttaaagatctgagccgcgatgtcataaaggtaagctatgttatacatttaatttttatcactgatttggatttggtgtatatccatcttattcaattttggcacatttcatacttgtagaaaatggtgaattaatcttatattattcaatagaatataaaatattaatatttatatacaaacctagagagactaaataagaaactaagtaattacaattaatcttaatttctacaactaatggacaacttatatattttaatacttcccgttaagctggattataaatgttaattatgcctagcttgttacgaagataatcaaccctcaccccatttaaaacttttgtgacaatgtgcctttcattgttctccagtcttcaaatatcctgtggagattaggccttgttgatttttctcgtgaacaaaatgacaatcaatcttaatgtgcttagttcttaatagaacatagtatttgaatattttcatttatttttctcttgccttattcgatattcacacttcaagttggaatttcataataactatactgcaggttcaggcttgttactgaaattttcttttagtgtaagtaatgttaaacgtctttatagtattgtggcaatgatgaaaatgttacatctcatttgacaataaaataatgtaaccgcctatatccgcaatcatgtcatgctcatggttttagtgattttggtaagaagttaagtgtcataaaataatagtatttccatccttttgattgtaaactgaatatattgattaaaactttcatttgataagttaaatttgcatatgaccgatgaattctcatatgttcaaatcagtctgatactgctgctgtgagtatccccgagcttgagttggagttaggaagtggcactttgggtggcctcgttactactgttgaaggcttgatcactaatattagtgaaagtaagtgatgtctgaactttgtgctgttttaagagacttcattcacaatttaaaattgtgattatggaatgattttacttttacaaattaacccctattctagaaggaagattgattttctgaagaacaaaaaagcagaattttttttcggggcattggttgggtaaagaaaaagtacttgtagatgttttttttcaaccttgtatcgataaggggtatcactctataattgaatctcaactaatttactaccaatgacccaataagtctatatgtttcttgttcttaactttaaatttgttgtattggttagtaccttctaggctacttaatttttaattatttgcaaattgtatgatatcacatgcaggccttgggagagtgcatggttttactttgggagatagtcttgatgacaataaaaaaagcaagtgggtagaattcaaaacaaggctagacaaggtaaagtaaacaacactgcacatgcattctctatgaacctaatgttgggtaatgatgtctagcttctataatttattttcatagctatatacagagttatttgcagcaaaaccctcttatattttaattttttacacttaattcttattttttttgggaaatttgattttctataactaaaaaattttcaaaatttcttttctgaaccaatacattttacactatgaaaaatatgactcttttttcaaaaactccaaaaataccctcctctatctactttgtctctctc

SEQ ID NO: 294786 - DNA, 4099 bp, Cannabis indica
tttattctaaaaaaaaaaaaaaggataagatactcttatacactacaaaaaaatttcacgagtcagatccgaatacaattttttaaacccgaaactcgactaacccgtcatgttcagtgacaatcagacgacatcgtctcagagtatttttattttcattgtaataaatgaaaatgaaagtgtccctaactgaaaataggaaggaaactcaagacgcagacacgagacacgtcagtgagttaggaggagtcgacgtgtgccattcttcccctgaagttttggatttgggcttacttgggcctgggcttgcgctgggcttgggaagattcaatagatctgtgtcgtcaaccataaccataagcttcagccttgaactaccaaaacatacgagaagaataggtggaggacgcgacgacgacgactgcgattgccggcgccggccatgagttcgaattctttgaaagacgtaagcaggctattgaatgggctttctctagttgcccgagaattggccagacacgatcctcagtccatcctcaagaaagctctgctctcctccggcctcacccgaggcaaggtccgctccttttctaaacccaaccccatccctattcttacctctgagtcttctcatcaacctgaaccacaaccacaatcacaatcacaatcacaatcacatcaagatctcaatgatgatggagttcaacctccgccatctccatccgcaagtttctcatcaacggacgttactggcttcaatgacgatcctgttgatacagttacagcttccgaagctccaactgtagcgccattatcgaagaggcggaagcccagggagagacgagttccttcaacaccgttctccagagcactcgggttctaatttgtgttttacgatgaatttgtttgcttgattaggtgtgagtgagtggatgaatgagtgtgactgaatagattttgataggtttgctggtctgggagctgggcttgcatggggcactgtcgaggagtctgcgaagaggctcgtttacggcagaggtgatacggaaaaagacaaatcagctctttcaccatttctctctgaaaaaaacgcagaacgtttggctctcgcgctctgtaggatgcgtggtgcagcactcaaaatcggccagatgttgagtatacaggacgagtctcttgtccctgctccggtactactcgcacttctatctaaattataatgcttttctcaaatatttatatattatcatcagttgtttcctcttttagatattggctgctctggatattgtgcgacaaggtgcagatgtgatgcccaaaaaccagctcagtcaagttttggacgctgaattgggttctcaatggtcctcgaaattgaaaagctttgattttgaaccaatggctgccgcaagcattggccaagtatgacaattgacaacaactactaacatacacttagacttaggtgacgttttgttagaagaatgaaaacattggaatagaaataggaatgggaacatgaatatgaataagaaaaaatggaatagaatcaaatttaaaatgcaaaaattattaaatttttcttatgctgtaatggtatttccatcattttcaaaaccaggaaaaattattctattagaatgacattccaatgctttaaaatgcaactaaaacaaaaaaaaaaatgaaaatcaaatttgtttcaattccatttcattaccttcaaccaaacaccacctactattatgctttcttgttgtaatgtaaatttaactgaactcgtgtatctgtatcttcttaatcgtttaggtgcaccgagctgttacaaaggatggtatggatgtcgcaatgaaaatacaataccctggtgtcgcagatagtattgaaagtgatattgataatgtgaaacttctgttagattatacaaatctcattccaaaaggactttaccttgacagagcaattaaggtatgattgtctttgttttatatgctttattgatattcaataaatcttgtggaatcatgttatctatcactaaggatcatttggtttttctagttccaaattatgtgtaacagattcatcttgtatttacttccttttagacgtatacaaacatcttgtcttgtttgtatatcagttatatctccctaagaatgactagttcaagagcctggaaatccttctacacaggataacttaatgtttatccatattgagctatttactagtgcctatgaagttgagaaatatttccctttggctgtttcggaattcaaattaatctttgtatttctaggttgcaaaagaagagttatctcgcgaatgcgactatgtgttggaagcaacaaatcaaaaacggtttcgagaactgatgtccaataaacaaggtttctatgtccctatggttgtggatgatatatcaagcaaaagagtgttaactacagagttagttagaggtgggtatagatgttatttatctgctctattgatttatgatcggatatgatctggaagtcttatgaatgcttgtgaataattcaaatttatttacctctgattttggtagataagaacataattattcacacttataagtatgttttccttccttgccaagttatattgttttgtgtaaaaagaggtcacagtcactagtagaattatattacaaatcttaaaaagccttgtagatagaaaggttacattattgtgacatttcttccatgactgcattagtcatgagacattttgttttattttgtcattataattctggcgtaattttccattgttaactaaacatctttgtaatgaaagcatggaatgatgctaggtcattattatgagaatttatcctttaccagtacatatttttgtcacaagattaactttttattgctacagggatcccaattgataaggtggcattgttatcccaggaaactcgcaactatgtgggcaagaggctgctggaactcactttaatggagttatttgtttttcagttcatgcaggcatgttctataatttggaagtgaataatatccttcatgatttgttcagatttttcataatttcaggctcccatcttgactttcttctatcatgtttaatgtgatgcagaccgatcctaactggagtaatttcttgtatgatgaggagacaaaaacaatcaatctaattgactttggagcagctcgtgattacccaaaacattttgttgatgactatctaagaatggtgaggtctagttgcttccttaactctatttaagatcctgtgttggatgaatgttcttaacttgccgcatgccttattgatagagtagattatctatagtgaaaggctttataattacgaagctatcattactagtgactgtttttaaagtagcacttttgctttggcctcttggcatcatgccaatgaggacttatacgttacaagctgcatgtctctgatgatcttccgatgtcatcttttattaggttttcgcatgtgcaaatggagataaaaatatggtcattgagatgtcgaagaggcttggattcctctcaggaatggagtcagagataatgctagagactcatgtccaagctggttttgttgtggggttgcctttctcgagacccggtggatatgactttcggtctgccaatatcacacaaagcctttcaaacctcggtgcgacaatgctgaaacacagactcacaccaccacctgatgaggcgtacagtctacatcgcaagctttctggtgcttttttggcttgtatcaagcttggggctgttgtaccatgcagggaattattactcgaaatatacgagcattatcagtttggtgaagaaggtgatgagaaactatcaagtggcattatatcttgataagagtttttgaatagataactatacctctacactgatggttttttagtaggtattaagtaataattggcggatgcaaatctgccatctaaggtcccaaagttgagttgccaggtcttgataaaatgtcagagtgagacataatgaagctataattcaaatcagactacagaaaattcaattctttaaatatgagagagagagagaga

SEQ ID NO: 294787 - DNA, 4373 bp, Cannabis indica
ttcttttttttaataaatttaaaaaggagcctggacaaaaaatatgtagtatcagttacaaaaatagagaagaattacaattttacaaacattgggtacttatgctacaaaaaaatcattgggtttatgccgcttacaaactcaaaactttgggtacttatgctgctatttactcaaaccttattgcaactagcgctgcaacctaaattataacaaaaagtcgtatagattcaactattgcaattagcgctgcaaccactctagaaattcaaacggtaaatttaaaaaaaaaaattaaaaaaataatatataaagtaatttttcattaatgttttgttataatcatatgaaatataataattttaatagttttataaaatattatttatttttatcacaactaatttttatttttgataaaaaaaattttaatatacaactatttttattaacttgtgcaacttacgatattttgtttctatgaactcccagaaagtaaaaaaaactcaaaacgtacagaaatatttttcctttgaaagaaatattaaaatagtaattctagcaaaatatatggaggagccataggccattttctatttcttatactttatatctcaattatattatagttgtaataatcattatgcttgtttttttttttaaaggaagaggagaccacttatcattatgtttgttttcaatttaaggtgtggaaaataaagttgaaaataatttgttacatttgtctatttgactctagaacatctgtttgttggttttttgggaatagcattgtattcggtttgtgttgctctgaagccgaagagactagtgggctgcacagaagtacttagtccgtaaattgtgggagttgtgaatgtggttgctggaggataaatagccgaagcagtcatctgggaagtttgagtagttgtggtattagcaataggtgttggaagtactccataagcctgaacgtgagcatcttcaaggtttatgaatctttgggctctttataagaactcagataaaaaatctactctttttctgtgaagttctcctcatagcaaggatctagtggttattcctgatgtcaaagccaccatcttcatatcatcagtaactttggtctttgatgctgcatccatcatgcgctatatgtactttttgaggcttttccctggttgttgtttaattttcgtcaaagaactaacttccatgtcgaaatcctttgctgctatgaattgtttcttgaacattatttgcaagtccttccaattacgaattgatctgagagataatcttttctacctctacagatttttacagggttattgaaaaatagaggcactttgcgtcattactagcttttgatgcatgcatcatccggctgtacttggatagatggtccctggggtacgttcttccttcatacaattctatctgaggcattttgaagtgttccgacaactatgcatctataattattttcacacggttccgtatcctcctcctccgagtcagacacagttccattttgcttttgggagatcttttccgtgagctttgctaactcttcaattttatgctccagacattaagtcgtagcattagaagactctctttcgcgaatacaatcattgatatggtttctgaggtcatatccgcgaggtctgttttttgcttccgaggatcgaccaaccggtagattccattgccagtcatgagatcatggatgcataccctgtgtacaaccagatcaaaaatacacatgccagccaagagcacacaagctttttcatatagttaaatttttcattcgtagataaattaaaattcttatcatatagttaaatttaaatttcataaattctaaaacaagtcactagaagacaaaattgaatcatggagacaaaagtctcaattggttactccaagatatgacaaaataagtgaaatgaaacaccttattacatccgagacaagaggggtataataacaaaagtctttcccgaaggttttcgaaaaacacttttagggagcaaatgttatacctgatttttcgagaaatcaaaaaagtcaatcctacgaatttgaccaagacttacaaaagaaaaataagttaagacatcttacttgagggccccatagcacctctaggagactcacaaaaatattaaccaaccatttggtgttgggacccacacacctaagtgtgcccaaactatggtttatgggctcgtgtgagcgttttcaccctagagacctcagaaaccaaaaaaggacttgacttatttagcttaaaatgaaaaaagcttgaacttaaagtcaagaatgcacaagaaagccatcccatgatgcatggccaacatgtgccatcttttggcacaagtctctactctcaaaacactaaaggagacttgtcaaaatgtgttccctgaataccagggagtacaacacaagtgaaagaatctgtttctcaccaaggaatcaccctagccaacttgtgccatctttgtgcataaataagtggcataggtcggccacaccaaatgggaaggatattttttggtcaaagtacttttttatcatcaacatatcaaagcaaagtgagaaaggccaccaagtggtataaaaactacttggccgaccactgccatctttgtggcccaaagagtggcagtggttgaccataacaaatggtgggaaatctctttagctaaagtatttttccaaaatcaaggtataaaatacaagtgaaaaaagtcactaaagggtgtgtaacccccatagcggaccattgccatcttcgtgtcccaaaagatggcactgctctcttctaccaattggtcgagaactaatgtggctaaagtatttttatagtatccatatgactaaaataagaaggaaacaccatcaagggcttcccacatgtcctagccgaccactgccatcttttggaaccaaaagatggtgcaagtctcttgttaggattttaaatgtcaaaatgaggttttggggtcccaacacctccaaaatatgagttaccataaaaaaaaaaatcaaaacacaccccgaggtgttcaggaatatgcacgactgacttgtgagatgatgacatggcacatgtcagatttggagctgaaaagtacataatgccctttggtaaaataggcataactctctcatttttttttttatctaaatgacttggttaaacttacattggaaagatcgtttaaagaaggatctatgcgtgtctcatggtcatagcgcaattgtaaagttaccaggctcaaaattgagtttcaagacaggctgtcacactttccttgaaaattaattggttttattaagtgtgaactataatgggatgttgggagagctatgccacaacccatgtggcatcatgaccgagaagtgtcatcctaaaacacttctcttccattgagaaaatttctagccaagaggtgacatcctttgttactctctaatttggcatttccaaagcacaatgccacataagcaagtttaagacaaggggattaaccaacttaaacagcaatctcaatgtttgtaaaatatttgattatgaatgagggattttcgtaaatatttatttatttctatttttattttattgtttagaatgagatgcaggatttgaaagtgagacaccctaacatgtgggggatcactaacaaaccttaagcgtattaacaatagtaatatgctagggtttagggggagagacaacttcagactgaaattttccttcgtgttctaagagcttcccagagagattttttggattttataaagcacatgaatagggaaaatagacaacgattttaaaatatcggctatagtatttcaaatggtcgaaaatactaaacaacagtataaaaccgtcaggaacactcacctatagccgacaattttaaacactcacttatttttattagcgatgcttctcgaaaaaaactaatttgaggatcaacagaaatagtattttttgtagtagtgcgcccaaacagagagcaggagaatgagaagtgcgtagtggtgagcggtggtgagtggtgcgtggtggtgagtttatgtgatcttttataggagagagaaaagagagaatataaggaagatgagagagaatgagggaagctaaaataatgagagggtatttttgggtttagatagaatgataacatatttatagagaacattacacttagtatgggattttaaaagttcttatgataaatatggcacatttaagtttggccaatttatatggtattttttttatttttaggtttttttatggtatttgatatgccatatatatgaaattaggtttctaaatcccatat

SEQ ID NO: 294788 - DNA, 2162 bp, Cannabis indica
aaaccgtaaaaatgtaaaaaaactttaaacgtaaaaatgtaaatattacaaaaaaatagtgccttatataattattcctatatattatatataattattcttacatgaaaaaaaaatacgatattattgtaaaaaattagtaataattttataatatatagtgttgtttacgtattttaaaccgtaattaattattaaatctaaaactgtaaaccgcaacacactgcttggtataaaaatttaaattacaatcacactgcaaagaattttaaactgcattttatatgcagtttagtatggtacgtagagatagacttacttgtattcatgtggggctatagttctcactaactaacaaaatattgtcttttaaaaattaaatgtaatttttttaatttaataattatagatcaaaatcataagaaaatttccaacaaaactagataaatctaataaaagtgtttataatataagcataaataatatttttttaatgataaataagctctcacaaagtaaatattctaaatcagtcactaatagtatggacggtttgtgcagtgtaaacaatttcatatacatccaaatatatatgatacatattattttgattttatagccaaaaaaatttgatgtaattttatatatttttatgcagctgaatatgcaaatctacccattattcctccatttttacagccctctgctgactacatcaacggtgttaatttcgcctctggtggagctggtgtactcccagaaaccaatcaaggattggtaaatttcaatatttttaatgttccctgtagagatagaaaaatttgaggtgtagtatatatttgttaataataattttgtatttgtgtaaaggttattgatcttccaacccagctgaaaagttttgaaaaggtggaaaagtggttggttgagaaattgggagaagagtcagcacaaaaagtgataacagaagcagtttatttcattagtattggaagtaatgactacatggcaggttatttaggtaatccaaagacacgagaactatataaccctgagcaatacgtgggtatggtcattgggaacttgactcaggcagtgcaggtataatatattgtcgtttccatagtccaacaaccaacgacatgaatttggatgtcgttttatgttttctctgtttggatttggtttaggtgttgtacgagaaaggaggtaggaaatttgggtttctgagcctttgtcctcttgggtgcttaccaatatttagagctctaagcccaaaagcaagtgaaggacaaggagtttgtttggaagaggcttctgctcttgcttcagctcataacaatgcccttagatctgtgctcacaagtcttgaattcttgcttaaagggtttaagtatagcaactccaatttctatgattggttatatgatagaatcaaccatcccaccaaacacggtattatttagtgtattatatattatataactgcaccttttaatacgtgggaattataagtgaaatttgttttagtattattttaagtaacatttttgttatcgagatttagtattcaaagtcttgctataaattgggttgactgactggaaattaaacattctattttaaaaaaattattaataatttttagtacttaaaataaatttcaaatggtaaatcgccaaacttatataaaaaaaattacttggccaacaaaatattattaatattaaaacatgatatggtgggtgaaaccgtttccattttaggggtgtatatatgatatgatatatatatgatacatgaaatgatgaaaatatgaaattgtggtaatgatgattgaatgtttgactatgaaggttttaaggacggagtaaaggcttgttgtggaactggaccgtacggaggcatctatagctgcggaggcagaaagaacatcacagaataccagttatgccccgacgtggatgattacgtgtggtgggattctgtccatgcaacccagagaatccaccaacaattggctatggatctctggaatgggcccacttcctctgtcggcccatataatctcaaacacctcttcttccaccaggcccaactcacaatagcagatatacttgaccaataaccaataagaagaataaataataatacatatacct

SEQ ID NO: 294789 - DNA, 5523 bp, Cannabis indica
ttgagttttttttttcaataaataaataaaaaaaatacttcaaacaaaatttgaataaatgtgaaaactagttttgtaaccaaactgcattttagataatttgttttaaagtttcacatgcttttgatataattttttttccttcatagaaaaacttgaaacttcagaatctagttggcaaataaaaacatcaccaaagttcttcaagcatataagacacattactacaaagtttgctcgtacttccggtattcagatggaggcactagcttccgcagtaaagaaaccatgacaatagtagatgtcaaattatcaaggacggaactaaggaaaaaggtcacaaagccaatctgcaatcccaacaattacaggtcagaaaccatgatcagaatattatcagtgtcaattgacaactatagaaactaagaacttaatactcaatatgatgcagaaaacatatgtgatccttacaaaacaagaatagagagcactcaccacccagaggagagttcttggtttacgagtggtgatattatctgtaactagtttgaacccttgatgagcatcaactatctctacaattgtcattgcaccaagtataaaaaaaactatttcactgacttcagcagaggcatgtgttagctctgtaacagctacttcagttgaaggagcctacacaaacccaaaaacatagcagaaactaattaaattaaaataaacattagcaacttatgtttgcaattaccattgcatacaggtaaaaggagatataataatcataatatagaataaaacttaacttttcagcttcttgttggatggctaaatgcattgttattaaaatggggaataagaaggaactatatataaattattagcaaatcagatgtgcttggtaaagtccaacacaacgaatcttaccccaatacttcgaatcacccacaggctcacagccattagtaatgctactccacttttattgaaagctagagattcttcaaatatgataccagcataacctattccaaacaacaatgccattgctacatcctgcatagaacatttttctcttcatatattttgtttctactcaaaatgaagataagacacagctggaattggaaccacaatcaattgacatataaatcgtcaaaaaactagcaacataaagatatatacctgattagccgcaacccaagaatggttaattgccaacacccctgttccagctgctgcaactactgcaatggctttcagcaaatcagtctttggctggtaatttgcttcaaaatcacttgagcttgtttcgtcaaccgaacataagggatcacatgttccagaaggtgtcaactcctgataatattttaagtggtcgaattcgaagtgctattatcagttatagttatgcataatatgatacatacaattcaacacccaatgctatgctatcaagttcaatcacagtacacacacacgcacacacttctatagtagctatttccttaattaactccattaatgtcaacaagtttggaaccttgttagagctaatagttagttagctcagctctgctctcaagtttttataggttagttagtaatgtctgttaggctaagtaactattagctctaacaaaacttaattcaaatcagcagcagagcaaacaaatcctgatttatggctactttcattgattcaagtgaaacccatatatcttttttaactgaaaaaaagaaaaaaatattctccttggtcactaaatgaaatgcagtttccaaaaagtataaaatttatttgttcaaagggttgataaaagtgctacagtgtttcacaaattgacccaaaatctccaaatttcactgaccaaaaatcattgacccagaaagagataaattgcgaaacaaagataatggaaacaccttcataatttgaaactcttcatgaaagtgaataagaaaggagaacctgtaacggtgtgtcaaaggaagaggaagagtccttggccttatcctcagctcgggccagcagcacatttccaagcagccttggagtcctcagtccaggcaaagaagaacctttagacagaagtgagaagtgggtttgagacagagaaggtgaagaatgggagcaaagtggaggtaggttgaacttgtgggatggcagcaaataggtcccaacagagagggaagccattggaggagctgaacactgagaaagggaagatttttaggaagagaaaagggaaggaggcaatgagctggtccctttttatatgaagattaagattttttttattctttctataaaaataaataaataaataaaagataagttaaatgcataaccataataactgtgttaattttgagttaaaaataagtggaattattattatctttttttaataaaaattgcataaccataataagtggaattgttatttgttatgagtagaatgtattatatatagaataatcctataaagtgatattggttttatttaattgttttctatcaaaattaacttgattaaagcttataataaactaagcttgcaattttgtagatcatgtactcagcaactttgaggcccctgacaagttcttcaattaggttcatcagtgtatttcgaccactttatttaatattcaccacaatggaggaaaggtgagcgacttagtctctgagtgtggcctacgagaggagattttctatccccttatctctttatttgaacagctgatatcttctcgcgtattttggagaaggtcttagactttggtgtcattataggtatcaagtttagcagagatggacctaagctctcacatcttttctttgttgatgatcttatcctagtgagaaaaggcgactattgcagaggccaaaggcttctagcagtgcctcgagcaattttgtacttggtctggccaacgtgctaataagcttaaaacattaatcttcttcagcaacaatactattgagggtatgaatagaggcatcatgcaagaacttggactcaatatggccacttctaacattaactacttgggcctcccattatttagatccaagcttaaggatgctgatttcaacttcattcttgagagtctggttttgaagctgcatggatggaagctgaaatctctttcaaaagctggtcgtgctactttgatcaagtcagttgggcttgttgtgcctatttacactatgcaaattactaaactttcaaaaaaacttgcctaaaaaatagatggtatgatcagagatttctagtgggttgtgatcagggaaattagggtattcatttgaaggcttgggatcgcttatgctttctaaaattcaggggtggtcttggttttcgaaagacttttgaaatgaatcgagctttgcttgctaagtgtggggatgggccctcctcaatgaagaacaatctttgcgttgtaaagtgcttagagctaaatatttaagacgaatgtcgttcttggagtgttcttttaaaagtttggactcttggttctggaagagtgtaatgaaatctaaagaaatattgaagtttgtagatcttacatggtacggggttctaccctaagtccattgccccgacccgggggaggtgactaaggttacaaagctatttttagataatgggaattgggacattcctaaacctcaaacctttttttgattcggaaactattagtaacatcattaaagggggaaacctagtagtcatggtaaagataggtgggtatggacgaaagagtcgaatggtttatttgctacaaagtctgcttatttggtctaggctttagagaggtcccctgcctgtgttgttgcccctgccctatggaacaaactctgccctgccccagattattttcttcttatgttcttatttgaattgtgtctaattgttacaatgaacaggagtagctaaattgttatttagggcattgatggagattatttgacatctttttatggttttaatataatttaattcttcttccaattttttatgtacttctatttcattcgttcttaattctttcaattgcctagccatcaattaattgtttatgatttcgatacaaaatttgagaagtgagtatcgattatgctatagtgaaatatggacaaattacaatataggacgagagtacctatgtggtttggataacaattaggattttcatgcttaatgtcttttacatgtttaaatttatcacaagagtacaaaatttacatgtaagtgaaatttatatatcttagccaactataaattacttgagtaaatatgctattgcataaaaattagtaattagaaattaaattatattatgtcatataagatagatacaattgaaatcgatagccataactctaatcattgttaatttttattctaatttaattattctattgctttatattttaatttcctcttctaaatttgttattgccaaatagatatggaagtttaatttattattacttaactacaatcaaagtaggatcgtctcactcctgtgagcatatacttgctatcgatatgtacatttgcatagagaaaaattaataataaatatgccatatctgccatgtcttatgtaggagaacaaacttcttagaccatgaggatgtaggggtttaggcgtacacccctagactaacttcatcaccttttgagtatatcattacatttaaggtaggggtagtgacatctacccttacactgatttgaccttgtaggtgtgtggtgatcgtttattccatctatgagagtgttagtccaccgtctctctggaggcagccacctcgctcaagctagggggaaaggggaccatcagacttctcttctaacggtcataacaactggtcatgactaacggtccacactaacgatcataactttatatatttttcatcaatcccgccctagtatcctcgtgccacgtgttgttattcttgccacatcactgtaatcaaaattctaagtaaacaacacatatgttgtatcagttaataactatattttcccctctatattttagatatcatgaaatctttttagtatttagagtatatagcgagatcatgttgctattctaatattttgttttcttttttgtttccctgcattgttaccgtaaaggacgactttttgagtgtgacaaacgatccttcaacaacttagtagggttattcataaacctaaaagaaaattaatttaggcatgagattgttgggggaaaggagtttgaatggaaaatgaatatgtgatccttcatcttcgtgtttgaatagaaatttaaagtattgtgatggcattctcactgttatcatatatgcagatattgctatttctcaaatcacaatcgcactacaaaattttaaatcgtaaaatatagtgtgattcggtacaatttagactgtttatactattatcattatcaaacattatgtaaagtctttttttggcaagttagttgacaaaataatttttccatttatggtaa

SEQ ID NO: 294790 - DNA, 3251 bp, Cannabis indica
agcccacgacagttccaactaaggatactcatgacccttggtgggcctggaatccaggacccaccaaagacccattttttgacagccaatagagtctaggctcatatcagcttcttcttcattaatgacttcattagtttccatatttgtcctccttctcttcgtatctgtaaccataattgtgtttgttggcaattgtttttcacttctttctgatggaggttgactaacatctttgccattaacagctacatgatactctttagcattcattatgtgtacattgccaccttttttaccctggttcattgcaacaatatccctaatattacgggataattgattaccagcattgaagacttcatcatccttgccaaaattttcaaactcatcagaaaattgcttatcagtgtcaattccggtacgtaaccattgggctccgatcctctgttttttccttttcggttcaaccttcatccacaatccataaggcttctcgatatgatcaatatgggcttcaaaaagcttgtggcagaatttttctgagtggccaattatgccacaaataaaacaaaaagttgggacaaattcatatttgaactggcaccacaaccaatcaccatttctttttgagcttgatccttcttttcagtgggaaatctatattcacagtgactcttatacgcaaataatccctccagatacccataaagttctttgggtcagattttataatgatccaatgtagttgcctacattcctagcattggcttctgtcatgaaccctattatgagattatgtagttgaacccacatatcaagccgatgcaagcgaacactccttggggtcttctccttgtttcagtcgttcaaaaatcaattggattctattgaaagtccagggactcccttcaatgactctctgaatatctatttcatgataaaactggaaaataaagagattgggttccaactctttcacaaacattccattgccgggttgccatagagaagcaagtgtgttttgcattgagtcaaaatcaatgatccttgtagttaagaaccttcaaacgagacaccaacgatcattaataggttggccaatatcctctgcaatatcatacagcagttccccttcttcctcctcctccatttgtttgttatcatattgctcattcaaattggcattttgttgactactggaagccatggtcaattgtaggctagaaatcacacgaacaagaaaagcacacacaacactgaatcacaacagcatactcatgtcaaaagataagacattttattgtttcgcattacaaaatttttttgtatgggtatagcattagataagtataatattgttctcttttatctttttattaattataagtaataaactaaaactaaaagggtttgtctctaatctttgttcctttgctaatatatcacttcggctttatttttggctctctagcactacttctttattattattattattattttcatgtttaatttatattgctgttctccaagttgtcgtttcaacataattatcgtttttaaatttatattgtcgttttagcttattatgcgtacaactacactgcactaagaaaggaaaaagtaaaaaagaagtcagaaaacaaaagaaaagttagacaaacggagctgcttctgattctgatgatgctgtcattgctgtgtatattgaaacaaatttagcgataaaagtaaactagcttgccaatctagtagacagttcaacaaaaaaaaatcattgtaaaatgagcatcttaatttgatggtaactgaagaaaaaaaaaagtggtgtaatttgaatgatattcaattataacacattatgattaagcattatcccaatggtagctcattaccatgctaaaatgaaaaagattgggttaaacggtaaaaccatctcagaatgtgtgtagaatgacacaacaaagggatttgttttagcccaattaaagggaattcaattcaattacaaaaaaaaaaaaaaaaaaaaacaaagcaaaagctgggttaatagcaaccctgcttttgaacacagaaagtagtaattggataagggcataaataccattcttggttctttttttttttaccaagtgagaggtgttttcatctcctcccttctttttggcctggaattttatctacataaatagatagatagaacctacaactccaccgccctatcctttgctagttgcctcgacaaaaccaaactaatacatcaatttggcaccatggttttaatacacaccaatcaccgatcaacaatattactattcctttatatattctaatcttcatatattgggtttcatctccatctatgatctattatctattacatgaaatggttaataatagagaaagatacctccacaaattgattgatttctccataccttcgcactaggcaactacaagacaataacaatatttgtttttagtaaagaccaatggaacacccaacaactcaccccacatcttttatatacgagctcaaaatattaatccttccatttccatatgcaatttgatatttttgttataattatctgaacttgctatagcggccttatcttgaaatagaacaatgataattttctaaaatttgaaactctgctctgtgaccttaggcacatactagcacataatatagatatggattgcactattacaactttatatatgaattatataagcttgtaatgtttgaagcccaaaataaatcataatagaaagtattatatgtttctaatttagagtagtggctagtactttttttaggttcgtatgttataacttttaagtagtgttaaatattaacaatactcattagggtgttcacaaagtatccgatccaatccaatccgcacgatccaatccaatccaatccgcaaaatgcggatatccgcacttgtgcggattggattggattgaaaaatccaaaatccgcacttgtgcggattggatgttgtttgacctcaaaaagtaaccgatccaatccaatccgcacttaattatatatatttttaaaaaattataatatataatatatattaatcaaaacaagacacaaacttctaatttcttaatcttttttagtaatatattgagttggtacattttatttattttataataaaaaacacaagaaaaataattcttattcacatagacacatacacataaatttaaatatatgtatacta

SEQ ID NO: 294791 - DNA, 4828 bp, Cannabis indica
tttttttttttttggcttagtatctagactggatagcaatttatgtgttccgagtttgtaatatttaaaattaaaactacgtagcatgaatgtgaatttgaggtaatagctgaattgtgctcaattttgttctaacttgttttgaatgatacttttgacatgtagaactcccgagtggcttaagaagatgtttgcaacaattactaggagtgagagaaagggtcccgtgttcaggtttttcttggatttaggtgatgcaggtatgattcgatgaagtctcctatggttctccttctctagttgtatccatttctataagacttacatttctaaacaaaatattctattaattttatctgtaatttgatagacaacaatgagatgtactaatgccacttggggctagcacaagtggttgggtgtgtgagtgtgtgtggagggggggaggatttcaagtcccattgtatcacatgagaactaagtactaattattgccgaaactaaattttgagttcattcgataaacatttttcgcgataatattttagtggcaatgtaagataaaatagttatctcttgtttcccctgttttccccttttatagactctcagggagctgctgattcttccttgtaattgtagtataatgatttggagttttgactttacattttctagtttcatatgtcaaacggctgaatattccaagtggcgtggtgggtgcctgtcgtcttgatttagcatatgagcatttcaaggtattgattgttgatgacttctcttgatattttgtatatgtctgatagctggattatattggtctcaaatattttcttatcattcattgtcgttttcatttgcacatttggcagctcatcttgtttgtttgttttttcattttccacttattattttggtggtattagtgctcatactgacactgctagttgtatgatatttatgcaaggaggaactatttgaaaaccatagttgtctctaatgtttgaatgatgggcattttcattttctcattattatctctagtacattttgcttttctaaatttctagaagaagcaactgttgtttctttgtgtatcattacatgttatgctctttggattatttttaaattttctttgttttatgcaggaaaaaccacacttgttccagtttgttccaaatgagaaacaggtataaaatgaaactatacagtgtttgtcttgtaacatatatcaaacttatctttaaaatatgttgttccttcagatcaaggcggcaaacaaaattcttaaaacaatacctcagaattctggatgcaaaaaggttgatggagttccagttttcactgctcaaaatttagatattgcaatagcaactacagatgggattaaatggtgtgtttcttctctgctattttctaggttatgttagatttactttattttctggttaattgtttgctcgatcagtgagtagctgtattatgaagtccttccaaattatcattgaaggtttttgcctattaaattgaagttaatttcagggtatctgttgcttatttgatttttgtttatgtaatcaggtatactccctactttttgataaaagcatgcttgataacattcttgaagaatctgttgatcagcatttccattctttaattcaaactcggcacattcagcgtcgacgggatgtgattgatgataatttgtcagcagaagtgattgaggagatgggagataacttgtgggagcctccagaggtaataaaacaaccaaaatctagtattacttcttgatccctatcaaaagttataagcccgtatttagccaaagtttaagcatatcttggttttttgttttaatatatatgggatatagtcatttggtacttaagctttaagtaaatacaactttggtacctatgttgttgataatgatcatcaggtaccttctaatttgtaaatcagtgtaaaatggttccctatattctcaataatagtcatctgtaatttgaaaattgtataaaatggtacctgtcattcattcatgcggataagcgcatttggtacctgtttaatttgttgaccatttggaagccagggtaccattctatatccattttcaaattacccgatacccaatgatcattatctagagcataaggtataaatctgtattgcatcaccaaatatgtaaatatatttagcatgtctattactaacttggaagactcagcaattttgatgcttttttgtaaacttggatcattatgatatgttatgtccttgccacaactttctggtcctctgtagaaggagaatatcattaatatagataaaactatgattctcgcaacatatttttacataacaccaggtcgaacttttaactaagataattttgtgaataggttcaagaagtgatggatgaggtgggtaatcctggaattcctttgagtgtcatttccaaggctgctgaaatgcagcttctttatgctgttgataaggtactcctgggcaataggtggttacggaaagcaacaggcattcaaccgaagttcccttatatggtcgactcctttgaaaagaggtataattttttttacaagtgttcattttaagacaatgctattgcttatgcctgtcatgcaattcctatgtcatagtgaaccatattttgtaaattttattgcagaacggctgcttcttttttgagagcctctgagtcgacggcatgcttaggaaactctgagacagaaaataattgtaaagaacttttgcatcctagtactacagagcttcaagttagaaatggcagttcttcagagcttcaagttaaagatgatagtttgtcagagcttcaagttgaacatgatggcgggacagagcttctagtcaatggtgatattcaaaacaagcaaggaaatagacctggttttcgtcttccttttagagattggtttaatcttcctttctcaaaacagaaccatcagaatgaggtatcatctaaagaacaaatgaagcaaaagatgcagccaaatccatttcttccaaagattacgatggtgggtatttcaacaggtgactcagcacagatgaacaaagcaaatttaaaaaagacaatggatgatctaacaaaagaactggagcatcaagatcaggaaaacaccaccggtagtaacacttcctggaatgacgaaatcacagccgaagatagagatccactctttgtggctaatgtgggcgattactattctggtgtggcaaagactggttcagctcgatgggttcgtggagcaaacaactaaagagccttactaacagcccatatcatttttgctcgagtgtgaatattcatttctcaatatagaaaatggaagaagaaaggtctgcaacatggatgcaggctgcttgttatattccttgatttattctctgatctttgttgtaaaaagatgttgaatattagagatatttattctctgatccttgttgtaatattagcaatgaaaaattctaagttttcccatgtagtttcagtgttctactgtcatttttttgacaccttagcttaccatgcattatttcttaacattaacaaaatgcaccaacatattatgaggtttagtttcttccaattgttgtgattttgcatcaagtacaactatagggactttgatataagatgatggagatgttcagtactacaattcctactaaccaagttaatttataatcattcaaagcaataaaatctaatgtacaatgaatgtaactagtgtcatatattaatggagatggttcccttggtgctgtgagtgagtggcctctctaataatctcctagtttctctctcaagaaaagaagctaaaagaaagaaaagagtagtggaatcttagttgcctctagataacaatctttgcttttgttttgataacactacaaagaaaaaaaaaggtactttcatgaccatcactaaacatgtcctcttgccaaacttaatgacactatcttgaccctcctcttctttaattttcttcctcatatatctagcaaaatcactaattaaaaacagaattgtttttcttcagaagatcccatgataatgacaatcatatatcatttcatcttatccaacttttaatcctccacaccaaatacctatgaacctaaagttcatccataaacatttgtacattcttttttttggggggtttgttcatttcaacatcaatctaatcttatccaactttgaagtaggccagaagagcataacctagtccaaacaataacccgttttttttgggagcaaatggctcacatggagtcaaaatggagcactatttttctcttcgtacacaagtcactgaagtacattatcatacatcttagtgtaacatactaatagtatacaaacttaataagttgttttgtaagattaatttatgatttatgacttactaacatttttctctggttggttcggttgaaaattgacaaagcagaaaaaagaaagaaaaggaaattgtatttttactatctatgtttgaaatgatcaaaatcaactctgagccgaccaagaaaaaaaaaagttcaagattatcaatttggatttaagatatttatatatgtttgtaagtcatgcatataaatatttatttcctaaattttggacatttcctatgattctatgagatcatttgattagttagtggtggtcccgtgattacatttgaaacataaatatttgctaaattttctacttcattcccctttatattatcacactaagggctcgtttggaacgccgtattaggtcgtattg

SEQ ID NO: 294792 - DNA, 4696 bp, Cannabis indica
tagagcagcccttgctcaaccttagtatgggggagagctgcgctactctcgaagcaaaatcccctccttttcgactttacggtggtgcatagacgagcatttcttggttcaagaaattgaaacggactgtaaagccattactgatgcactagctaataacaaggaagacgtttcgattttttggagatcttatctgccaaattaaggaagccttatctcttatccctaatgctcggctctcccatgtcaatcgtgaggccaacgctcttgctgataagctggcacatcgagccttggggttagatgaggttgcgatttggataggcaatgacccctgcgaccttcttgagttcctttctgtttagtgggcaccctttctttacaaaaaaaaaaattaacttttttcttttcaatttctggaaataagcactaagaccagtcaaaataataatttggacatatttatatatagtaataattaaaataaaacggaaatctctcattttattaatattaatatacattgaacttactgttacaatttatttttaaaaagattgaaatcacgtgacacatcaattattaatatatattcttttttgttccatgaaagagttttgatagaggaatatggaaagcacctaggaaggttagcaagatccatattcgaaagaatggcaaagaatctgaatttggataaaactgaatccgaatccgacctatccgaactaaccggattcattcgggcataccggtacccgatatgctccgagttcagtaaggaacaccctgcatggggcatggactctcacacagacagctcagtcttatccatactgagttgtgaagaccaagttggtggacttcaagtcctcaaaaacgacaattggttaacggtcgaacctatctccaacactctaatagtcaaccttggagacatgatgcaggtacgtactataattaattaattaattaattaatattaattctaattttaataaaacgacgtcgtacgtgataatgatgatggttttgtgtttgttgctttgttgatatatgtatatataaaggcgattagtaacgatgagtacaagagtgtgaagcatagagtgaaagtgaacagatataaagagagaatttctatatgttacttcgtttttccaaaagaagggagtgttatacgaagcatcaactataagccttttacttatactgaatttcagaagcaagttcagcaagatgttaaggcccttggattcaaagttggcttagaccgtttcaagcatactactactgctgctgctgctattactgaggcgtgttaaacgttttcttttatataatatataatgtcgttttattgggtcctatatactgctactactactagtactttgtttgaattttgcttttgttttttttgaatgggtttgacttttactttaattctcagttatatgtgggttttattttgtactcgttgtagtattatataaataatattaattagacgttgttgtgtacgtgtgtgttgttaataacttttggtgtttgaggttagaagagtaattagacgttgttgtgtacgtgtgtgttaattaataacttttaaaaacgtatcgaatgccatttgttttttttttttaataaaaaaagtcaagtctttaaaatctcattgcgcgtgagaagtatgagagagtcccaatacatatttattataacaaattaactaagtcaaatttcaaatgactattcttagatatatattatattaattttagcgagcgttttactggccaagactgtcctagagatatcatataattaaattttaaacattcacaacttatttaataatacagtgttgttgactactgctactgtctaatagaggaggccatatatggccatgtgcatgcaatataaccaaactataagaacctgttgtgttgtgtgattattgaaaaggaagtatctatatatatatataaatataaatataagaattgttaaaagatatacaagtatctagtactcttctctttatcatatttcaattgtataattaagtatattgggttttatataaattacgaaaataaattttaaaaaatattagtaaaccagttataaaaattatgttaaacacgatgaacgatgagtgcccaataaaaaatactttatatatatctcatgatatgtcgtgcttcatggtgacatatacaagatttataaaatggatgattaaagaagaagattgaagaagattcatttggtcaaaagaattctctctccaataattttttttaaaaaaaaaatacatatgaatcatggaaaaactctttgaaagttcatattattgtccggtctccgaaatcttaattttttttttacatttataaactagaacatatatatataaatattaaagaaaacagatatattccatgcacaaagtttaaaaggtctcaaatacaaaagatgtatagaagcaggagcagagcgagagtcgaaattcaacgggttccaaactatattataaattaagtgaaaaataatttaaaatatattattaatattataattaaaattgaaatacaatacatctctcttagatatcatgcaaatcatatataagtgaatttatgctaatttttttttttctatatacactagcaaataatcacttaaaaatatattttttattttgttgtgaaatgtagtcttcactatatttatagcggaaaaagattgatctgtagtaactatagaatctggaagtgtagaataagagttactatactttatacacaaatttaaatttttttacttttttaatttttactaactactgacataaataatcagaaatagttgctaaaacagtaaaatcaagaagtttttcacttttttttaaatcaattttttgaaaaatattgtgaaatggtaatagtctaactagcaaatcaatcaaataaatattattaaagaatataaataaatactttaaaagaaaaatgacacttattattctttttataaaggaaggtaataattgtatatgattttgttagtgctactatagacaaaatatacaatttagtttcttcaaattttactttgactttttttaaggggtcaccatttaataattattaaaaaagttcaattacaatatactaaaatttaagacttaaaattacatatacataattgcatatatactaggggggccaattacaatatactaaagtttaagacttagaattacatatacataattacataaatgctaagggggccatggccactataaacaactatgtacgtccgcccctgtatagaagattaaacaacaaaattcaaagaaagtcccggccaccaaacataggaactatctaaaaccaaatgtcctttttgtaagagaaacaatgatattcttaaacctattacaatgagatagagaaatactttgaaaagatttccaaacattagaattatcactaagcacaataccaaactcattatagcgaacatcttgaccattgacaacaaaaaccatacaaagacaatcagagaaagttgtaacattcctgaaccccaacagaaggcaaagagaaagggcgccatgaaatagggtcattataacctccgctacatgaggctcaaaggtaccaataagtagaaaggcaccagaaaatagggcatttccatttagaccgcactacaagaaaaaagacttttactggcgcagttaattaacctcgtcggtaaaaggtggctagtttattccatcaagtaatacttatgccgacaatttattttgccggcataagatacttttgctggtgaagtaccttagtttcgccggcaaaaggtggtaaatcaaccaccaaaaagcagaaacttttggcagttcaattccacttttactgataaaactaagtgcaacgacaaaagtgaattaattattgggggtttaattttacttttgccgaagaataaatgtgtcagtaaaagtagtgaaaattttggcggtttaattctcgcgcagtaaaaatatgcccagaaaattaggtgaaaacttctaccggcaagtttaagtgtgctggaatttttttttacaaataatgaaacgatgcgtttcactatttgatttagggtaaaaattttgctgaataaaacccagcaccgaacccctttctccattttttttctctttctcttcttcttctccatttttctccattatcagtcaccaccaccaccattttcaccaccttcatcaccaccatgatctccctctctctctctctctcacccattttcctcaatctctctatctccctctaatttttttctgaaaaaaaaaattaaaacgaaacttaacataattccaatgacttaccaccaactacacctccattcatctttgcccgagcctttgacgtaattccaaggtgacctctaacttttatttgtgcataaatttgggtttaattttatttatatagatttggatttaattttgtatatgtatatatatatatatagttagaatatatatgtatatgtatgtgtgtatatgtgaatgtatgtgtatttttgtgtataaatgtgtatgtaaatatatatgtttatatatgtatatatatgtgtaatgaccgctctagtaatgtggattagtaaaggcaat

SEQ ID NO: 294793 - DNA, 1907 bp, Cannabis indica
agagagagagagaagaggtttaaaaaagtggtaatgggcaaaatgagagtaacaagaaaaagaaagggtttttaaagagcttggaatggaatgaaatgacatgaaaagaaggaaaaaaatccaaacttttgaaaagggtaattagatataaagatgaaagggagcaagaagaagtaaagttttgatttttaattcttttattgtttcaaaggtgtaatctttattttgtgggtttcaaagaagctatgctgctcttctgcaggcctcaactgttgccccccccacagtgatctctattttcttttcctttctttctttttcctggaaaatcacattgggatgctcaaattccatcatcatcacccaaagacactacaaactagagagagaaagaaggaaggggtgtttgttgtgttgtgttatcaacaacatcagaatgtggttgtagataatcattgattattatgaagagtgaatgagtgcatatatatatatatattagtattgttattaagtattagtagtatctaatatttttttataagtagcgctttatgattgattaatgaaattttttataaattattttattaaattatatagaatcgatatttaattacactaagaatggtactaactactaagcactaataatatttttttagcaattatatataatgtgtagattaactttttgttgttatttattcttttctcccatattatattcctttgaatggtcactatctcaaatctgaattgatttttaactaaataataataattgtaaaaattaatctaatcacacaatattctattctattccatttattcattcaattctttttttttttcttaagttttttaagtttcagttattttttgttttacttaataaatatgtgttgtgtttttctgcactcctatttaatgaggtagttaaccttagattctttctcatgtgtgttttctattttttgctatttttcttttttcttcttttcctaataagttaaactttatttaatgaaatgtacaaatttaagtttttttaggtgagccatcattttatgtatattatgtgattttctttttgtttttattacaaaaaatattaaaaggtattagtgcttgacatctttttacgtgtcaatattactattagtacaattaagtatcatatctcatataagttaatgtaataatttttaaaaaagtatcgctaacgaattgtaaaacaatacgtctagaatgtgttggactgctggtgtctaataataatattcttttattatttagagagattacaagttatattaaaatttttatattgtatggtaatagacagagtttcatctcaaaactaattaccaataaaaaaaatagtttatttatgaattttatttttcgcacattagtaatatttttactataaatttttactaaatgataatacttttgatgtgttttggtaaaaaagaattacaaggaagttgggttaagaaaaatagtaatgtcaatcaaaatcttgaattaaaccatctcttttttactaaataaaccatatttgttattaaaaaacaatactttatagaagaacattactataatgaaataaattaaagtataagaaatttaatatttaattatatcaatagcgacatgacatattggagggtgttaaataataccagtgtcttttaatatatctctttctctatatataagagaagtggtaaaatacactagtagtacttaacaccacctaaagtatcatattattattgatgtaattaaatattaagtctctcataattgagtgtaattgcatttgtaaagagaattgctaaaaggcacagtatttagcactttcctcagtgtcatatcgctattggtataattaaata

SEQ ID NO: 294794 - DNA, 8632 bp, Cannabis indica
cgcctaagatagttagggtgttacaaggaaagtatgatgcggcaaaagtcaagagagatttggctgagattgggtgaccgaaactcaaaatttttccatgcttctacctcaatcagacgaaggcgtaatcagatatggtctctgaaggatgaaaatggtcagatttgggaagacaggagaagagtctcaaccattatcaatcggtatttttcagatctttttacttcatgccaacctgatatttcctctgactttgataacatattatccccattaatagaaccgggtgataatgaaaatatgctgaaaactccttctgatgaggaaattgcatcagtagtatttgatcttcaccctttgaaagccccgggacctgatggcttctcgggttgtttttatcgaaaatattggggaatagtaggacaagatgtgtgtgctttagtgaaggattttttcatcacttgggatatgaacaaaaaactgaacttcacatatatttgtttgattccgaaaattgataacccagagaaggtagagcaattcagacccttaagcctatgtaatttcgtttacaagactgtcactaagatcctttccaataggcttagacctttgatggataaattggtgtctcctgttcaatcgggcttcattcctggtcgttggatagcggagtcctctatcttgactcgggaactcatccacaagatcaagaacaaaaaaggcataggtggcttgatggctattaaactggacatgcacaaagcatatgataagatggagtggagattcatttcgaaagtcctcatggccaatggtttttgtaatagagtggttcacctaattatgcagtgcatttgtactgtgtcttattcagttctcctgaatggtagtcccataaagaagattaccccggagcgtggtttaagacagggagatcccctctctccgttcatcttcattctttgccaggaagttctgacgaaactcttactacaagctgaagagaaagggaagattcatggtataaagatttcaaggaatgctccccctatttcacaccttatgtttgcagatgacacaattctctttgctcgagcaaatgaaaaagaagcacaggagatcattaagtgtttatcaatctatgaatcatggtctggacaaacttgcagcaagcacaagtcatcggtcttcttttctaagaaccttgatatgcatagaagatcttcaattttaaactttctgaatgtctctccagttcgtggagatgaaagacatttgtggaatccttttattttcaagagaaggaagagagaagaatataaccgcttgaaggagaacatgaccagaagacttgaaggctggaagactaaacttctctctactgcagggagattgactttggtaaaatcggttttatcctctatgccaatttatgcaatgtcaacttccaaaattccggtcaccacttgtagagagttggatggaatactgagaaaatcctggtgggttggaagtgaaaagaaggatagattcttagttgttcgttcttgggataccatatgccaacctaaagagtcgggaggtttgggtttgaggagatttgaggatattaataaagccctcatttcaaaactatgttgggatttggccagccgtgtggagaaaccatggacttcttgcctcttaagcaaatattgccgatatgaaaatttctgggaggtgacacctaaaagtagtgactcggccctttggaagatcattttagagactagagatgtgattaggaagggctcgatttctcttcctgctgctggtgagcaaattgacttttggaggcaaccatggataccatggatgtcttttgctgagtttcaaggggtaatggataccctgagggatcggggttttaccgttaagactttggctgatatctccaatggtcatgagtggaatgaggagttagtgagacagatctttggagacgagttgggcgataagattcttaccataaacagaattccttattcccaccaggatagagtcttttaaaaaggaagaaatcacggttgtttcagcgttaaggatgcttatctagaggatcagagaattcgatttagacccaagaaagatttttggaaatggatttgggaccctggactccaccccagattatcgataatactttggaaggctcttagtgatgctctgccaactggtcacagacttgcctccttcacaagttttggctgtagtctttgtgggaatgatgtggaagatacgtttcatctgtttaaagattgtgcctttgctaaggctatttggtttgcaggccctttttctatctcggtggaccgtattgtttgtaacagtttggcccaattcttagaaatattagtcccgatgcttgctagtattcctagattggaggtcataacttatgttggctgtgtttttcaacagatttggaagtgcagaaacaaggttaaattcaaaggaggagttgcagatataaaaacaactcttggtgcaattaaaagtatctgctctgagttccttgatggcagttttcgaacccccactcaggatatccatcctcctgcagaacagccgatagaaaccctcttaaatgcagaaattatcatcttcacagatgcatcttggaaggaaggtagaagtggtcttgcggtggtagtttgtaaccttgtagacaattcctggttttacaaggtcgagagtttggtggctgttaatgccacggaagcggaaactttggctgttcggatggctttgatccttattgcagataattcatggagaaaggtgaagatcttatcggattgcagaactgtgttgagagcttgctcttcgtcgaagtatcatttagactggaatttttttaatttgtctttagaagttaatgagttaattagttcggtaattgattgtagtttgttttatattggtagaagccagaacacttttgcggattgtctggctaagaacattagaagggatttgattaaccccagtttgtatcctggggagggtgatccccctgtgatccccgagttttgctttttaccttaattgaactaaagttccttcaaaaaaaaaaaaaaagtggtatacggtgtcaattactaaatgtttttttattattattatttacctctttttctcttcaaaagtacaattaagcagtttaataaatacatagcagatttatgcacatataagacgacagttataataattcctacaagctagtgcttaattatgagctagagttttatatatagtgcaactttcacgaagataattaaaaactagtcggagacactagacatgctatgaataagcttcattatattataattaatatatatcactataggtatagttatatatatatccttagatatattatatatttttatatacattggattataatatttagatatatatatatatatatataatttaggggtatttgcggtgtgggtagtgcgatttttaactgttttttttaaactaatccgcacatgtaatttttttaatttcccaaaccgtacccgcactacgaaactaaaaaatttcagaaacggcatcgcaaaaaatggtacgatgcagtttctgcgatttggactatcaccaaataattaaactatcacaaatacaacaacacttgttgaaaaaagcttcaaatttcaacaatacaataattagtgggctttgggttaagacttcacatatggacctaaataaatataaaaatttgtatttttataatatgcggtgcggtgcggtttgaactgcatattaacaattcaaaactgcaaaccgcaccacgttaggaaaaattcaacccgcgaccgtaccacaaaaaatttcaaatcgcattttttttgctgtgcgagcgatttgaacgatttgaacaatttgataaataactctaatatatatagattttttttttttgaagagtaatcaacttcattgatcagatgtcctccaataataaggacaataaatcaataaggatagaatctttactaatggtacaattagcttttaaacaagagtcccgcataaggaaatgggccaccctatttgcagattgtttaacaaaattaaaagacacattaactaactcaaacaataaaagtttaagctcattaattaaatcaccatatatggagaaatcatattattggttttattatgaataacatgcacctttattaatgcagtctgtctctaccaccacgctcgtctagtcatgacgattgattcaacttaacacttctttgataacaattgcttcagcaatgacaatcggcactacacatggtcttgaatcttgaaaggattcaataagaattccctcatggtcacgagccacaagaccaaagccaaaacatttagcttgagagaaaataaccccatttacattgatgactttgatcatgtttatgtaaggtttaatccactgctttccttcctcaccatactgtgagtatcattatgagaaggatttttagtttgagcagaaatctattgatcaaaagtacgcttagataatgagactacctttttaactttcggttgaaaacttgaccaaacaatgtcattgcgacaattccaaagagcccaacatagcatcgacaccatttatagaacattttgagaccaagtattaagactatgctaaaaccatggaacaaaagtgccttctatactgtctcgagcagcaccaaaaagagacctccaacattgttgagcaaagttacagctaacaagcaaatgaagagttgatttatagggtatttttacaacaagtgcaagaaagatcagtagccacatgcttggtttttaatttcactttgttaggaaggcaatttgaacaagttctccacataaaatcttcaatatttttaggggtatttccagctgccataaagctctccaaaacttagattttggattcgaagttcaattacattttaattttttggagaagattataagttgacttgtcagagtactaccctttttaatcattgacccaaacccaataccagtggctatgaggagtatgaggagatgtttgaagttgcaagatgagatctcgatctgtgtcaataaataaattgttgagaagctcaaaattacaatatgagccatcaacaagtaaaagagaagaaaccttgcttattataaaaggtaggatggcgagtttgaatgaaattgtcctcttcgtcaggtaaccaaggatcattgagaacacttacatttagacttgagcttatagtaactcgagaactagatttcaaaagttcttttacttcaaagatgctacgccaaatgtagctaggattagactccagagaggaagacagaaaagagccattggggtagtaatgggctttgaaaatttgagcaaccagaccattattattgttgaaaaggcgccaatcttatttttccagtaaagcaaggttaaaatcatagagattacaaaagcccattcctccaatagttttgtgcttgcatagattcttccaacttttctagtgtatgctcgtgttttgagaagatttggattgccactaaaaacgggtcattaagctctcaagtttcttacatgtatccttggacaaaagaaacatgttcatagcatacgaaggaagatattgaactatagacttcagcataacttctttacgtactcaagataaaaaaaactattgtcccaactttgaattttttttttctatattttgtccttaaggtaaccaagagccgcattttttgttcctacctatcatgcttggtagacctaaatactttcttcctttgccagcttcttgaattctcatagcaaaacaaatttggtttcttattgatacactagtgttgctactaaaaaattgagaatttaatgtaattaactttttgactagaagcttgttaaaaaatttaacgtaaatccaggaccttagaagcctcacccatgtttgcatgacgataaagataagagttgtctgcaaaaaacaagtaagacactactggagcacctctcgcaactcgaaaaccatgaatccatcctctttgttcatagcggtggatgatggctgaaaggccttctgcacaaatcaagaagaaatttgtctcataatctccacaaatgactttatatttgactgagactaaacactgtttaatgagctccacccaacagtcatcaaaacctatttgaatcatcattgcgcagagataagaccattcaattctatcaaatgctttactcaaatctagagccatgacaccctcttttccttgttgctttctctttagataatggagaatttcaaatgaaaccatgttgttatctattataaggtgactcgggatgaacgcactttggttttcaaaaacgaccatacttgtttcatacggttagctatgaccttgataattattttgtataacacattacacaaagctattagtctcaactcagccattttctgtgaatttttcttcttaggaatgaggataacatttgtatcattcaaattgtcagggagtctaccagattcgaaaaaagtttgtactgttacaacaacatctcttcctacaatatgcttggtagaaggaaaggacttataccatctgagttatattatattgatataattataaatataacattatttatctaatcaccaaacttttattatatagagttacaacttgataagtgtacacattatttttgatagatctaattacacatataatataaattatacaaatcacttagtgtattataatatggacttatatgctaattagtgttgtattgctagctagctaaatttaatctatataaactatcattttaatagttgtgagttattggatattaaagtgtcatcgtgagttatataaatactttaagtgatacttttaatatatcgaaagcttaaattagaaatattaaaactgatacctattagtttatacattaatggtagtggtgatttccaaaaaataagagaccagtactttattcttatcttcctcatgaaaagaaaaaaaaataaagaaatcttaaattttgtattcttagaagattattatctaaaaaacatcaccacaaagatcatcttcattgtggtatacttatttatgtttatcttctctttgaattatcatgagtttatttagatatattgattttttgtttatacatttgtattagtatatgtgtatatatctgattaatatttgagtgttaaataattctaacaatttatattttatatatataaatttatttagcatttttaagtactcaatactaaatcaatactaatatgatgtagcctctcatataattagcagtttgattatattatttatttaatcaaatggtatgaaatctgataaaaaaatctaataataatattacattttaaggtgctttcccttaacatttttatgaatatcacaataggatcatgccattttatcctatgccactcatatgtgtaaaaccatatgccacacgcagccatattctagtctctagagatttccatttatccatatttacttctctctctatctacattttcctacgcatccatataagtcaccaaaatatttagtggaaaaagatatattgggcaagttggcaagttggatatcataatttatcatatatactatacataaatatatatatagtggtgttttgctaggtcaactgaatgtcacgggcaacaatatatgcaaagatcgatatatatatatttatatatattagagtttgtgcatttaattaaattaatgattacatttgacataagttttatttaatgttattatgatgagcaattattagtacaatatgaatactattaatgggaaaccattaagcatgtagttagctagagagaccagcttcgatcgtcatgaaaatattacagtcaacgtataaacatagtactgttcacttacgttagagatgtcactactctttctgactttaataattaacagctaatttgaggtatatattatgtcatgacataatatatattggatatatatattatgcatataaatatgtacaaattaaagttgataataaactatatatatagcacatgtttgattattgggaaactataatatgaataatatataaatatttaatctaattaatatatttgcagctttcactcagacctaattatagctattaatcttataagttataactaatagaccatcgatcaatcattattattataaatatgtaatatatttatgtatatattgtttatgccaactacacattaagattcaaagaaaaactttcttattattagtttttctaactatttagtgcagcaaattattactaattaattagttcctcctgataaataagtttttatattttatggttttatgtgtactatatgtatatgagggttgcttgcttgggttggattcctatgtatggaccatccatacagggccaactttgattaataatgaatccaataattttttttagtaaagtgtaagtgttattggatttctttttata

SEQ ID NO: 294795 - DNA, 3664 bp, Cannabis indica
atttatgtaaatacccctaaaaatcaatgggtcgaaatatttttgggcgcaaacacaaaatatataaaagaactcacattgctaagaatcacttgtttcacggagtcaagaatggacccacattatctgagtcaaccctgaaatatagtgggctataggaaaaaatatatttttaggcatgtatttagaaaaaaaaaatatggtatttttcaaaattagtaaaaacaaatataattttaagaggagaaattttttttgggctcctagactagtgggccctagacacaagcctagtccgcctataccaggactgggcctaacattacgtaccctataagaaaggcccacatgtcttttattacggaatattatttacaataaagtaagagagattacaatatatcacgtaccctaaggggctgtttggattgtgttaatgttaggaaggaaaaagtaatgtgaaatattatcctatttgttttgagagtttaaccttgaaatattattcctttagtaatttaactatcattgaggagggtaatgttatttgaataactatttttgaattaataaataattaatattatgatttattatgaacaaaatattacgatatacatttagtctataagatctaattttttttaagttattagcaataatatatatttattatatttaaattttatactgatagtgtacataaatgacataaaaaaataaaattaaatgagatggtaataaaatatatagaaatattcattttaattaataaataatacaatgaaatttaatatttactaattaataaatatatttctttaattaaataattattttattttaattttttaaaataatatataagatttatgtactcaactaaatagtataataatttaattaatggaaatatatttacatattaccctacacaactaaatataatttatgcattttcttacaatcatatactcttttattttattttattttgaatggaactatattctctttcataatagtctttataattaaattattttaaacaacttgtatatataaagagactggtaagtgacaaacaatggtatatatagttccattgacaaacaatggtaaattattttaaacaatggtatattaccctatcaaacactgccttaccctattaaacaatggtatatataaataacaacctatatatcatccttgttaacttaactaaaacctaactcataaaactgaccttttttcataattaaaaaaaaaaaacaacaaacaaacaaactcataactcactttgattataataattcttcaaatttttgcatgtgcctattacaataatgatagaatgacctaaatgaaaagtggtttgtgtttattagtatttctttcatttttttatgaggtgtttattattattctaatggttgattttcttgggaaacaaattaagatttgatagtcatgatgatctatcaaaatgactattgatttatgtgtacatgttattttcccaattaagttattaagttacaatcaaactatttcaagtgattaatagagaagtctaataaatgtggattagacttcttcatatgaaacaaaattagtataagaatatgattagagacgaaaaactatgagtttgtacataatattataaattagcacgatacgatataaaaaataaatataaatttaaacatgacacatcacgaaaagcccaaaaaacacaacgtacacgtaagcacaaattagtccatgctcaaaagcacaacacattaaaatcttatatttttataattataatagtaataataataaaataataaattgattatttattataataaatatttaaatttggtaattctaatgattttttgaaaatattattaaagtattatataaaaataattaaagttatagaaaatacatatagtttagtaaatatctcattaattataaaaataaaatgtgcaaaaagtaaaatacaaatttgagttctataaaaaaaacagattggctcgagtaaattatgataagaatttgagtacagtataacacgactcatatttaaaaagacacaaaaaaaatatgagttggcaaactcgacacaaacatattctacatgtactacatgtagaagaaaaaaaaaattaaaatatttaatattaaatataatcttattattgaaaatatataaacaaaaaaactaaagtacgtgtagtgtattgctaaaggccttatgttatgttatggggacacaagaatactaaactagtatttgatatttaattaagtgattaaatttaataattttcttataatatcttaaactaaaatataagaaatacaatattataaaattaatataatatatataaaattttcttaatacaatattatatatatatatatatcttctaaaaaagatatcaatattattattattattattcatgcatgcatgcatgtattttaattaaattaaaagaaaggacaaaataacataggagtgggggctttgaagtttgaaaatgtgagactatatatatctatctttaattatatatttgaaaagaaaaagttgtaaccacaaattttatcattaattcattctttcatattcatttgattggaaccttgtcttgctgtatccagctatggccttatatgtcatcttaaatgacggtgacccttttttcataaatttaaacatctttaggggcctaatcccaaacatataaatatatataatagagtgaaatacatcctaaaaacaaataatagagatctcatccaaaaatacttttattgtctatgttaaagtgatattcacaaacatattattattattatttactataaaagtgtttaaaattattatttttttaatgaacaaaaattaatatttaaattattatgtttgttatatttaagtatccaaattattttttgatagtgatcaaaatattataattatattacaacggtagcactaaaatattttattttttttccaatgaaagtccttgagttataagtaagaatggcgccacataataccatctctaatgcaataactagatgtatagtgtcacatttaataaagaaaaaaaaaatactatatttacaatgcacaataatattttatgatacttatttgtgacacttaatcacacaaattgatttttccgtagtaaaattctttaaattccttttttctattttggtatttactattctattagtgagtatgtgttaaatgtcatcttgtactgctgatgatgtgtacaataacatacacatgacatatttttattagtacacatcatacattacttaaaatataaaaataatttaaaaaaattaaaattaaatatatatatatatttatttttcttttcttcttcttccaccccttctttattctttcttcctgaagaccttatcacaaggactgaacatttatatcggattcgacccggactcgatcaacctgcctgaacttgacctggccaacccagctatgtggtaaaactcgttccttatgggttggtcgggtccaacccgttcattttcatctagtaggttccttaaggacttttgtctaattttattcaatttttactatttcagtgattgtttatgt

SEQ ID NO: 294796 - DNA, 6119 bp, Cannabis indica
gagacagattagtaggagcaaacacagtaggcatagcattattcaaaacattaggatgttgaggcctagaggaattagtgggtgggaatgtgaaaccaggaggagggatgagagtacttaacctggtgggaatggaactaacagtggcctgttggtgagtgggcaagggatgttgagtgaatttaatttgtgcttcagaggcaaaaggaaacactaattcatcaaataaaacatccctagatatgtagactcttccatcctttgaaagacacttgtatcctttgtgagctaagctatagcctataaaggtgcaaggttgagatcgaaattgaagcttagctttgttgtaaggtctgagattggggtaacaaagacaaccaaatacttttaaagaagtataggctggtttgacttgaaatagaatttcaatgggagagagattattgagttgaggagatggcattctattaattagaaaaacagcagaccgataagcttcatcccaaaactttagaggcatactagcttgagctaacaaggtaagaccactctctactatgtgtctatgttttcgttcaactaccccgttttgttcatgagtgtgaggacatgagactttatgaacaataccggattgttgtaggaagtgagtgaaggcttggtactcacctccccaatccgattggatttgcttaatagggagaccaagttgaagttcaacctgagttttaaaggtaataaaggtggaaagagcctcatttttggttcgaagcatgtaaatccatgtatgtcttgaaaaggcatcaacaaaactaatatagtatctataaccactggaggagttgattggggcaggaccccacaaatccgaatgtaagagctgcaagggagcagtatacacagtggtggattttgggaatgggagtttgtgaagctttccaagacagcaagcagagcatagttgattagacaaatcaatgtttttattgcttgtagggatattacatgagttgagcacttgttgaacaatcctataatgaggatgcccaagtctcttgtgccacaaagtaaaagaattacaaggagaggatagagtactagtgttacattgagttgacaagggactcgatttacactgagttacagtagaaaaagagtctgtgctagtgagattacatgaggcagattgtttgttgacagagagaagattgagttgattagaatcaaacttgtacaaaccatgttcaagcttcccaacaagtaaaatcttcaaagtaacctggtccttgacaacacaatgaaaggggtgaaattcaaaaaagactctattatcttgagcaaattgtgagacactaagcaaattttttgtgatttgtggcacatgtaagagattgttcaaaacaagagtatgatcataaaagggagagataaatgaagaatggccaatgttttgaatatgcaaacctgtaccattacccatatggacttgctgatctcctgaataactgctgctggttgtgagattttgctcatttggtgtgaggtgattggtggctccagagtcgggataccaactagggtcattgacaacctcaggtgtagcgtagtaagcttgcatctcagctatgttggcagtaacatggcctggaaaattttgaaaggattctggtccattgaaagacttgtcaaagcgataaaaacactgctgaacagtgtgtcccaatttgtggcatagttgacattgaggtttttgaccccaagtagtggagatgccacggccacgagaagtgcctcccctaaaattcccaaattgaccacgatttgggggccctgtgcctctggtaacaggaacaaaaaaaccaggttgagagggattaaattgagtgtaagttggagtaatacctctatacatgttgccagagccaggtgaggggatattttcagaaactgaggtagtgcctttccctgactgagcctttgtatgagctaggttggcttcatttttgacaatatcaagttcttttgcagctttgtccaactgaacctcttgtaccattaaaagagcttcaatttcagctacactgtaagcttcagatctggtgttcaccgaagtgatgaagacattatattcagcaggtaatccattgaagagagcttcaatgtgatcttgagaagatgtggtgtgaccgattgaagcaagagtatcaatgatactttttattttgagcagataatcggacagagaagactgcatcttagtgtttctcagcaaggtcttgtattgacctattttggcacgattgagagaggtatagtactcacgaagattgatccagatctgagcagcggaatcggatccaaccattcttgtgagaactttctctgacatagaagagagaagccaggagacgaggatattatcttgctgctcccagtcctcgaattccggacttactctgttacggcgtcgatcatcgtcagagagatattgtggcggagcaagatttggatcgagaaacctttgcaatcgactgcctttgattgcagcaagcacctggtgcttccatggtaggtaattaaattcatcaagacgaacggacagagagtgagagaaggctacgatatttgtttttggaagtgtaacttgttgtgacgaagcaggagggaccaacgatcctccattgttgccggcagaagattgctccatgaaaaaaaagaactaaagctctgataccatgttgtagttcaagaatcaagaagaaagaacttgaacagagaaaacagagaaagaggaagaaagatcttttattgaatcaattcatctgccacaaacagattacaaagaaagtgtttatatacagctaacaaccgactcaagctaatagaaagttagttagaaaggattacagctgtcccaactgcttaactaactcaactaatcacaaaacaaactagggtctcttaacagagagaccttctgccaccagaaggaaaaggtagggagataggggatcacattgcctaataaccctagaaggttgaaaaggaggggaaagatggttgttaatgtagagtttgaaactaacggtggaaatacatttcaggatgagggcaatgaaattaaataagctaggagtattgtttgaagatgttatagctttattgtctaaattttcgtggacatgctcgctctaagaatttagcggctcatagtttgacaaaacttgctctgcggttagacaatgaactatcctggttcgaggaggttctagcgccagttacggatatctgcgtcgtaaattcatgattgattctaatcacttcgtcaaaaaaaaagactctcttttatataaataaatataaaatatttctatccaatatgataataattattgaattattactttcctagattattaatattattaattatttttttttttatttttaaaccacatactgatattttaaccttttttttttacttttttatgaattttttcaaaaaatattatattatttttcaaaaataatgtataaattttatactgtgtattgtgttaagctttcaaaattgttccagattattttttagttgttccactgttgttttaattgttctattttgtagttttacggttgttttataaaaaatcaatatttttgtaaaaaattctgtgtgacaataaaattgtaaattttaaatctaatattttaaaaaaaaagatttttttttgaaagaatccataacccaaaacaattaacagattgaaactaacagatgctatacataaacgttaataaaaagaaaaataaacagccatcaaattttcattgggggacagtgtgagggaatttgggacagagaatttttgttcttcttccatcacctaaattttaggtaaatgccagatataataatgtcaattccgacgacttttctgacgtaattccagtaattttttcgacatcgacagctactccgataattttttcggcaccgacaacactctaaaaaactatcagaattgacattgttgccagaaaaatcactaggaaaagcactaaaaaactagtttcttcatcaatgtcttttggatacatatattgctgttatgtacaaataattttctaaatacatccacaggggcgaaagaagaacaaacaacaaaatggggagagaaagcttttataaagtctcagatgcaaataagtttgatttgattttatgtttatttttgttgaaatgcaattggatacctccttgttgatcatagtggctgcctcgttacccaacacccaaaaaaacagaaaacaaaaacaagcttgtcccaatttgataagctacaaagcagactcttcagaggataaaggttgtaaagcacggattcgaatatcatactttctccgttttgaaacttcatgaccatggcctgaagatgaaccagtaacatctgaagcaccagattgagaagatgtataatcatcatatgctactccaatatatttattgcatttgcgacaatgaagcttgattcttcggcggaacaaaccccacgaattcttggagaaatgaggtacgcactgaatctcgtcaacctgagagaatctgctatcgtcaacggataggaacgatatgatcccccgctttatagacttcccatattttgaaccaactgttgagatgttccggttggaggagcttaggtttaggccataaccacatgaaccgcaactgtgggaagataaaaacaagaaatattttagtatacttaattcatatgtcgatccaaaaaccaaaatataacaaattgcatgaaaaaacataattaattgtttgaaaactgtcagaaacctcatcactctttattggaagagtagaattggattttggttgaactttcacatttgtaactcagtctaccaatgttattagaacaaggtgttacaagtacacgaagtaagacatttaacacatcaagttctacactattatattggttaaacaatgctatacaaaatctcaaggaaagttcaaaagaaaatcctttaaaaggattataagaacctagaaaaattctttattttccaacccttttccataatgacaaaacatagcatagcacaaaccgatcatttaatgttgtgggaatcaaattcatcattaatcatcaatgagctttcccaacaatcaagctgtatatggaatttaaccacaacaatgaaatgaagagcacttcatctaacaaaagctgaaaggtacccagaaaagaataaagaaaaagacaaccagcaaacctacaattatagagtaagcagaggcctattgtccctctttttcttttttttgataaacgacaccattgagcacttgattcaaagtggctgtaaaaggattttaaagaagagaaatactgcaaaagtatttgataatacaaagccaactttaatttccaaggcaaacaaatacatgtccagaaaatccaataatttcttttattctatcagaaacataatatagtttcttttttaataggatcaaagataacaaatggattggcaacccctgtttgataactaaaggcacagcagatgtcagaacatgtttgaatcaacagttttatgtttcatatctgaactccatttagtctcagcaagtggtacttacaaagtgaaaataatttttattttatttttaaaattttcagtgttcaaccgcagtgagagttaagttatgataagctacggaattaccaagttttgaagctttcagaaaccatgacggttgatgaatgctataaacatatcagtatttatatacaaaagagtatttaattgatgctaaagcaactaaaagaggatcgatttcatatgaaattagaagaattaaagatatataaaggtttgttctctacagaattgctcagtgattcgggttccatatgcaattccttaaatgattcatatattaaaagccatgttttagttgcttctattatatgattgccttttttcattttttttttttggtgtaaactggtattacttagtctcattatatttataaattaaaccaataatctacgagtatttattattattattattattaacataaa

SEQ ID NO: 294797 - DNA, 1007 bp, Cannabis indica
cccttggtggatggctgattcggaatactgaagttttttcacttggttttagtgttttagtttgctagttttctgttagtcttttgtcaagttctttgttagctctcctgttggtctggctagacttccgtttgctgtttgttttagtagttccttgtcctctgtttgagcgttgtgctctgtgtttgttcttctttggcttcattaagcctcttaatcaaaaaaaaatatatatattttatggtaaaagattggagttacattatatgatgttaattgtaattttttagtcacaaacaaataattttttgttgtaaacaaaaaaatagtatttatattatgtttggtaagaagagaaagggagagtaggatggatgagacttgatgaatgatggagaatatagatgaagaggaaaagagcacttctaatagtttttctactttttttaaaatacattaacaaaattctattttatctatttagctcacacttttacataacaccatatattagttactccattttctctttatataatttaagtattatattttttaatatattttattcatttataatttattttatgtatttatagatatagaggatgtgaaagaaaaagaagaataataataaatgtttagctaagaggtaaaccttagctaaatgtggagatgtactattcataagttaaaattttaataatatgtatgttctctcttcaaaattcaacttctttgtgattttactaaacatttcattcatggctgagaccatttgaatggctacacatggaaaatctattccttagtatcatatttattaattcacttggatgttactgctatctttctgtaattctatatacattaacagtaaggataagattctttcactcacaaaaataatctcctttcgccgtcgccgtcgtcgttgtcctcttgttcttcttcaacctcttttctttttttcttctttgtaattctgagataacagattaaaggaa

SEQ ID NO: 294798 - DNA, 3005 bp, Cannabis indica
aaatccaattacattgtggcttttcaaacgcacccttacttaaatcttattcatatttattatttaattattcttaattattttaatttgactcattattgttggctaaaagcaagatcaatattgtccatcctttctaaactctttctccatcctactctccctccataccaaacataattgttgttgctcgaacacattaataataacttctcatataaaatgaaacatttgaaaaaccatttcttttatgtttttttttaagaaaccatttttacaagtactttttggttgaacaaacatttttaaaagctttgagtgagttcccacttcccacctatgtatttcacccaaaaaagaaagttcccacctatgtaggccttatctttctttcaaaaaagattcaaattttacaaagtatgcatatttattccggtacaggtgcgattttgaaatccaatgtctccccggtgagaactctgacccatttcaggtcatctgccccgaccctgatgggatcttgggctactctctagctctttgtactgtgttagcggtggcggcgaagctacattggggctagtgttcaaagttcattcaaatttgcatctgtgagttctctttctctcttacttttcctctacaagttttggtgctcactcctaaaggttttgaactgttgcaactactaattcatttgcaattttatctgggttttgtaagatccatagaaaaaaattaaaagttagttgatgcaagaactagcttgattttttttctttatttgctttcctaggcacatcatcattatttgctttgtattggtttaattgttgccttccaattgtttgagttttgatcatatagaagtagtcattttagttattttcatttttctttggcttgttggagtagtttctgttgataatttttaaagatctttataatggtaactaaatatttgattactgtcataacagaatggaatcgctccctgatgcattggtacacactatattattgtcatacatgaataatgcccgagatgttgcaatttgtaactgtgtatctaagtgttggaaggatgttatgccttatattagtaggctctacttccctcgcaattgttttgataatctttcgggtagtgacagtcctgatgaaattgttttgaggatggtttcttcgattgaaaggttagaagagcttgttgtttatagtccattctcaggtgctggcctctcctcgtggctatccgtaatgggttcctctcttaggcagcttgagcttcggatggacaatctaactgaactgcagggttgtcttgaaagcccctttaagttggattgtataagctttgcaaagaatttggaatctcttaaactttggggtgtcttaataacccaatctcccaagtgggaagtctttcaaaaacttaaaaaccttgaaattgttggtgcaagattggacgacctagcattgtctgcactgctaacaatgtgtccttatttgaccaatttgctgctgcttggttgtgaaggagttagatctgtatcaattgatttgcaatatttagagcggtgcaagcttgatttttatggcttcggtaactgctcattttcaatgaactctccaaaaattgaagttcttgaggtgcaaggttgtagttggatccgggttcgggggacagagtacttgaagaacctctcaattgccaacaatgcaggtagtttagcaatgtgtgagtttttcataatatgatcctactgaacctgtaagtggtttctaattttcttttgtattggttttcatcagggagagtctacatggttgatttggaaagcttgtggctctggagttcttatccattagaggagtccagtggtgttgggatgcaatatgcaatatgcttcaatgggcaagcgaggtgaagcacttgtttatgaaagtcgaattcacgggagattttgaagttcttcaaccctttccagattgattttgttgagttcttcaacaaccatccaaagcttcaaaagtttgacattcatggagccatgttcgcagctctttgtcaaaaaaacagcttgaaaagggttagtagatgtaatcaaaacttcctttcgtctggctcccaactttgtttttcaatgatttgatacctaatactaatagaattgttttctcttccattattacagattaataggggctttgtaattccatgtttggaggaagtggccatcacaattcgatcgccattgaatgctgagcagaaaatgagcacactagagtcgtttataaagtttgggaaatatctaaaggcaatgacaataaagattcttcagatgaagagcaatcacagcagtgcagatgatttttttgatgagatatgcaggtttagatacatgaaccggaagattgttcgaattgaataacggctcattaaatctaattccatgttcaatttatcattcaatttcaagttttacctaatttttcaaatcactaatcaactgaactactaatttggttcaatttaaattcataattgttgtttccccccttaatctcttgagattggtgacaagcaagtagtcaccttgcaactgttctactacgtggaaaaagtgtacaccttaaacaaaggcatagctttatggaaaattttaacataattttttttagttatgttgatctttaaattcaagctgttgaatatattaggattgaaattttgtacagaagtttttgacaagtgagaagcatgcgagtcagcgagctagtattcttgtgattcacaccatttttcactaatccaactcaattaaagcaaaaagctcacgagtcacgacctcgccaaagccaccatctattagtcaaaactaaatttaataaactagaaaatatactaccttccgcacgactatatgaaaataatatgattgatttttattaataataaattcgtaaattgaatcgtgtcaaatttcaatttgaattatttt

SEQ ID NO: 294799 - DNA, 6243 bp, Cannabis indica
aaagtacaataacaggacaaaatcatatccctatataatagatatgttgtgcttgtgttagtgtgtcacataaatatatatattttcattaaaaaagttaaaatcgattattagaaaataaaactagatttattttaagggaatttttcttttttgaaatggaatcaaaacttactttaaaacattcataaatctttaatgtcttttatattattatcagctatttttctaatttcttgacaaaaaacttttcagttatccaaaccaaatgtatgcaattattgggctttggattggatcctctagtcaggacgttttgtttttttttcttttttaaagaactaaaagttcataaactaaaagagattgacgagaatcatagtgagattttcctccccttgatacaaaccagccaactgactagaaattttagcgctctttgctagtccacctgcaaaggagttaaaaaaacatctagtaaaaaataaattacaattagagatactactagctaaatctaaaattgaaagtgataaacctaaacaaccccaatcggggaagcccttttagaagcaagagcttgaaccatcaactgacaatcagaaagaatatcgatattactccaattatctctagttgcacgagtaagtgttgaagaaatcgcaatgatttcagctacgagagctgactgagcacctactctgttagtgaaaaatcccaagaagagtccaacaaattaatggcaatcacggcaatacttgcaattccatctttccacgaagcatcagtatagagaataaagtgcgccttatctctgggagaaataggaagctgcactgactccctcccaaccctaggggtcaagcctacttccccctcatactcttcaaaagggccaaaaatttagaaaaggtgccaacacaccttttgcaccagcaaatcaacctttgtaaggcctccattacacctaatactatttcgaaagtgccataactcaaggaaaacacagccaataaaagtaaaaaaaaaaagtggtccttttaactcccatatgcacttctaaaagattttccatgaatgagatcactgagttgcctggaatcaagtcaatttgaacacgtaaaagtccaacaaaccacaaagcccttgtaaacggacaatcacgaaacaagtgcaaagatgtctcttctacacctttacacgaaacaaaagcgagcttagagaatgtaggaatagcattattgagaacacaccaaagcatcattgagattctgggatggatgtttgtgttccaaatccacccccaaatatctcttttggagtcaaaacgatgagcttgattaactaaataagcttccttaactgaaaagatcatatccttctttaacttccaaatcaaactatctgaatgtaggtagggaattctaggagttttggcaatcatagcacccagttgatccccaaaaatctgactaaccatgacagtattccaagagtttccaagggagatatctgcaatcggtaggaactgtgaaccttttttgaacgcaaatcctccattagatccttgaaatcattaaattccagccaaggaatccaagcttgatgccagagatcaatggactcccctgaagccgccaaggacactgaccctcttctcaagatatctctaacatccagcaaacatttccatagaatagagtcacaacttttgggagagatggaccaaaaattatcatggtagaaatacttacttaacacacatctaacccaaggttttggctcgcttccagtgagactccacgcaagctttgccaataaggctctatttatgtcttcaaatctacataaacccaatcctccagagcacttaggttgacacaaagaatcctaagaccttagggccatgaatctatcgttctctttattgcaaatctaccaaaatttcctaattatagcatcagcttccctgcaagtagagagtgggaccttgtttgtagacatcacatatcagtatggaattagcaaccaatttgatcaaaattaacctccctgcgtatgaaagagattttattttccaaccttccacttttttaaccatgctttcttttaacttaatgtactcatcctttttcctcctcttaaagacgaaaggattgcccaagtatctttcatcgcccctaacatgagagatggcaagattcttgaggattgaagcttttttgttcgaatccaagttacctaaaaagaggatagaagatttttccttgctacaagtttgacctaaccatgcttcatacaaagacaaacatttgagaattttcagagcttcatttttgttagcgcaggcaaatagaatagtaacatcaacaaacatcaagtgcgagatgggcggggcatttcttgaaattttaataccatggatgagacccctatcttcagcccttgcaagaatcttagatagcacttcttggcagaagagaagtaggaatggggaaagaagatctccttggtgaagacctcaatttagacagaacttttgtaatgggctccctttgagatactgaatagaatagtttcatacactccaaaatcattttacagttcttctcattgaaaatgttttccaaaagaactctatggagaaagcaccactccatcttatcatatggtttatgcatatcgagtttaatagccatcaaacctcctttaccctttttatggtaaatcttgtggacgatttctgagtgagaatggaagattcagcaatccatcttccaagaataaaagcatattgaaaaggagacaccaaaacatccatcaaaggtcttaagcggttagacaaaatttttgcaattaccttataaaggaaattgcataaacttatgggtctaaactgctcaattctctccggattcttagaatttgggatcagataaatgaaggtggaattcaaattcaaattcatagatcccatacggaagaaatctataaccacatcacaaaaattcctaccaacaatgtcccaatacttacgaaaaaaacaccctgagagaccgtctggacctggggccttaagtggatggagatcgaacacagtatcccttactagaagggattcgagacaggaaagcattatcttcatctccaattttcttattgaataaatcttctagctccaaaggaataaccaagttgcaagaagaaaacaaaccagaaaagtaattttctataatacttgacattttccttctgtcatcgcacttattcccttcatggtcttttaagctcaggatctggtttcttcttctttgaataatcgttgaagcatgaaaaaacttggagtttctatctcccaaacgcaaccagacttccctcgactttggcgccactaaactttctttttcttccaagcttctcgaagttgctcttgaacaagtattcttcttcacatagcttcgaattgacagattgtttttgaatccaagctagttgatcctccaacctggtaattagtttatcgcagtcctcaaaattatcctttctccatacccttagatcacttttaatcttatccacattttttaaatagccctttgtaggatctagagaagtattgttccaaacagagagaacaacttctctacatgaggccaccgtagtccatgctttgaaaaaatgaaaaggaaagaaacctctctttctattcagcagataatcaaatagaatgagagcatgatccgagattgaaatagcaaagttaattactccaccctgtgggaataatgtaacccaatcaaaggaagaaattgctctatccaacctctctcgaatgagactccctgagaatctattattctgccaggtgaatttacaccccttgtgtcctaagttgattcatccatggtgatctaggaaaccattcagatatttgcaatcgcgccaagaggctttaacacccccagtttctcctcagcaattctcaaacaatttaagtcaccaataattagccaaggaccatcccaagaatcacaccttttcaaatcatcccagaaaacacattttgcatcttcatagggagtaccataaagagtaatcaatctccaacctaatctaacattaggatcccacaacactatttcaaagaaggacttaccatgcttaatcaattgaatttgtgtgtcatattgccacatcagacagtaacaatccgcaatacccttgtagggatacaaatacaatttgtgaaccccaaacttctagtcgtaccctccatttttcactgttaactttagtttccatgagaaagacacactccgacctgtgattcctcacccagacccctaaggcttggactgtcgggtcccgagccagtccccaacaattccaagataagatccacattgagtttgggggttggtaagggacgccttctcgcccaagtgaaaattatggatgctctcaatcctaacattcaccaaattcctttcgcttgtaaaattcttcatcacctcttctttactcgaatccaaaataatatttttcttgaaatccattgtcgaattacttggtcttgagttcttttttcttctcttatccttctttttggaggaagaagatgtaatgccaatacccatggaaaaatgagcagtagacgaattagggggaaaaggaggcgaaattggagtcttagagttaaaaacacgagaattttcaggggttctttggacaaacggaactagagagagaccaaattttctcttcctttgtcgaggacagtggtgaacgtgatccgagacatcaactgggtcatggaaaagagtaagagtgggctcaaatttgtctataaggggctggcccatgagttcttcagctaagcccgtatcaccagcattaatgggccatgggaaatgagtaggttcagagtgcttatgtgggctcctagatttgcataaattaacatgtgggctttccaccatctgctcataggtgggcctaatattggtcatgatcgttgttatgaccctagcatcattaggagttgggataggacaggaagaaaacttttctaggatcttcttatctcgatcctcacaattttttcccatataatgtctatgcaagaaactaggggagattgacttggtccttctagcttgaagaggatttcttgatgataacgacgagtccctgttaagagcatcgattttctccaccatattaacaggttatttctctacaacttttaaataatttccatatcttgcacctgggtgattttgtgtagttctgatgactttctgtaaagatcgaccaatgagagataaatcagcagaagtcgtttggaaaaccgtgacaggggctttgtctagaattctggggttcaactttattgacaaagagtgtgccaattttttttttcaaatctgaactcaacatttggcccgaaatctccttccttgttattgaaccattcgaggtaatttttagtgttaaaacagcttaaaaaaaaaagcaatctttgctttaatccacagaccaaaagcagggacaggatcaccaacaagagggtacacaaaggctattggtctcacatactacttcttatcatggcccaagtaaccacaattatagcagattttaggtagcttataatatcgaaattgaatccattctttcttgcctctcttaatatccaagtagaaacctgaaatgagttggtgtacgtagaaatttcaacttggaatttaagaaagcccctttgcttaatcgttcattgatttgcgagatcaaagcccttgtagacctgtaccttcgcaacaatggttggagtattaacccaattatagagtaggtattcccgtcgcttgaactcaaaaaactgccttccccatgtccacattactccacacaccatcctaaggccattcatggataatcatcatcttcccattgatcaaccacggtctattatctagaacctatatctttgagatgagacctagagatgccttttccttcaaaaaaaataggccaaaatccttgttctagtgatctcctcgctgagttcaaaatccagttccagctctacagtacaagagtcaaggaatgattgcctcaaagttttaagattatctaaccttatttgtatctttgtttccatttaaagcatcattaaattcacaactaccctcctgaatattatctgcaaagttattatcctgaccatcctcaatgccattt

SEQ ID NO: 294800 - DNA, 4166 bp, Cannabis indica
cttttatggacacctaaatatataatattttagtataacttaaagtaacataatattatataaaaatataatatataatacaatacaatacaatctaatacggcattccaaacgaacccttaattttaataacacaagataactagacctcacgatcattacaaagctaattaatgcacagacggttgggttcgggttactaattgccatggattttataatctattttcaacaaacttacaaatcataaatcaaagaaatagtttccaaaacaaagattgatatttaacaatgaaattaaaataatgtaatagaaaattttagtaaaataaataacacttttgctcttaatctttttgcgtttcaatcctatatattcttttataacattattccacaaatcatttttgtacttgattttctcttcttcagattatctaacattttcataagaaacaagaactataaatgtaaaaatattaaacaagaaatggtactaaattatcagtgcatttaatcaaaatgtactgagaaaagaaaaaatttacatgtcctttctttccccttattaaaggacccaataataagaaaataaacaagagaagaaggggttaggacattggacccaattatccattttccttcaaaaacactctgctgctgcaatttaagcttctttttttaaacagaaatggtaagtaaatcctcttacagagtttttgtcctcaaagaaaaaataatcaatcctgttttaccggcggcatcatcgccagcagctcctcaaattattgatttttcgcaactatcaagacaaaggagagaaaaaaaagaaagaaaaagaaagaagaaccgagcttaagcgttttccttggcaatcttctcggccttggctatcacctcttcgatacctccaaccatgtagaaagcttgttctgaaagatcgtcgaacttaccgtccaacacaccctgccaatcacaaaattacaacatgtaaattcgatggaactctctaccaaacaactagaatggaaacaaactttcctttcaatctttaaaattcttcttttctctctaccaaacatagtgtaatgattgatgaatatattgcatgataatgggttacctggaagctggcaatgctctccttcaactcaacgtatttaccgggggcaccagtgaatacttcagcaacatggaagggctgactcaagaatctctggattttacgggcacgggcaacagtcaacttgtcatcttcactgagctcatccatacccaaaatggcaataatatcttgaagattcttgtagttctgaagaaccttctggacaccacgagcagtgttgtagtggtcttcacccaaaatgtgaggtgagagcatacgagatgtagaatctagagggtcgacagcggggtagataccaagctcggagatctaataggtagaaatcaaggattaaaattgagaaaatagtggtatgtagttcaaaatattgatacaatagttaaacgtcaacctgtcgtgacaacaccgtggtggcatccaagtgagcaaaagtagtagcaggggcaggatctgtcaaatcatcagcaggcacataaatagcttggacagaggtaatggaacccttcttggtggttgtaatacgttcttgaagtcctccaagatcggtagctagagtaggttggtaaccgacggcagatgggatacgtccaagcaaagcagacacctcagagttagcctgcaaaattggaaatgaaagaaaatcagatcattattcactacaacttgagtttgaagccatgtatataaaaatatattcaatagtttccaagtatgcttacttgagtgaatcggaaaatgttgtcaataaatagaagcacatcttgtccttcagcatcacggaaatgctcagcaacagttagcccagtaagtccaacacgagcacgagcacccgggggctcattcatttgaccgtacaccaaggcacacttgctgtcactctgaaatagtatacacatatacatatacattaatttataattccatcaaactataaagaggaaatgaataagcaatatattcagtatagaaaaatattatactaatagaaatgaattatcctaacctgcttctctcctagcttaatgacaccactctcaatcatttccctgtacaagtcattaccctcacgggttctttcaccaacaccagcaaacacagagaaaccacctgataaaataaattaagtatcagataaggtgtcatcaaataagaactctatcaactatgggagaatgtgccataaaaatgaaaattttgaaccaaccatgagctttagctacgttgttaataagttccataataagcacagttttaccgacaccagcaccaccgaaaagaccaatctttcctcccctttggtaaggtgcaagaaggtcaacaacctggaaattaaaagcaacattaataaaatggaaaaagagcaaaaagaaacagccctcaaaaagaatctgtgaactttatatgtaaaagttaatgaaccttaattccagtaacaaggatctgttgctcagttgcttgctcaacaaaagctggggcttctctatgaatgggcaaatagtgatcggtttctggaatagaaaaaattcaacaaattgttaccaaatactaaacatagctaagaatcaaaactacccaaaccctttgaatcattgtacaattcaaacattccagtttactcactaatatcgcctctgtggtcaattggctccccaataacatttataatacgaccaagggtagccctaccgaccggaacctgaaacgaaaaacacaaagtcaataacaacaatcagacaaatcacagattcagtcaacccatcaatcgcaataaacccaacatatagcttagcgattttcatttccaacattttctaggctaccaaacagatcaaaataacaaaaagcgttcagatccagcgacattgtaggatcacgaaaaaaaccctaaattttactttcagaaatgtcaacccaataaaacctaataaaattcaatcaattcaaaaaggagaatttaaaattgaatcgaaaactttacagtaataggcgagccagtgttgagaactttctgtcctctaacaagaccttcagtaccatccatagcaatagtccgaaccatattctcacccaagtgctgagcaacctcaagcaccaaacggatcgagaagccctgaacctcaagagcagtcaagatcggaggcaatccttcgtcaaatctaacatcaacaacagcaccaataacctggcaaacttgaccgatcgaaccagcaccagtaaactcatcagtaatcttaccacccttgacagcatccttagcagctggtggagccggagccgaagccgctggagccgcagcagcagatgtggcgtattcggctacgcgattgagaaggtaaccgtgtggagaagcagcgcgagcggtggttggggaaatccttggagttccgatcggtgatctgcgtacggcggaggatttgagaagcgaggataagatccttcgcgaagccattttttgaaaagagggcttcttcttcttcttcttcaatggaggaaagagaaagagaaaagggactagggtttgtggactgagtttcgaagggttatatatatgtactgatgcgataatctgcgaattttgttgggagttaaacggtgtcgtttaaatctgcgaattttgttgggagttaaacggtgtcgtttaaatctgcgaattttgttgggagttaaacggtgtcgttttagcagcaagtagagatatcccatggggtattgctattggtgctcagtatcttctatagaatcaagtcccaatatgggccagttataaataacaataacctctaaattgtaattagttatatattttctaagtcccgtattaccaaagtatacctctataataattatatcttaataaaatatatacatgtattttataaatttatttatgtaaaattaataattttattttaaattataatacatgtatgaatattatatttactctaaagtatttctattatgatatagtattaatgattatttattgttattaacattgatattttttagttttttaatttttttttctagtgtaact

SEQ ID NO: 294801 - DNA, 3562 bp, Cannabis indica
gatgttaatgaaacatacttggtagtaaatctagatcctggtaaaatatttccaacacttgtttcatcccacctattttgtgtgggaccctcatggtactagaagataatttctttatttgttattgtcctccttgtgttcccagtctgttgttcaggagtaatgtgcctaaggaaactcacttccaaacatagctccggcaaggacctcttcaagtagttaatggagaggatttccctctacttttaatatttgctttagtttggtactgacttcttggtttctagttctttcaatttctgctatggctgacaagaaccagaacatgaagttacttctgaatgtgaataatgagctaacaatagcggaggaagtcgatgctagaggaataagctgagaaaaaatccattaccaacaaattatgtaattataagatgttggttgatttggaaaatgactaagggttcaaaaacactccatgtctgtactggaacagactatccacaagaggtgaaaaggccagctctagtatggatgattttggggcttagagttaggaccatatctttgtcggagctcatctcctactctaggattattttgctaagttcttgaaagaggctaggattgccctatttcaactgatcccgcagggctataagctcatgtcaagatggttcattttctacaaggattagggaatggaaaaacgcagccttgaaaagattctattttccaaccagctagaatctatcccatgcaagaaggataaaaataaggatatgacttccaccatctaatgggtgttgttgttgagttgctggctatgaagagagatcaaatgctgacattgggttggaagatcagagggaatcgaatggccaactacatcagggtgagatgaactggcaagattggctttagctttccctttttcctgtcgttttttgtctccataaccaagaggaaacccatgtagaaagtagcatttgtctaatgtgacttggtttgccaaagttagagcaagatggtcgaggtttcttagctcttggaggatagttaggcactgagctggaagcagcaactagaggaatggtttcagtagagccaggagaacattggcgctcttcttgaattatcatggcaaacaaacaggaaaggttggggatgggtttattgagcaagatttgagctcgaaccgaggcaaaggattcattaagaccagtcaagaattgaagaacttgattctggttatagtaatccaaaaagagtttcatagcaccacaagtgcaagtggtgataggctgaaattccttcaactcatcccaaagagatttcattttggtaaagtaggatgacggagattggtcaccttgttgtaatcgggtcaattgagtttgaagttgaaaaattcgagggccattgccttcgttaaatctctcagcaagatcattccacatatcaatggccaaatcaaagtacatgatactttgagaaatttattgagaaagtgaattaactaaccatgacataaccatattattgcatctaagccaagaattgagaagagtattaccaatttcagggcgagggagagacccatcgatgaaagcaatcttgttcttggccactaatgccatggtgattcctctcttccaagattggtagttactgccattgaggacggtagacaccagcacaagtctgggatggtcaccagtgctaagaaagaagagactagaattatcatcattgaaaggacgattagctagaggagcaatgtggcgttgatcgtcgataatggtagattgatcttgaagttcaagattcgaggtgttctttgatggaggcctagtgtgatttctacgaggaatggctataaggagttaagattaggagaagcaggatgttcagaggtgatgtctgctactgtagtatcggccatagatggaggagcaccatctcgggagcgagttgaaggtcttggcatggaagcaatggacaaaaatacttctgataccatatataacagagaaataacagagcaaaagatgaagaaaacaatctctattactcaaaatatattgtgtatcgaatacattaggcagaggagtttatataagcagtaggtgagataaagttaattaggaaaagaacttaactaacttaactaattaactaattaactaagtgacttaagctcctaacaactaactaactaatatagctaaccaattctaataaatacaatacagtttctttaaataattgattttctttcatcatttctaaggagatctgagaagagaagctcgaagtttttgcaagatcgatgtcaactgtgttaacacagatgatggtgaggaaaggaagttgaccccacccatgagctcttgtcccacgtggctataaaaaattgttctatatatacattagaaaaaagaatgtcttacatattgtaaatgagaaaggtgaagtattttataaaaaatatataactaataggtgaaacaaatattaatggaaatttttaaaatatgaccatgtgtacatgtgtgcaataatatatggtggaatatagaggtgtatcaatcattactcacaaacaaaataatgcattatctcacagaataaaatccactcctaatatatttattttatatatactacattgaattaatataagatgactttaaattagatttgtgttctacaagttaaaaaaaatgtataaatagacagatgatgtatatatgtgcatgtgaagttagtcgacaaagccatgattccttttggtaatagtacccatacgatgacccatgagaatgatatatcctataaaaattgcgatagagaatgaaaacaataatgtatcaaaagttggacaataatatatgtaatatttatattatagtgatcccaataatatttgtggcccctatttttatttctatagtcggtacattacatgttaattgccgatagctatttttgtaaattatttttatatatacataaagaataatataattgaacaatttattagttatgtactcgtgctagcagcaattattggctggacatttttctagctataactagtttcttttgtttgatagatagctataactggttttaaaattctttatgatcctccaagttgagacatatatgatctctttgttaagctgctctcgatcaaatctcaaggtcaatcaattaaataatttttatggaaatctcatataaaaattgttggatagtagttattttatttataattaatatatggtttgtattcgtgttatgttaagatacatatgtgtatactttatcttaatacgatttgtttaataattatgttaaaatataaaatttaaacacgatccgtgaataaacgaattcgcacttacctatttgttaatagacttcatttaaatactccaattcagtactactattaatggctaggggtgttcacaaagtattcgatccaattcaattcgcacaatctaatccaatccaatccgcaaaatgcggatatccgcacttgtgcggattg

SEQ ID NO: 294802 - DNA, 3651 bp, Cannabis indica
aaacacagggtccaattggtaacttttgtaaaacagaaggtccaaaatggtatttaccctttcaattttatttttgtacttatatgctaatttttttttatatttttttcttttggtttcattaaatacgttgaaaaatagtaatggtgtcgtgttaggatcaataaagagctaacatgtgttcacgatggtagtatttaatggagcagcatttaaccaaattactattttacaaaggtattaatggctgtgagcaattggtgacagtaattttttttaatgttactttgcagcaaattattgtgtgtacgataaaagtgtattttgtaaagttatcaaaataaatcatttttcatcgcaaactatcgttaagcgtcactttttgtttcatggattttcgctaaaccatcaattttaaaaataagtcgttgagcatcaatttatcattatttttatctcaaaaattaattttttatgggattataattaagcgctgctttcctttacgtcaaaaattgtttatgagatgtcgctaagcatcgatgtaattggaaaagttacaaataaaactgaaatatcctatctagatgtgttcaaaattcatttagtaagtgaatattttctttaagcttaattgcatcaaattacccaatctcaaaatctcagcaaaagttctatacaatctaagagtaacaatttgtgttagtgtataattttgagatcttgaatttgctgaaaactaccaacacagttaaaacccgtaacacaaaatttataaaacacatacataactcacataaactgtgtcgcgtctaacctgcaaatgattctgtacaaatcattttgtaacctaaattgcagtttttagtgtcatcatatcgtatttgcgtcaaaatcgtaaatttatgatacatagctaacaagatcacgacccatgacacctaaatttattttagaaaacccgtgttgttgttttatcaagaacataaacatgaatggcataatttgtctaacacaaaatttcatactccacatgtcataacccaaaaggaagaagcctattcctgtacggggaaaacaaaacaaatagattggggatcaagaaaactatacccaaaccaacataataaagcgacttgtgctagctagctagagctctacatttggaaaagacaaacaactgagacgggtattgtaacataacaaaaacaacacattaaacacttcttaatttgaaccctttagattaattttttaaattttgccaaatataagatttaaattgactgaatcttgaagagttgttaagtataaatggtcagccagtaaagcaaaaacaaggaactttgtctgttgaagatgcaagaccagtgcaccaacgaaaattcattcaaattcaaactcctcacataagttttaacaaaacagaaattatagttgtcagatagaaaagtacttcagagcaacactactacattaaagatagagcggaacaatatcaaaaataacaatgagactcatgttttaacaaaaacctattgtattctttttcaagccgaaacagatggcttggcggaagagagcctcgaccttttcttggccaaactctcactgcgacgttctctctgctccttcaatctggaagcaaggagcttctggtactcagctgcgtctgccttggatttggcaaccctcttcttcttatcagcaattcttgccctctttctttgcaaggtcaatggagtgaccaacctctggatcttgggagctttgctggccttcttccctgcaaacatgaagatagtctcaaagtattaatgcttcagaaatcattgcaaagtcaatggagtgaccaatcattactggcatctgttaatgtgttaagactagaaagaaaaaagacgtttaggctcaaatatgcatttctttaaaaagaaaaagtacatccggtaaaacccataagaaagattaccgcagctgcattgctggtatttaatttttaaacagcaattacacatccacacaaactggaatattaactgaacaatgtatgaggattgtgaatctcaccagattttgttgtgaatgatctgcggtaggtgttcacatactttctaacatcatcatctttagaaaggttgaacagcttgcggatctttgatgccctcttggggcctctcattctaggtttctcagtgtcagtcaagccagggagatcattctctcccttcttcacaataaccaagttcaacacagagagatcctggctgacaatgcatcctctaacagactttctccttcgctctccagtacgccttccaaaaccacggaaacaaggggttcctggaaattaaaaggaattgacaacggttgatattttctccaaactttaataacaatgtacacacaaacaaaagcatacaccaacctctgtgaagcaagaggcgcacacgaccaggggtcaagactccctgcttcattgggaaaccttgcttgtcacaacctcccataatcttgaatacatatcctttaaactcctgtcaacaaaacaacaaaattttttagaggaaaacaaacattgcaataaaagtaaaacacagaaaacacaatttataaacctctcccaaggagtcaccgctaacttcctgtgaaatccgcttgtcgaaaaaggcacggctgcaaataaaaaaaaaattccaaaatgtaagaaactacagtacaaccgcagctctaaaaaagaaaagattgcaaaatgtaagaagctccagtacaacagcaactctataacaaaagattgcaaaatgtaagcagctacagtacaacaccagctctatcaactacaaaatgaaaataatcatacttaacttcatgtacaaaacaaatcaataacctagctccgaaccgcaaacaaaaataatatcacttctaaactagatttaaaattacagaaatgagtaacaatagtatagaaaaacactaaagagctacaaatccactagtcttgtttaaattaaatcttcgagatatatagtgacaaatagtctcctttaatacagaatatcataaacaaaattgctacaagttcactctttagctgccaatatagtacaaactaacacatattcgcttaaaacaaagacgattatacagatatgatcacaaatcactaacaaagaaataagtttcagaaaaggactaacagtttctggtcatcgtcgatctcgagcttcttctggcacccagtggtagggttggcgatgttgaactgcaaaatgcaaaggaagatataatcagcaccataacgttacagtaaccaaaaatcctagatgaaacagaggaatcagctataagaatcaccttcatggtagcagaggcggcttgaaccttgagttcgtccttcttcttctgctgctcacggagttagggtattgcacaaagttattatctctcgcttttatagtcgatgcctacttgggcttttgaagtttttggtgctttgtctttattgggcctacaattcagcccatatcaaatgtgaatcttcataacgaaaaataacattttaatgtaattatattatttattgggattatttcacaaatacacaaaacaacaaaaaaactacaaaatacggtttcacgaaattttaaa

SEQ ID NO: 294803 - DNA, 1752 bp, Cannabis indica
ctggtaaaataatttccatcaaactcttgttccaaaagttaaatgtccaagaatagttgctaaattttggcctaatccatgttgcaatgttttatataaaacatccaccaaaatgatttgttctcattttatagtaattctaccaagctttatttcacaaaatcaaagcgggtttgtgcatgaaagattcatagctcataacattatggtgtgtcaaatatttggtgcaccaatatgggaggaaaaattataagccataatgtatgaacaagatagatttgaagaaggcatatgacataatttattgggacttcattaaagaaattatggcggctcttggcttcccggatgactttgcctttgattatggtatactcaaattctcattagtattcaatgtctttttacatggttttttctcttctagacgaggtcaaagataaagagatcccatgtcaccactttatttgtggttgccatggaatatttgtccgaaatcctagccaaagtgtgaaagaaagatgaatttaaattttaccttaggggtttgggtttaaagctttctcacttgtgctttgtggacgatctattactattttgcaatggtgatattcagtctattttcttactattaaaaagcttcaaactgtttttattatcatctggtttagaggttaacacaacgaaaataatcatctattgttcataaatggagaattaagatgtgtaaaaagtcttggatacatcaggattcgctcaaagcaagattccttttaaatatcttggcttcccaattttcccaaggagactctcaagtgcaaattgtgatatttttatagaaaacatgattgctagatttcattgttggagttctaggaatttatcttatgcaaggagaactgcgttaattaactcaacaatattggaaatccaatcatattgggcctaggtaatgattcttcctacgaaaatcttgaagaaaattgaataaatctgtaaagattatctttggagtggtacaactgatttgaaaaaaccaagcttaattgcttgaaaattgtttgtcaagagaagaaaaatggtggtttgggtttcaaatattaggagaattagaatgtagaagtggtgggtaaaaatgtgtgggatcttgctaaaaaaatgataacttgtaggttaaatgggtatgtgaaatgtatttaaaagaggagaatgggtgggtttacaaagctccctaagattgcaactagtattggcataaaataattcaagtgaaagatcaaatggctatctacatatcaaaaacacagttagagctactatgtaaatattctattagccagaattatggagtcatgtttccaaacaattaatgctgagcaaatgtggtatacctctatcatttggaagaggtgtagcataccaaaattaaggcaaattatcaggttattcacttggaatcggttgaagacatgggacagatgactgggcaagggatacaaataaaggctcaattcttgatatgtggtttggagaatgagacacatgaccatttactatttatttcaatttaacctttaacaagaattgtcttcaagagagctttggctagatacattttgggacatacctattttagtttaaaggtgtcctaaattgaatccgaagatgtaaaggtaacaaacttaaaatagaaaagagatttttacgcttgatgtccttttttaccttttttttatatttttatttattctc

SEQ ID NO: 294804 - DNA, 4538 bp, Cannabis indica
gctcacacttaaaagatgatgaaaattaacctttagtaaaattttcctgagcctccttcttctatcaaatttgaaccagcccctctcttttcttcttcatattttcataccttgagtgatagagtgagtgcccacacacatcaagtagtatctcaatcataatgtgtaaaggtgtgaagaatccagaatcaagagaaggacattcgggctcagatcttggtgatactctgctacagacaggatacaagggttagagatctgagtggaatgagccattaatatttcgctgcacccactgtaaggttttttgaaaatttatatgtgtatatttacattgttttagaaattcatatttaggatgttaaataacatacatggtagtaaatctagatcttggtaaaacatattgcaacagtttaaactcaggaacacaaggaacattttcaagggttatactgagtaatttaacagttcgaattaaggaaattttaatgttagttccatttggtaatctaacatgtgttaactttgtaaccggttgagtagaagaaaactagtcaggattagaacacacatggtgagtagcaccagtgtcaatgatccaactagatttagaaatgagattagcattaccagagaaatttgatacatcaggctgatcactttgttgaggttattgagtctattgagagtcttcttacatcttttgtgctactatagccatgagcttttgacattgagcagctaaattttgttccttagtcatcccctcattagtgtcattgtctgctgcaagattagctgatgatcaatcgaattgatttcctatttaggaatctctccaggaaacttccatcaatcgatggctaggtagataaccatgaactctatagcatttagcaatagtgtgtccagagataccacaatgagaacaaactagtcaattattagatcgatcatatcgattattagattgattgtgagtacaattattcccacgattgccttgtgcactacttgcaaattagcctgaattttcagtagaaggtttttaagatttagattgtggaataataattcctgtctacttttcttcttgaattatgcatgcataagctttattcacatttggtagaggatcctgaagtaaaatctaagatttggcattgagatagaattcattaagatcaattagaaactcaagagctttatcttcatcttgatatccctgaatgatcttcatagcaccacaagtacagactggttgtggcctatattcctacaatagatcccataatcctttaagccgagtatagtacgaagtgacataattggatccttgtgttcaagtctgtatagatctcttaactttgaacactctcggagcatttttctgatgaaatctctcttgtaattcagaccagatccgagatgcatcttctacatacatgatactatctgctatagtaggtgatacagtgttcaagatccatgaaataaccaggctattacatctgatccacgcatcataatcttcatcatcctcatcgggacctggaagctttccattaacgaacttgaccttatttctagctagcaatgccaccatcattgatcttttccatgagttgtactttccaggatcttcagaacaagagatgaggatgcattgtcagcatttgaaaggtaataaggactacgtggatcactctttagaaatatgccattttcattgagagcagaacaatgatttgattcttcaacactttgactgggattgctgggagtttgagtacctcctcctcgcaccatgaaagaactagaagctaggaagaaaaactagacgaagatgcggaagcaaaatagctcaccaatcgggtagctttgataccatattatttttgagagagaaagagattgaagaaatagagaagacaagctaacgttagagaatctaacaaacactaacaacttcctaactgtcactccaccctactaactaactttaataatttggattttaagggtatctcaatttcaccaaatcttgtttcaagtaaggctctttacaacatgacttcatttttttcaattatgctatttatatgcttgtaaaaatgtttgacttgtatttctgcatgagttgttatttttgtttagttaagcttagactcaattgtagtgaacatttaaagaatttttaataaccaagagtaaagaaattcttttcagtttaaacttttgagttgtgttatttgaagcgaaacacaatcaagaaatccaccgattaaatttggattactttcctataaattctaaaatttgtatgggccggtactattaattctaagatgttttctaagtttattttcttgttcatggtatgatctaatattgtatgttatgtaggataattgtagaatattgtacaaggactttattaatttattattggcatttgtgcttgtctatgatttatgaagctaaagatgatttcttgaacgtaatataggataaagcaagaataggatctgacacttgtagatgtgctgattgtaacagcttgcaatgctattgctatttggtcacttgctccatgccgctcatatggaaacacattccactttaatttgcaaaatacactgcagaagctccccaacaatacatttgaaaagagctgtgctattgctagagcagtccaaggttgtttatcaaactacttgtatggcagtcgttaaaattaaagctgtgccctagttcaagaactaatgctctcggttatggttttttgcttggacttaatgccaacctcagatgtcatcttttatctagttttgttgagaattgttagaatttgaggaataagatgaatgaggttctattccaaaaccaattggcaatgggaggagtagcccttttatcttatatatcacaatttatttccacacattagcaatgtacacgggaaatttgtggatttggaaacaggtgaaagaccccaacactggaaattggcacacatctgtttggaccggcggcactttggctcacaacggatcacaaacggctttttggaccggtggcaatttgggctcacaacggatcacaagtggctctgataccatgttgagaatcatggggttccatctcaaaactaattggcaatgggaggaggagccctttcatcttatatatcacaatttatttccacacattagcaatgtgggactaactcttaataagaatcatggggtttcatctcaaaatcaattggtgatgagtgaaatgtttacatttgatcaatgtgagacaatattgtccaataagttttgattaagcactggtcaataattttgattttattggagtggcactggttttcagcacaacattaaagatattctctaccacaacactcttttagtttctcatttacagtttagctttatatgttgtgaattcctgaactgttctttttctttgataaatttaggattagattaccatttgaaattagcatttaaaagatttgacaatttttttgctcttaaaatgtataggtaggctcctcctaagtttgagatatttgtgagaacaactgttttctgatagaaactgaaacacagatacacaaattgatacaacagagaaagatagaagaaacgttgctactatttaatacgatagaaaatcattataagaccccaggatgttgttatgtgatacttcaaattgatccattttttgttctaatgttttactgctctgaaacttaattcactttttattttcttttctcactcgtgtgcacacaattcatacatgaattttttatctttgttgttgttgcaaattttcagggctctcgtgctttaatcgacttcattgttgaggatttacgttccctgtttggtatttcttcacaagcagaattatattttttgttaccttttactgttactaaactttataagaaaacatattagattgaattttcttttatgtaatatacttgaagactttatgctgtatttacacatttttacatcttagcaaaaataataaagggaaagatatatagtacaccaattataggcacatgttatcatattactagtaatgtgtttgttttttgttttgttaccagctctaaattgggacccaataactagtcatttttagttaatattggttactttctgcattctggtttgaaaagcacatgatgttatatttatcaaactgtcaaaaaatttaagaattagtggaggaatttagattgctgtcggattttttttgtgttaatcattttcttaatgaaaaatttgaattgctattatttatatatggtgtatttttttaacatctatttatatataatatcaatattatataactataaatattaatttttaaaaatatcaaactatcaaattttgatctaataacgaataatgaaatcacaaatttaaatttctatgctcaatttaactacttaattaaaaaaatatcaaaaaatatctctttttatactatat

SEQ ID NO: 294805 - DNA, 836 bp, Cannabis indica
tttttactagtatatatatattacgggtaaaagaaaattgttgattgaatcaaatgattaatctgttaattcaattaacctgtaaacccatgaactcggttacgcccatttcacaaacgggtataggtattatttttaaacctaaaacccgtaaatctaaaacccgcccaacccatccgatatttactcattgtacacgctttttatttactattcttctctctccttttattattatgaatctgcagtattttattacactaaagtggtagatttttgtacatgtaatcacagcaagtaacttaagaagttcacaataatttatatcagttaggaaatttagcttctgattttgagtgggtaggtaggtaagtagaattgaattccttggagttacaatattttcatccaacctttttttttttaatcatctcattgctttaagatgttgtaatggcaaggacaaagtagacaattatgataagaccacatttttttgtcttgtctctatactcacctctttggtcatcattttcccttgcatttcaaaccatcatatattaatatttaataagcataccccaaaacaaataaataaattggctccacatatacaatacaaaacatttccaggtcacttaaattggactgccacgtcatcttgtattaatgatctcatttatttatttaattctcgtggaattaccatgaattaaattgttcctgtaatttttccagtaatttttatatgagttactatataaatttaagttgttccgttaattagttgctataagaatttctgtatagaattctataaaaatgcaaaaaaaaaa

SEQ ID NO: 294806 - DNA, 5769 bp, Cannabis indica
tttaggatttagggtttagagtttaggattttgataataaaatataaagttatttataattactgatcattaattttatcattacttataagtaataataagtaatgataaaattattataagtaatgataagtaataatgagtaattaatataaataataatatgtaataataaggaatgataagtaatgataaaattaatgataagtagtgatgattgggtttattttgaattaccctaaatcctaaaccctaattcctaaaccttaaaccctaaaccctaatcccttaaccctaaaccctaagccctaatccctaaaacctaaaccatgaaaactcaacactaaaccgtaaatcctgaaccattaacaataaatcctaaaccgtaaaccattaaccctaaatcctaacccctaaaaacctaaccctaaaccctacaccttaaactctaaaccctaaaccctacacgctaaacttctaaaccctacaccctaaacacgaaaccctaaccctaaatccgaaaacccaaaatcctaaacctgaaaccctatgccctaaatcataaaccctaaacccctaaatactaagccccaaaccatggtttgggtttgggtcaggggctgggtccaggttcaagttcgagtctcgagcctcagtccctattcaggtcttggtctgtgtttaggtctaagtctgtgtctcgctccatgttcaagtttggttcctggtccaggtctaggtctgggttcaagtctaggtttgggttttggttcaactctaggttctagttcgggtctcgtgccccgatccggttctggtttttgttcctaggtgtgggctttggtctgggtcctggtccaagtactggtccgagtctgggtctgggtctaggtccatgatccaagttcggtccgagtcttggtcctggttccaggtctgggtctttgtccaagtttgagtctaggtcccagtctgggtcatgggttttgggtctcagtccgtatttgggtttggctctgggtctggatctcgatcttggtctggtctaggtttgggttcatatttgggtttgcgtcctaagtccaaattttgcccaaggtatgaattcaggtctcggtctgagtttgggtctcgatctagttttgtgtcctaggtctgagtgtaaatcttgatctcagtatgggtttaatttaaggtctgagtcccaattgtctaggtctaggtcttgttcacagtctcgttttagggtcccaatatgattccaattctaattttgggtcacgagtttgggtttggatctggttgtgggttctggtccgggtcccgtgccttggtccaattttagttttggttctcgagtctgggttagggtttgggtccaagtcagggtcctaatctgggtctaggtctaggttcgagtctggttccccaatccacgtttaagtcgaagtccgggtccaggtccttatctaggtctgagtctgggtccatgtttgagttccagtttgggtcttgggtctcaggtctcagtccgtgtttgggttcgagtctcgagtcatggtctcagtgtgggtataggtttgggtttgggtctcggggtctcaattcaacttcgtgtctagatactgtgtttaggtcccggtctgggtcagggtcctaggtcccgggtcccaatccctgtttgggtctaggtcatggtctgggtcccgtttcgggtctagggccgagtctgggtctagtttggggtcctggtcccgatctaattttagggtcccagtacagttccagttcctatttcgagtcttatgtttgggttcgggtctgggtctgggtcaaggtcttggtctgggttctagtctgggtttgatattgggttcgggtttggttatgactcccaaatccaaacaccgactacgggtcgggtccaagccccgagtctcgagtcccgaatcttgagtccgtatttgaatgccagtttcgagtcctggtccagttttgtttaagtcccaagtcccagtacgggtcctaaatctcggtctacgttcgagaccagggttgggtttcgagtcccagacctggttctaggtttgggtctgggtccccatggtcaagtcttacgtttcagtctaggtctaggtccaaattcgggttcaggttcgagtattgggtctcggtctacatttggatctagatcggggtccctatccttgtgtgtgtccagttttggatctggatctgggttcgggtcctggtccgattctagtttaagtccaggtttggctcctagtccagtcccacggtcttaggtcctagtccagtaccggttcgggccttgagtctaggttcgggtcctaggtctaggcccggagttaggtcccgagtcctaggtttgtgtctaggttttggtcctcggtccatgtccacattcaggttcgggttcgcgtctgggtctcaatctcgactgtctcggtccctgttcaggtcctaggccaggtttgggtttatttttggttttgagttggggtttagggtttagggtttagggattagggtttaggaatttgggtttatggtttaggattaagggtttaggggtttatgatttagggttaagggtttatggtttatggtttagggtagaaggtttagggtttatggtttagggtgacgtttacggaatagggtttaggattgaggttttagggtttagggttcaggctaattaaacatatttgttattacttatcactaattttatcattacttataagtaataagtaatgataaagttaatataattaataatatgtaataataagtgttatccaagttttccttaatcaaagacgtgacacaaccaaagtggggacacggtttctacacaacacatctaagagaattaaaagaaatgactcccgaaccgagaaggcagtaagaggtaatggattctaggagcagcatcctccactaaggaaacccaaaaagcagtgcaggttctggaagacattgaacacgttagctccttacaaaattgcgctccatagacggctacacctttctcggacacatgatcaaatattgtcccttgtaccggatcatgatagtgcgtgtacgcaccttcgagcacacttttgctcaacagcatgggtagagactatttcgtaaagtagagacctttagacgacacgtgtccaaggttgtacgaaggtcctcatcaattgctctacactgcacgatgaagaaagtttccccagtggatggttagattgtccttttgtagtgtagaccttagtaacgtgtggaggacaaaacccaaggtaggtaaagggtatgccctttaccccatgtgcgcctttaaatgtcctcgttctttcaaagggtagagagagacttttcatgtgccgtcacacttctaaaatctaagtagtaacttcttctatgcaacagtttcatactgtaatactctctaatcaaacactatccgcccaaagaggctcatcatattgactcgtggactaaggatcattaacgcctgaaccgcgtaaaaatctgttgttcttattatttattacttgttattcctttattctctcataatatttggttttcgaaaaactcgataaatagtttggtgctttcattgagagccgaaggaagcttgatggtgttcatcatcccccaatcatggtgaaaatgcgacaaaactctagtaaaagaaatcctttagatacggttatggaggaaggcacctctcgtgcagtcggttcacaggtggaaaatgatagagaaggcgtagctgctaccgagaacctagaggagaataccactgcttggaatccagaaacaaatgacgtaaatgctggagaaggttgcgaggatggccagtatactgagacttagaacgaggatggtgatagtgactactataaagagggatactataaggatgatctttattacgagcacgaccctaatttgttgcgtgtagctgaagagttggcggcagcacaggaggcctagtaaaggaacaaaggctgagtgctaagatgaaagagaccattgagcaattacaaaaaaaattcaatggtttgagtggaatagatggggaaccgtttgtagaagcggtagccgaagagcgagcgtagatgcaaactaacacagggaccaagaatccctgcacggataagggtaaaagtaaagtaggcgaagcctcatgtaggaccgctcctaaacctcgccaaaaagagacaccactagttggagaaacctcaaggatgcagaaggctagctcccggtgccttcgggcctggatgcccttctgatcctcgaaacagggcttcaccgaaagcaccggcagtggagttccccggtgtaggagatgagtggatctaggattgtcaatctggccacgtcgggcccgacccgccacagacctggcccggcacgatatcactttggcccaacccgactccttcctttggcctagcaggttaggcccgacccctatttttttaaatcaatttattttaaaagaaaaataaaaaattgtacacatacattctaacaaaattataaataaaaaattaataataaacaattaatatttaaagggtacaaattcaatttatatgtatatataccacaaattcaatggatcatatcctactccaccaacagcaaagtactgtgcacacaccagttaggagatcttttggtgttaaatttggatcagcatagggtagcaatagctctttgattgctattatgcaacaagaatgtatgatttgattatacacgagaaagaaataaataattaaataaatcaaagataagttattcctgcaattcgattaaaataagaatgacccagacgaaaatttcagaagatggcatagtcgaatgaaaattgatcaaagaggaaaacttgataaaggaaaaaaaatactaaaaaagtgattaataaatgcaaaacagaaccaataaagacagacccatcataactgaagttccttgagtgttaattgtttaatatctgaaggatcttggagcaaaggtaacacttacagacccataataaattttttctatgcgaaggtaggaaatggtgttttgtaatagttgaagaattccatggagactaaaatcaagaaaactaaccagagaagagagcagaggtggttgtcagccatcatcagagatgagagagtcgtcgtcggagatcagagtcagctgtactgtgtcattgccagggtagagggcgaggggtgtgatatggccttttgaatcagagagcatagaagtcaagaaattgggaatgatttttttagggtttttggtctttttttaatatttgaaatcgggccgggtcgggcccgaccaaaaaaatatgtaacgggccgggccaggcctagagcctgataaaaacccaaaataatcaggcaaaagtcgccccctcgggccgggggccttacccgacccgcaaaaatagcccgaatttccatccttaagtggatcaccctagcgattccgtcaatcaggatggaaggattgtagttgtttagttttgtgccctaaataaaacccatttcaatataatcagatttactaattcatataagatcagaaatcgtttttatgttgcgtggttcaaataatttatttcatgattaggtttaatgtataaattctattaagtccagaacatatataaatatatatacatttcttcatgattatagtgtcgtcagcacagtggaatataatcatgat

SEQ ID NO: 294807 - DNA, 3496 bp, Cannabis indica
cttattgtatactacttatgtatttgtgcctcatccttctcttggcaccaaaataggactcaacagatactctaggtcttggaatggaaagtgtaaccaaatcacatgttggatgttcaccccaactctacaacatccaaaagcaagctcaacaaattccctaggtctatgtgatgtacttaggaagattactaaaacatcgaagatcaatttcgtaagtttcaccttgatggcaaggtgcgtagttaggccgaaaatgggtaatgataagccccctatgcactttacctactacaatgctaggagaaaatctcaacaaagagttctaacaactaataaaagaatacttatttggcatccctttaactctttacctgctacagtgctaggagaaaatctcaataaagtgttgtaacaactaataagaagtttacttatttggcagcgacctacgtgaccaatgatctagaggatgcaggaacttgaatcagcacttaaagaaggataaactagtaccatagttttcttagtgacatatctggacgttcatggggggcataattgattcttgaattgtgaatatattactcgcataatcatggaaattgtattttctatttggtccaattaaatggaatatgatagacctctaattagattcatgtttgtttgacataagaaaggagctaagagttgtcgagctgtgaaacaatagagaatctcctactacttgtgtggatatagcagaacttgtgaagagtttgttagcttgggaaatggtgcaccaagaagtatatggaagcattgcttgataaaggaaaggcatcataatttaagtgagacattatttaaagtattgccatgctcttgggggttgtgaggttctaggtccctttttttttctattctatacattttttaaaaaagaaaacaaacttgtattaatgaaagataaaataagaataggggaaggaaacacacaaaagcggagatggcaaatatacataagtgttacattcatctaatccttaaacatgaaaatacaacaaaaaccttcaaaaacttcaaaagagaggacaaattatgattatttaaaaaaaaatgttgttgacagataacggaaatcaattcctacgcttattcccttatttatgggatttgtaatttattgtgtttattatcatttattctgtagtttagagtataagtttagaatagaacctcctttaacttactccactaccttgcttggcttattaattcgatggattcgaaaatcaactgtaggtatttatttttcaaaactactaacaggctaagatgtgctctaaccttggattgcttcccagatttttgaaatccacaccaaactcgaagatatcaaacaagttaatcacactgttacccaatattttccagacttacaaaacctatcgtaggaactacatttgtccttagataccacaccattgtgtgctgattgcaccacactccagcagcaatagttagaaaaagatggggttgttgggttaaacaattatcgtgatgaagtcaggggctattttgttagtcgttctcctttacattgaataatatttttctaaggtcatacgtgaagaagcacaagcacattgtcgtgtcatgcccaccactcctacactgcaacccatagagagctcgtcacttgtctcaaagtcaggaacatcatcatttggaagatccaatcttgaccttcgacctaattgtacgggtgactgaccttggtgaaatcactatagcatggtcacacgcgctccagggaaatggcaaacctccatactggcctcctagtcatcagaatgacaaggcctaccatactcaaaatataatattgattctcctgatgacttctttcagtcaggattagctaaagcatttatacacactattgagtaaaacatctatgaaatctaagcctgaacctgagtctcatagagcctcaattgcacactagtaatttctctattgctttccgaacatcaagaatcatcgaactagacatatgacaggtttaactcatttatttgattctctttgtccatgttctgctacatcgagtgtcaaaattgcagatgacacttaccttttgcaggaataggcaccattaaattgtttgctttaattcttatatcagtactttatgttctttcgttaaagtagaatttaacctttgttcacaaattaacatttgatgatcattgtcttgttaaatttgtgtcaatctcttgtcattttcatgatccatcatcgaggaggatgatttgtagtgctagtatttgtaacggactttatttttttcatcatccaaaaaattagcagccttctttgcagtatttgacttcaagttccatttctaattctgtttttaattcgaatttttgaacaaatatgttatgacattgtcgacttggacacctaagtttttaatatttataatccttctttgtttatccataaaaaagttgttgattttcaatgtgagtttgtcaatttgctaaacatactcgtgtttcatttcttcaaaaaaagtgtccactatctagtatgttctctattattcacaatgacttatgagcatcctcaaaaaatcactacctctcatggtaagcattggtctattatacattcattaatgatcacacacgaatcatctaggtctatcttcttcaaatcttacagtttgaagaagggctttttcctttaaagtatctcggggtccctatgagaccaacgaaatagaaagcggaggattgtggagtgataatcaagaagatcaaacttagcctccattcatgggcgagtagacatctttcttatgccggaagatgtcagcttataaattcaattcttttggggcttcgaaattattggatgaacatcttcttgcttcctaaaagtattatcaaagagatagataagctttgcttatggttcttatggggaaacaatggctctagaagcaactttcatctcacatcctggtctaaagtctgcttgccaaaaatctttggcgaattgggatttggtgatggaatcaattggaacaaagctatgcttggtaagtacatttgggtataagtcaccaacaagaaaccttgtgggtgaaatgggtcaagtcggtctatttaaaaggccaaaatttctggagctaccagcttaatcttaattcaagttggtattggcgcaaattgtgccaattttgtgaggaagtttctcagcaagccattgacaatgctgggcatggagggaagctcaagataggtcgtttttatacaaatcaaatcgatcttgaaaaggtcaaatatcacagctttgcttggaacaatttcagtgtgccaaaacatcggttcattgtttggcaggttatcaatggcaaactgcttttttttttaaaagagaaagaggtcgctggtcttagaacgacctcccccgacatgttattgaaaccctcacttgt

SEQ ID NO: 294808 - DNA, 2993 bp, Cannabis indica
gatcggtcggttgggattggattggatgaatttctgcacacccctatcttgtggggcggcccttgatcggcctttacatacctctttatgtgcggattgttcttcctaatcaaaaattcaatctattcttgtagatttttccacttgttggtgtaatggccaaaatctttattaaagcgacagtatttagaatgatccttcttgcttgcatccttcttcattagtgggggtcttttgtacagcgctactgacttcgtggttgtaaggacgatttcaatgtctttagtgagaatagtgaaggatgtaaactttggagctttatcttgtaggtgctaagttttggggttattaaaatttccttttttttccattttcttgattattcccaccattcgaccttttcccgccgtcgctactccagcctggttcgaaactggaccacttaaggtcacgttgggatttttcttctgatcagtggaacctactctaggagtagcattcaataccacctcttccaacttaatgaatccatgtgcccagtccaaaacttatgccatggagttcaccgttagcctcttgatgtctttccataaatctcccaatggcatgattcctctaagcacaacaacaagtcttcctttcttagtcaatccctttactcttgtggcttcggtcatgaactgacttatgtaatctttgaatggctcattcaagagctgcttaactttgaccaagtgtacagtaggttgtcgggaagacaagaattgtgcgtggaactcttatatgaaagaatcccatgagtcaaatttcctggtgttagtttgaaataccattgttgagtagtttttgccattgttgctggaaggaccctgcaacgtacgtcgacatacatggattgcagatccctttgcaactcaaagtttcttatatgggataggggatcttattgtccaatatatgccttttaggttggcattttaaatttgggcagaagagggagcacctttatttgagcgatatagggtaaacctcttgctcggtcgagttccaggtcgatgagtttaggacagtcaaactttaaactatgcttttaagatgattcagttgggattgcacccccgaatcaacttgtattgcttgttgcccaacttgagtcacttattgtccctcttgagcttcaatcatcgtgtagttatccacattaatgggttgtgcatttggaggaactaccccagtcctctactttctccgttgattcagtgtgtgtctgagattgacaggttgagttcctatcctctcaaagatagattgttctagaggtcaccctgcatttttggggttggctagtggaatctccctctaagcacgctgatctctttgtctttgagcgtgggttgcactgtttgctccatcatcattatcactcgaatatgattgactgcgagcagttgtaattagaccctaatgtggagtcatatacggaacatactaaaaatactgaacctgcccattttaatcataaatggctataaggtcttgaaacgttgcatttggctgattgggtgttcccacttaggggcggaagttctgactatgttgcccatgatttttccctggtaactcctaatcgtctaccgtttggcccacatttgtatgtggcctaggattggaggcccaacgcgtaaggggttttgggtgtaagtcattacaacttttggcatgtggtttttcctaagcaaaacatacagttcctttctacagaggggatctcaaacaagagtaatgtcttcctgcaactggtgtttggtctgttgattgaacttccttatcaactctgtggttgtgcgtgaccagtgattgatcacttcctactgagcttttagactctctgcttatttttccatccattcttggaaaggccgtttttgttgcacaaatgcctcattcatagttacccaggtatcttcttaattatgatgaagtgtattagtgtggctttgaatttgagccactacttcactcaaattttgcacctcggtgtcatcatcgattcaccggagttccacttattggcagctctttggagccaaaactattttccccaacaccattggtactagtgttttgggtgctcggatcaatcataggagagtttctcatattagcaggattctaggcatttggatcagtttccattgcatctacaagattagtggcttgagttcttcgagtttgtacatccatttccactttttcttgaataaaccaatccgattgtgttcttgagttcttggctctcaatgaaagtactaaaatgttgacctcgctttgggtcagcgacactgggcccttaaagcgacaagaaatcaatatttacgaaatatataaataatgatgtgttaaattaagaacacgatattttttagaggctcaagcctatatccacttgaaagtaagatcatctatatttaaagatatggatgtatattcaagggtggatatgagttatcgttaaattctttagacgatcactctagattttaccttgtgcaaagaaatttgaaatgtttgaaaaacttcgtgaatttctagcaatgttgaaaaacattaaggtaagtggttaaagatcttgcgaattgataggggtggagaaatatttagatatgcaattcaaagatcattaagttgaattttgaattatattcaaacttacctccccagaaattaagttttcacattgatgatagtataaggtttatgattagttactagccgttgcctaagtccttctaaaatttcagaatgatggaatgtttgtgtactttgtgtaaaccattactagattcatggatgtcctaatcgtgaacttcagaaaggctagaattgttaactaaggtttgcatatttgatagttattctaagtgattaggggtggaccatcctatggtcattaagataaaaaaatatttgtgtcaacaaatactacttttcta

SEQ ID NO: 294809 - DNA, 4010 bp, Cannabis indica
actaaggttcagtaacgtctcaaccacgtaaaaattcttgtctttcatcctttaatcattcttctttaactttattcctttgttaaatcggtttctcaaaagttcggtgaatatttgactctataaactattaagaattttaaaaatttataagtaattataaataattacaacaacgtacacaattattattattaaaagtaatgatatgcacgcacataatttacaaataaacatatatatacaagttcttgataagtaattgtgtgtaaagtgtgtgaattataagtgtacatatcattactcatattagaatatccttttgcaggtgtgctatctataaaaacaaattaattatataataatgtatgatataaacttataaattaataacctggtttattataacatttttgttatcattattatattcattaaggaagtaataattttaggatatggtgttggatactacaaaataattatgttgtaaaagattgaaaagtggtatataagttatgttcattttcactaactctaatccagggttagtccgattacaaaatcattctggacacaatgattttcaatgataaccagagcatataacagcacaaattagatattattggagaaaagtgaagcttttaattcaatactatgttaaaaaaaattatcttttcctttcccaaaaattgagggaactacaatagtgtcattttataatatttccttactcctaggctaaaagaaatatacaacaaaacctcctttcacactttccttatatatattttctttcaattcaaagctagattcttaagtgattttaaaaaaaaaacaaaaaagtaaataaataaataaaaataaacaaatgataacatatggcacgcctaaaattgctagatccaaaaatacgccctttggtgcatgtaaaagtctccaaaaattggaacattacatacatagataatagatttaaggtgttgttgtgtactttgtgtatgtaataatcactacattttatatcttcaaaaattaattacagctgttgctcttactaataatatattatctcttgagaaaaaaaaattacactttttgttagtgatgaaaatactcgtgcacctaaaaaacatattgttcatcatggataaacagcactaataaataatggcgcctaccatgcattaaaattgaacctaaaccatgacataccattacaacataatgattttgccaggaaaattttaatcaaaagaagcaaaattattaggtttgccattaaaaatgaaatcaggagagtcagcaattgcaaccctatatagctcgaaaacatgagcattaatcatttaatacacaccgtgtaagtttccacttacacaccaaaaaagatagataaaaatattaaagagaagagatagatagattataaaataaattctatacataaatacaacctaaagccaaccaagcttgtgtatcatgccattagttttctcactcacacacaactcaataatatgcaatatgcatggcacaataacaatacaacatataagatttatctgaagatataattatatatataaatataaaccaaaaaggaaaaagccaagcataaagattagaatatggaagtgaaataaccacgtgagtaagtgaattattttccttccccataatcaatattaagataaaatttggtgttttaggggtgattttgattagactctaagcaagtaaatactaagctcgggtccacccgacccatccgggttcatcatgtaaaaggcttccgagtcctttgaccccacaactcgttcaaacctggctctcatatacatgagctcaccaacgtcagacccaccaccgccgtctccgccgcagcattccggcaaaactccggcacccattgaaatgggctccacagcttttaagaccttccactcctcaggcccacaatcccttcgggccgcgaacccacatttccttccgttgcaatatgtcctccaaagtggctcttcaagcaacttagtagctttcttcttgctcttaccactctcatcaaacgacgtcgttttggtcctctcacactccaaagctatacggaccaacccagaagccatttcccgaaccagtacgctggtcggcatggctagctcgatcagaaaagccgggctcagcttcgcctcttcttgaaacgcaaaatgaacgtgtcccctcctgtacccgaaaagggtcccgacgacccgggtccctagatggtggtcgggtgctcgggacttggccccgaaaaccgtcagagctgccgatcgtagtttcgaaactctggaaagcttctttctcggcggcagtggtggtggaattttaagatgatgattctgagcttcttctttgtcatcgtcgaagaagtattgagaggaagaggaattgatgtaagcattgttcaagatctcttcgtcgtcgtcttcttcgtcttcgaacttctttttccagttgaagttcaagtaccttctggagaatgagaatgaagagtcgtgaggagtcttagctgccatgattgtcctcatgattggggtaagtatagcaaaacaaacccaacagagagagagaaagaaagaggtggaaagaaaagacgggattatgttgttcaaaatgttgggtatgactatgaataagaagtagaagtagtggtagtagtaatactagtagaaaaaaatcaaaactttggtggtgggtgtgattgattttctttcctccttttgttaattttttttttttattttgagagaaatagagaatgtgacaaaaagaaggtgagcagcccctacctaacttaaaacaaggaaatgaagtaaagagaatagattttaattatatctatatatagtatagtgagagagagagagtgatattaaaacttagaagacttataaagatgatctaattaaacaagaaaaaggaatcagaactaagactaacttttttaacaaaaaaaagtgggacatatatgaggaggtgttatattgttatttcgctatcaaaaatgttgttgtagttggggggagaggcagaaaatgaggacattgggttgggggatacaggtaaaagtccaaagtgatagtgagtgacctaataatagccaagtgtgtaaaaaaaaggatagcccaaaacaagaggaaccaatttttaaccaataaccacagcggcgcccacctgtactgtgctgttagtcctttcgtgctcccttatcactggcaccaatgacactatttttttgtgtttggtatctttatgatcagatcagctagcttataatgtacccagccaccttagtgttctgtacccctagctagcatcaatcttctggtcttgtataattactttttaatatgtgttattatgaacaaaatgtcattcattcattgcttttacttcatatctttgttaaattcccgaggctttgattgtgttctaattgaaactggtcacaaaaaggctacatgaatttggttttgaatagtcaaaaagttttctttgttaaaagtttcaaccacttattagtgtattgttattgatgtttaactcaaaaaaagtgattattttaataagagtattgctattaggcactagtggtgcctagcaccttctcgacatgtcgcgttgtgattggctagcgatactccctaaaaactattatattaaattatatggaccgatacttagttggaccaataaggatattgacacatatgagggtgctaggcaccactggtgccctttagcatttctcgttattgaataccttatgatatatttttaatttaataagatgttaaattagaaatacttaaaattaataatctagctatgaggttatatattagtagcgatcaccaagaaacaaacgacaatctaatctctttttctcgggccatcaagtgagaaaattaaaaaaccttatgagtcttgttttcttagaagattgttaatgcagattttcgtta

SEQ ID NO: 294810 - DNA, 909 bp, Cannabis indica
gagtcctcgccgaaaagaaagggaggacctcgcttcgtcaactatactgaacttgccgtacctcgagaccatatctatgcgattgaggaaaggaacacgacatatatgttgtaaactttggtgctacgttggatggattttatacattaaatccaagttttagtgctaccttggagttgctctaagagtggtaggtttggaggtgtagaggtctagggcattggggatgagtggtttggagggttgggaatggcgctattaagtagtctgctagagtcagttaagttacagtgaaacccaagaaacgagagaagaatagtggaaacggcaggagggaggggaggtaaaaggtaattggatcaaatagaagataatttgggtgtgttaaaactagtgctttaagtgaggtgagttttttaacacgatacaaaatcggcacagggaaggtacgagcacgattaggtacaaaaaaatacgaatttcagtacgatacggaacgatagtacaaattgacacgatatgcataaaaaatatatccttaaacacgatacaatacgagaaacacgaaaaatatgacacgtaaatactagttcatttgttttactctaatacaatcaccctagaaaagacttagttattttctagaaatcctcattagtttaactaataaaaacttagggtaaaatgctaatatacctttatttccctcttaagtaatttaaaagcttaagagtaaaatgatcaaactattacaccgtttcactattataatttggtcttttagtgaaactatttagtgactcccacttctgtgcatgttactaaagaattaggagtaatttttagtgacatgcacaattagattctaaacattcaatgttagtctcatataatgtgtgtcactaaaaa

SEQ ID NO: 294811 - DNA, 3170 bp, Cannabis indica
aaaaaaaaaaaaaaacggaagaggaagaattgaaatgaagaaagaaaccttcagcgaaattaacagcaatatgaccctcaggctcggtgggtagttcgccggagcaaatcttcaacagataatcttcgagtttatgggcaagattgacttcccaattagatactaggtcacgctcggcctgaaccctgtggtaccctccggcgccgctaccgccagcaccacttgattcttctcttccgttactcattttctgcagaaccaatcacgtcgtatcgcattgtggtgtagtctcatttgggaaacctaggtattccgattttaggggctcttcaagaaaaaattggagcaattttccctttttcttaattgtttttggttgaggaaggagaaagttcgggctttgattgtttcccaagaaaattggaaagaaaatatttgaaatttgggggtcgagaatttgcagattagtggtggaagtggaagtgagagaggaagaagatagagagttcgaaaaagtttggttctcaccagttttcccgcttcctttccctttctagtttctttagctttcggttcgggcctccgagtttgaaatttaaaaaacctgggccatgtttatacggcccatattgtttacatatatattctttttatttgcaattttctcaataattattaaaataaattttaaattatcatccttaattataatataataatattgctattaattattattttatatcttttacataaattatttttatatttaatttatcaataattattaaatattttgtattaatttataccataagatatagagtaatttgtggcgtaaataattaagtttaaatacctaataaaactatacaaataggattctggattttttgtgaaaataaaacttaataataatcagatctatcaatattatgacaaaattgatcacatttttgtatctatttcttaaaaatagttttattaaaaaataaaattgttgaaaattgagtttaggattctatttttactattttagaaaatttagtattaattttgtcatttaacaaaacagatagtctaattggtaacttttataaaacacataatttaaaatagtatttattctaattttctttcggctttgataaatccacctacacttatgcttgaagtatgaagccaataactttttttttttctttgctaggttagataatttttattaacactacacaaagaccaaaagttggtgacttgtactctaactgctctcaccttctttagtctctcccaattcatacaaattttaaccccattgaattcacacatacaaaatgtcacacgcaattcccttttttcccaattaaattcaccaaccttgttcattttccccatttacattcaccactttctcactgtttgctctagctgcattattatgaagattcagatgttgaaaaattaaatttgtgacaataccaaattctataagtagagttatcttgtggctattatatttgtagaaataagcatatttgttttgattaacaacaagagacaataataccatgttgccatagagtcttttcatttgttctatacaataatggcattagcaacaagtctcagactaaagatactaacttcagctctgttcattgcttatatgttaggtaacatatcatgtaaatatatagcataccacactaaaataccaattttttttttggaattatatattctaatttaaagaattacactttttggtgtcaacattcttaattggcaggaggaaaagcagaagatgaacatgtaccttatcaagtaggaagtggaggtcatgaccctgctcaagttgttgctagtgctttgctatgtttcaatgacaaatatgtaagtaaaatctataatttatttattttcgtctcataaattagttgtgcatttagttaacacaaaatgttcaatgttaaaataaaaaaatatatatataattgctctttctttatgtttgattctcaagatttatagcagctgtgaagagtcttatagattaagtgagagtggaaatcttgaggttccgccggagaaggcggaggaatattgcggtgggccgtgccttaaagagacacatcttgtgctgagctgcattgataacatcttggccaactttttgttttacaacaaagccacaatacaagatgttagagacactattcatgcaggatgtggttatggaccagaaagaggttataacttattttatattattagcctttaataaactcttctaacatgttttaatttaatattgtaagcttattattcgggctaatttattgcattttgtaggaaattttaatgtggctcaacacattgaagctgaagaaagcaataatgcttatcagaaagtagtttcaaaccagatcattctggtttcttttgggttgatccttttaggacctggtatatggctcatttgatttaatgttatgtatacatacatattacatatatatatgtatgtatgtacttagtgtaagggctgaagaagtttaattgtactaaatatatgtatattttatatatacttggctctggctggtattatataatagttgtcttatatttttccccaaacctatatgtcttgccttcttacatgtgtgattgtatgtttacttttacaataagtcaataatattatggtcatgctatcgtttgtgattaaaatatacatggtaattaagtagttagttgactaattgttgaaataaatcagtcaatatataaaagaggattgctatattattagtggttgttttcataattttggaaaaaaaaaaaagagctgaagaagtaaacaaatgatttggagccatttcaagctgactaaacattatttttcttaaaacaataaggggctaacttttaaatttaaatactagacaaatattttcgagaatgtaattttattcatgatctatgttaaaatgcaaaatatattttatttgtatcatgaaataattaaatttaaactaagttttcgtgtaggcaatgtgaaactcaagaaaagttttttatataatctactaaaagtttgtggaactacattcccacataaaaaaaaaaaaaacaccaaacataaaatcatcatttcactttta

SEQ ID NO: 294812 - DNA, 10328 bp, Cannabis indica
gtaaaataatttccaacacaagcctgtcgcggagtacaaagtcaaagaagatattcatttattcgagtagaataaatataatcacacggtgacctcggattacatataacaagacagtcacatcgcaatcttaactcaaataaagagacaggagataccaaatgtacatttcttgggattgagtttcatcacatacctttggagaactgaaaaggctttcttgaggtctgtacaatgctctctggatgtcttagatattaccaacatatcatcgacgtagacctccatatttttctccaattggttcttaaacatcttattgaccattctataataggttgctacatcattcgtcagaccaaatggaatcactttatatcagtatagaccattattcgtctggaagctggtgtgttcctcatcggcaatgtgcatcttgatctggttgcatccatagtaagcgtccatgaagttgagaaaccgataactagatgtggcatctaccatttggtctatctgtgggagagggaagcagtctttgggacatgctttgttgaggtccatgaaattaatgcacatcgtccacgtacaattagccttagggactaaaattgaattttccaaccaaaaagggtacagagcttctcgaaggaagtcattcgtggttaacttatccacttctacttttattgcatccaccctcattggatctaacagtcattgcttttggggaactggcattgcatctttgttgatgttccaggcatggcagatagtgttatgatcaatccctatcatatcagaatggctccatgataacacgtcctaatttctcttgaaaatatttataatgctttctttcacaactggaggcaggtttctttccacctttatgggtttggtgaggtctttatcacagatgattacttctgacatatcctccattggctcaatcactcttcttgtccccacataggaggctagctaatctttgaagtcattctggatggtttcagcttccacctaagtttccattccagcagcaataggtgccccttcctaattcatgaataatgtttgaacggagacattgtaataacttttatgctattttcgtcatccctaactgtcccaaatctattgtcgcggggaacttcatgaatagatgttgtattgaatttgttgctccaaagtccactaagactgggcgccctagtattgtgttgtatgtcgtggggtaatccactactataaaggtgcagtgtttgaaggcactagtgttgttttcttctttaagggggacaactagctggatcttcccctttagcatcaaggcatccccattaaagccttacagttggatgggacaaggtgtcatgtcatcttcggtgagcccaattgcttggaaagaaaattaaaacaggatgtttacggagcttccattatccactaagactctagaaaatctcttatttgttgtcaaggcttcaatgaccaaggggtcattatggggaaaatgcacatgactggcatcctcctttgtgaaagtgattggtagattcattgttcgaggacgttgggctggtgactgtctagtgtgcatatttccccttctccatctaagtttgtcaagtaccttttctgggaattcttggtgcttcccgcaaggtgtggttttccaaagatatttgccacatgtccctcaactagtggcagagctacacctaggggatatgggtttctagatctcaaagtcacgatagttaccgcagctgaagctggaggagtagggggtgcaggaagttgcactcttgggacttgagggtgacccacccctgtagagaatttatggtaatctactttctatgaataataatctatccgtgaacgaccccctgtcaaagatatatgatggaaatccaaacctattgccctagatggccttccccaactagcattttaaggtcatctttcaagtgcttgcaatcattggtggagtgtcccacttctccatgatactcataccttttattcaaatatctcttaaaattttcccctaagatgtctgtgggggcttcctatagtggaccatatttcagatctcttcatccatcaaactagagtactcagtatatctcaactcatattctttcttggttttcttaaaatttcactttctcctagaccctttcccctttttttctctaagattgactcataacatgatcgtgaacttttacttttgattgtttgggagccacactacattcaagtggctcctgaggtcattaccatgtgccctcaccttctcactttttacattttcatagtttgcatctaaatgccttttaagatccattgtggactaactgtcatcgaaatattgtccctttgccccaccatcctggtttaccgaatcactaaggaattttccctcccttgggctttggtatttttatcctagccccctttagcactatagggcctttttaggcagaaaaacatccaagccaagaggcgttggtcgtcttctgcacctaagaaggtctgttggcctaatttttatttttctaaggaggttcaagagcgcaagatttcttagggtcactcattttttccttccccttgtcctatgcaagagtagacgatccgacattagtggaggtttccctagtaatccctctaatgcaatccacaatagggtcgccatcataatcttcctcatctagatctcgtaacatggcttaaaggtgagcaaacattttctccatcatatgagaaatcttctcttgacaagctaacttttctttggttttgagtatctcgttagacacccaggtcaatttgggtcttgatcataatgatagtcgtctttgtagtatccatctttgacgtaagcttctttgttttcttcatctttattgttctcagcatccttatcatcaccaatgtggtccctctagttgtctaggtcatcttctcgagcattcatgttaggcccatccccacctctcgcattgctcgactaggcgtgctctagcaagaggggatttacttccttcatgacaatcttgaggccaccttgaagagtctttttgagaaccgtctcttgtttaaacaccatggcagtagcagtggtctacgtctttcttcagctctcaatgaaagcacaaaaatgtttgccgagaatttcagaaactgaacatttaagaggtaaagaaataataacttgcatcaatgaaaagaaaaatattttttacgtcattcaagtgttaataaaccttaatccatgagccggtctactagcctctaaggacggtattgatgtgtttacaatatttttgcagaaaacccttagtttattattagagaagaagaacataaagggtaattttagtagagttttagctatgtatttttggcttgacccctttgcatgagaataaagtggtatttataggctaagtggcgaatatggatagacccatgacccgcctaagaattctgcttacatcccactgttggggtaaattacatacaatgtagagctgactagatgaccctatgggtagcattatgcatgtccatgtagcagctggatcatggggaccattttgtactacttgaacacgtattaggcaaaggtttaacctttaaaagtacaggacacgtgtcactcaaagcatgttcctttacaagcagaagtctgtaatgtccgtctggtaaagggtagtgatggtttgtgtactaccgtactcagaagtaagagacgagatctgattctgctaggaaaagtataattgtcactttattgacctggcatgtcgaaagggtcgatattcgcgatacccattgagggttgatatctgctttaggtcctttgaatacatgtttgggtataaatcaaatgaacttccatattaagccattcgatgtccaacaaagatgcttcttcttctgcctttgggaagtaaaggctggcctaggtaggcttccacgttccccttcattctggatgtttcttggttcgaggaagtcttttagcgatagtgcagtattaaaggacttcaatcgaaggaggattatattgacattctctagaaaaatgccacgtatcatatcttgcagaaatgtggatagcaagtatgatctcaaaatacaaagtaataaattaatgaataaatagatccacttttattttatgctgtaagctttatgtattcaacattttacaaaataaaaattaaattcaaggagatgaaagcaatagaaatcctactagccaatatgagcatttatagatgatgtactcatactggataactcacacccaaactagatgactaaagtaggaaataatcccaaatagatagataagttaagtaaaggtccatttttaaaaaaaaattaagcaaaatgtccaaatataataaattagatagtaaaaattataaaataatcaataatctacccttttattttcaatttttttataattacaaataaatatattatatcatttatatagtcattatatataataaaataaaaattgaatatcatcttaaataaattatatactatatacaacaaaaattatatacaatacaataaaaaatatatattcacaacaattaaaaatataataaaataaaataatattgttaatacatatatgtatataccatataagcaaaattatatatcaacattaaaataataatagcacacccataaaattatatatcatttttatatatattaaaataaaaactaaacataatctaaaataaaataatatattacatacattaaaactcatataccatacaacaaagtaaatatatcacacaataagtatatataataacaacaattaaaattaattaatatatgtaaaggagtgcacgagacaatttgatgaggcattataatattcattttccgatgttacttttttgattttctaattatttttgttaatttgactcgatattagtgagttctttaagagacaaaaaaatctcatgtggtttagaaaccatttaagataagttcacacaaaataacaaaattaataacactttgataaaaagtatgagaagtcaattcatcactttaaaattggcatgagaagctactctacatatatatttattgatatgcatgtataatttaagtgaccaatttacaaattttgtaagcagaataaaaaaatcattcaattgttgtttatctagtttatcaattttttttaaaattatttaactaatttttttaacatagctcgaaggatttttttttttttttaaatagtctcacattgtttacgagctatttttgtgatgcttgtgagatctaaataaaatattttcattcacttcttttttttttttttgttgtccaaaaatatatgagtgatttataacttgatcttgctcaattagttataatttttattattattattttaagtcatcaaattaaatctatatatttagattggagggatcatcctattatttttagacctttcaaagtctctcaattaaaaagcaaaccttaaatcctcttattcttctcaaagaagcccttgcttagtaaaactcataaacaagacctagtcctattcagaattctaattgattaactaaaatcaattaattgactctacgaaaaaatattatctcaactagtgtggggaccatgggcctatataatcaagctcctaataagaagttctagaatttaccaagtaaattctctatcttattaactccacaatagatccagaattacgctcctaattaaatagaatggtttattctccaagaatagatacgctataaattatctattgtatcaatccaaataatcaaagatcctctatcgatgatttacatcgagtagggactaatttaccgttctaccctttaatattttttatccttaaaacacttagcttcttataaatgatatttcactaaactaatataactactgaatagaaagagctcttccatttatgtttgttaagccaagctctaagaaaatcatcgtttaacttttaaatggttaaaaaagttctagattctctatctatgattagcgctcccactcaattgtactaccatgttcccaagatgtaagtattaggtcgatccaagtgggaaactttaacgaacaagtcaaagaacatatgtaacacagttaagccaaaacctaactatctcaggatcaagatcttttgatctaagatcaattaagtgacattgacttaaaaaaaatatgtaatggtaagtttatgatatattttccactatcaatattggtccagtctaatgtatagccaatacatctgatgctagtgtacttttctaatatcctgaaaatgacattccacatatcattgtgtagtaaaatttatcgctaatatcacgtcagtgtaaatctaatgcactgaaaagtcataggactaaatactttgaagtatataattaaaattactttccactataatgacatcactgtaattgtgaataactatatcttatagatttaacagaaattatattttaaaaccataaacactaaaactacatgtaaacctaaatgacctcttaggatttattgatagtaaataagattatatcgaaatgagttttatttagggcataaaatccctacagccttatcatggagggagtatagacttgtagagtagtctcaacctcttttttcttaactcattagatataaggagttgtggcccctttcgttgcgctcaaccattttttaaaatttaagattttattgagggagcatgtgacctcttaggcggcgttgaaccccttacatggtgtaattatttaattaggagagcttgtggtctcttaggcatcatttaacaccttctacttcatccgtggtacttaaagtgtatttggaatgctataaaattggtatttcttttagagaggtgttcctttcatagtcatatatgtttcctcttttcttcttctcttctttttttttttttttttgtcactgctttgctcattttgacaattttgattgacaagtattgtgaacaagtccaagagacgtgtggacaatgataaatgccatatgtaaagtgaaaattaaatattttattgttaagacaaaaatataaacaattgggtaaattagaaattcttggagatcaattttggtgccctttttaatttagtacaattagaggccaactcaacattgtcaggagtgctttctttggtcaactgcctacaatggaagaattttactttaaagaatctcttgggaatttgaaatttacgggttggaggtttttgctcgaacgtatcagcttataagtgttggaggtatctcctagcagaccttctaagatttgacgagtttctcgaggaacactcacatgcatctgttttcaaaactctgctaccctcgtccacacggatgcacttctccgccctctcataaaagttgtctatgtcatccaattctctcttcatcatcatgttctccatagtccacttccaaagcgtactccagtggctacagtgaatttgatttcatcttttgacatttttcctactttagcaacttcagcgttgaagcagtgaatgtattttctcaagctttcttattttccttgcttcacattggtcatacttgttacaggcataacataattaccagcaacctgatgttattgaaggaattccttcaaaaattacttccaggatgtgattgttcccgatcctagccttatgaaccacttatatacaacccctttaagtgtaatcgcgccaaaaaaaaagtttaagtatttgttctacgtatgattgtattttcttatatatgtgtagtatgtaattatttgaactttattttccagattgtaaattatttgaaattttctaaaaaatttcatggtcttaaatagttataacataagggatcataaaaaaattggactaaaaaaattttctgaatttcaaaacaattttcaagacaaataagagatctacaaaaatattcttatggagtgtgaatttccaaaaaaaaaaattatgtatatatgaggataattttttgggattttttcatttttacatttcaaaacaattttctttgcatttttacaaaattctacatgaaaaacccttattgtaactagcgctgcaactactttgaaaattcaaaccgtaaatttgaaaaaaaaaattaaaaaaaaaatatataggataattcctttgttttttccataataattaaaaggtatataatcacagtaaatgttaattgtgtttttaagtactacttttaattaacccttcttttaaacaaaaaataacctaatttgttaaaaagttggggatgcaattaaaaagggtatataccaagaagatgcggttttggtggtcaatgagtcaacatcaagttcacgtctacacaatgcttcccaccatatatctaatactctctcttcaagagattcttgatcgtgtatttccatacacagaattcacattagatataatattgctccaacattctaacaccaacaacatctctgattatgatttatatatatagatatatatatatatatatatatcaatgtcgtaattacatatgcacatatatacgggggtagtggcaataatatgtagtcaacatattactcattacacttccaatcattacgtatatatatttctatgtaagaatattttgattgcactttcgagttttgaaaccattacagtacctcatattcaaccacataataatatgtgatatcttttggatagtgttccatctctctcaagacgatcgaataatactatttgacaaatcatgatcatatataggtaatgttcatcttatgtgctactacatggatgtctaataatattagtagtttttcaggtcaccaagagtcatataaatatttatagaaaatactattttggactctgtattttgtaaaaattattaattagattttttgttttattaaatgacaaaataaactttatattttccaaaatggtaaaaatagaactctaatctcaattttcaaaaaatttactttttaatataactaactttaaacaatttctaacacgaacagatacagaaaatgtaaccaattttgtcataatatctatagctcagattattattaaattttattttgacaaaaaatcagttcatggtcctatttgtacaatataaaaaatacaaagtcaattttgtcatctaacaaaatagatggtccaattaataatttttgcaaaacacagaatcgaaaatagttataattgtagccgtaccttccagtatcaactaagcctgttaagtaccaactcagaatcacaaagcaacatattattggatcatttattaaataaaaaaaacttttacgttttcctctaattttttatttattttattaataaaaaattggtatcgttttttattattaaatttgtatatttttgattaaaaataagataaataacagttatttaatatattgtccaataatatgtcactatgtgttttttagttggtacttacaattaagactccaacaaaattataagttaaagtagtatttttactgcttttttattaagatcaaatgcctaacaactacaaatgttaaggaaatttcaccgtcaatattctgtattaatttaatttataattaaaattaaaatacataacgcttttcttgcatattacaaagtcatcaataagtgaattcatactaaaaattttgacgatttctctttcaacatacactagcaatagcaattaatcatttaaaaatttattccatcttgttgcagagtgtagtattcactatatttatagttaaaaaagataactttgtgccagcgatagaaacgaaggatataatttgtggtgtgtaatttgcggtgtttatattacacttagtaactactaagccttaaccccataatagaattcactacaacaagattgggcattaggggcgacacttgtcgcctctaattgcgcctaatagctaagaggcaacaagttgctcctaaaaagtcgtctctaatatttagtgcctaaaagtattattaggagcgacaaaagtaatcgcccctaataatacttttaggggcgataataaaattcattatcagaatctaacttttatttttaggggcgagttttgtcacccctaaaagtatttgtctgttttagattttgatttttaggggcaacaatgttgtccctaatgtaataaatgttaaaaaaaa

SEQ ID NO: 294813 - DNA, 2204 bp, Cannabis indica
acacactaatattatattaaatgacatataattattagtacaatttaatattagatctaacttactttactttaataataattataaaaaattattaattaattattttatgaaatatcacctcatagtagtactaaacatcacagtaacaattaataaagggtatgggatttggggctgaaccaaagtccaactaggctgaatgcacaagcatatacctgatattgtattaaattactaaaattagccataattgatttttttaaaaagaaaatctttgagggtaagatcaaaatttcattcaagagaaagaaaccaaagtgatcaaaattgcagcacaagcagtagtgaggaagtcgccaaaatgagtttcggttgggagaaaaaagaagaagagagacccttaaaaagaagaagggacagttgttgaaaccctaaaaaagaaaagtaacattccaaaattttcatttaattgattcctactttagtctataaaacttcattgtaaaaatttaacattacgaaattctcatggtatatgtgcacacacaatgggaatgattaacctagacccaaattttagaagtccgattattttttaagtgatgtgtaccaaaacttacatgcactacaaaaatattatacaaagggactttgacagttttttttcaaccgatcatatttacttttgtactttattcttgtgcataatttttatagattactcttattttacacatggaaaaaatgttatgaaaatttaatacatatatgtttatttttttttcttggttgcaaagcccttacactaaattttaattttagatttcaatggttaatatatatattatatgcattataaatttataatttattagaaaaatagtccaatataataatttcatgcatgcttacctgtagtttaattccaactgactttcattggtgtagttaggcaaaggaactataattaacattagagagtcaagctagctagctaggttccatgtggtgacaaagactgatctggtcttttcactttagaaattttattgtgagggagtttcggtataagttttttgggcaaaaataatatatataaatatataatttatataacccagctatctcaacaaacctctctttgatattggtacacattatataatagaaatttaacttaaataagaaaaaattcacatgagaaaacatctatcatccctaatagaaatagtatgtatgagctacaacatatgtctccctttaaacggaaaaaaaataaaaaggaataaaaatatataattttttaaagaaaacgaataaatattttatataacgtttgttatatatctttgttaatattttaactattaattcacattacttattattaatttgtctcctataaaatgatatttagtctcaccgtgaacattttaatagtaagtacttaaaaaatatttttaagtttaaatatttctttttatcataattttagaatattttagtttgatatgtctattctttagttttatattgttcaccacatttactcaacaatgagtggatgtcaatacaatagtaataagtaggaaaaaaaaaaagaactcaaaaatttagagtggttcatctctagtaattaagatgtaatgatctagctattccactaagtattattattattcatattattattattattattattattattattattattatttgagagcatgtatccaatatcagataaaaatgtgaggcaactgagtttctcaaatatagaagcgtgagaacaagaaagaatgtgtacatatatagaaggagaattttaagaacatagaatggggcttcaatgaaatataagtcatctatttataggcttaaactctaaatgataggtacgtgtaaagataaattaactgtttcaattacaaaaacttaaatttctaaattcagaactcaaatttaaatatttggttgagttgttgatgacttgttgtacattcacttgtacatgttcttggcctacgcttgatgcacaaccatctcactataccataccatatcaactcggataatgcctaatttaataataattataataatgataataatatctagtttgagttggccaaataaacaaatatacagctcaaataaaaaaaattacacaaataccacttacacacaccttcaaccca

SEQ ID NO: 294814 - DNA, 3288 bp, Cannabis indica
cccccccaccccccaccaaaactgtttcctagggacttcaaacctaaagtcaaaaccaagtgagatccgaatcctatcaaccacatgggaggtaaacaagtctccatcaagaaaagaacagaaggcttatataagctccttcaccatcagggagagtcttctgaatgcacggctactccccagtccccgtgcattccagctgataagggtcatttttttgggtgtgtgtgcatagcatcacccacctgttccatagaaagaggagccatcatctcgatcaccaccatgagctctcttaggcatagatcggagagagtcgccaacagaagcatggtggggttgaaaagaagcatgcttcacactagaagcagaagaaaggcccttgcctcgcacagaggatcaagttaaaccactggatgactaccagcagctcctaagccattactaaccataatagaactctccttaacaaaaaccgaaagagcttcagcaatggattgggtattcaacaaactatctggatcatccccactagggttatctgcaacaagaacagagtttgtgggataagaaacgtaggtagaagaggtcatagtagagatcaaaactaacatcactaataggaggagtcaaagcctaaacattgggattaatgggtgttggaatcattacatcagcgggcgattgggaaagtgtaaggtgggtgatagaaaagaaggaaagttgatagcttggttagtaagcattgaggaaggaggatgaagggtaccaaagttcatatcagcaattgttattgaaggatggtgagggtactgaaagggcatagatttatcagtgaccttttcttttcctcaaagaaggatagtaaaaggacaaggaggagaagcaaggctttcatcacatttttccaggtaagcatgacaatactttctaatcaagcttcccacagaagtagcaaaagtcagttaatctctcgtatctaaagtccaaccatttgataatctcccttcctatcttgataaacctaacattcataccccttctaataagcaacttcacatctaaaagcattcttatctgcagataaggtcatgttccctccttaatagtggttttatccacttcaataagattaccaacttctaacgcgataaacttggcaagttcataagacttacacatgaagggaatcacatacacctgaatccagaagggtatataatgaagatgctcatgagatagggaaagggctttcaagagcagcaaagacagtaagattttgagcaaaatgctacggctaaccttctaaaattctacctatatccccctcacacccaaaactaactagaaacaggccatctgcattctcagaaacagcaataggaaaacgacactgcgatgaccagatttcatataaggttttcataagggagggacgattaaaatgcctaactgtgtgcaatctaagaaggttgaaagtaacaagggaatcaactaactaacatcataagtatagtgtattttcttcaggggtcaagactagtatgttagagacattagtatggaaatcttacatattgaaatttagaggaggcaagagcaggactttaacaaaggaaacaagggaaaagtgaaggtaaggagctcgatacctgagacgcgccttaaataggaagaaccagtaagctctttgtattctcctggaggatcttctagtcccatcccaaatcgtaagagaagtagcccaaatgatgaaagagatttgaggagcctcaagtttctaagtatccccctccattttgccaagaacaaagcattggacagggttaattgtttggcttttgcgatgagaaggggaaaggaagaaagaggaaggccatgtggaacaatttcgcatagggtaaaagaaaaggttacaattaatgctctgtcaaagaaggttatgatgggatggaggaaaagtgtaattctcagagtgattaatgtggcaattaagtgtgcaggaatgaaattgaaatgagaagggatttgacgatggaatagatgaggaacgaagccaccacaatactcgtttgggtggaccataacaccatgttcggtaccggagaactggtacacataccaccaaaagactctagaaatagaaaccaggaaagtttgaagaggaagaaaaacttttgcaatgtcatcaatacttgaagtttattgcttcgatagtttgaatctttattctatatgctacacataaccttaacagaaaataaaatcactgaaactttttgtatcaaacacatgcaatttttcttctcaaatacgaagaataaaataaaattatctggtccaacactcgtgaactttcactatcaagagagattttacaatctccgataggcgctgtattgatacaaatatacaactcaaactagcaaataattttaacaaacgaaccaatacatcagtaccggaatctcctctctaaatcacctattttaatatccactaaaggaatacaagttactcggtcagcaggcaattagtctaacattagtacttccaagagccagtttccattacaatttgtgatcccttttatttcttagctctataagaaactgcagaggaatacaagacggatgcagggacagctaccacaagcagagttcaaagatgtcaaaaaagtttgctaagaactcagacctaacaacatcgtcatcaccagaactccaagcgcactaataagtatagtcagcctcactgatacgggagcaaactgctaatcttttaatctcgaaactgcttgaggaaaatcttcttgacaatgtgtaaactacccttgcatttgtgaacctgccatgtcaaacgagaagaaaaataagactaaggcatttcatatgaatatgatattgcaatttaaaaaggaagaagccaaacggttaatttaaggtttatagtaagacaaaataggacagacaagtggcagatactgccaaccaaatgaagacggtgcattcataaatcacacactgaaactttgtctctgtgagtcgggcattccacagcatatagttaaattaaaagctttcgagaaatcaagggagtgtttggttggaagaaattaaaattaaagaataaaaatgagaatgggaatagaagtgaaatcaaatttaaaacataaaaaaaattgacaaaagattataaaatttattcttatcttgcattggagtttttttttttttttaaaatggaataaacattccaccaaaagagtagaataaaaattattttctt

SEQ ID NO: 294815 - DNA, 6115 bp, Cannabis indica
gttaatagttgtaaaaaaaaaattactgaaaaaaataatatatataaaaaaaataaaagaaaaatatattttagaaaacaaaaaaaaacaaaaaacaaaaaaaaaaaaaaagacaaaaacaagtcgtttgtttttgtattttataaagatgcattcttctaagtatttagatagatatatagagagagtatacctagtacaaaattaaatgtaagaactcaacttttgatttttttctttttttgtttacaaaaatgtggaaacatatttaattataggattcaaacggagtgacagccaattaattccctattgttatatatttatggaaattacaataacttagtgaacctctccaatggcactgtccaaattcatgatcactaaggaaaattaaaatctataaaaatctatttatcattctctgttttttttcttctataatcactctaccaaattatttcttcccttcctacagtgagataaggtaatattgtttgttcttcaatcttttttttttattattattattatagacaattttagcagatttgatgaatattatttttatcttcttcttcttttaatacagattttagttccaaacattttcatatatatacatgcatgcagtttttgtattttgctttgctctgatttctactttttcaaaaaccaacccagcatttgtttcaatatatatatttgagtttcatcatcttataaaaaaattatatttttaattgactcaataacagagctgatagacacaaaaatcacttctaaatattaagacatggcgttcactgcaactcaaatgtctcttgttgtgagttcctttggtttagtatccttcattcttggtattgtggctgaaaacaaaaaggtatatatctaatctttttttttatttatttatttattgttcataattataacttgtatatatatatatgttgattttttacaggctcaatcaggaaccccagttcacaagaaaggttcagtgatatgcatctacccttctgatccctcaatagctttgggttacctgtcctttatatttcttctggcaacaacagcagctggctattactcaatcttttatccatacaaaggaaaatttctttcacaatcaatcttctttaggagcaaaacatttattgcctttttcaacattgctttgtaagtattctttttttttcctgaattaatacttattttttgaattaaaataaggacctttaatcttttatctattgctatagctaattgaaaattatggatgtgaaatgatttttttttttaattaggttaacaggcggtttaggtgcagcctttacattgtggcccacaattgaagaacaaaatttccataaacacaaagcttatcccattactactgaaaagtgccctacacctaagattggtcttctaggtggtggagctcttctttcccttgattcaaccctcttgtggttggttgctctaatgcttgcaatcaatgttagagaagatttcattgaatatggagatgaaggtgaaaaccacttggctagagctgaaattagtacaagtatttgattgttgtgatcatctatctatctatctatctatatgtttgagagtttttaattttattatctatgtctattttgtccacaagaagatgaactccaattgagatgaatcatatattgtttgttttagatggtactggtgtgagtgtcttgtataggtttggattgataaattgtgaaattagattggttttgtcatcattgtgctttgcttaaaacattacatttttctctcttgttatttctatgttcatctggatatcttttagttattttgaattgttgttcatactttaggtaaccgcgcttttcttgtcaactaaaatttcttgcaaaataacacaataaaacaaacagtagctaacttgttattggataatctaagaaaagaatatgaataacattatgtaaataatgaaataagaatagacaaaagaatgaatataaagaatcaaaatattatatttctttattcacacatatataattagtcgtagatgaatataatatataacatggtgtgtgtgtatatatatatatatgttgtaacaaagcaaaatagcagcaaatgttgtctaactttgcagtttcccgaatatagacatttctataactacaacggtaaataccaggctatcgttctatgaaaactattgggaaaattgggtgtcgtataatctaacttttcttttcttttttccactgaactgatatcatggtaggctctctttttttccttttctttcttttttcctgaagcttctcaagaactatctatcggacaaaacggattcactccaagaaagcatgagatctcgaacgacggtcgggaagtctgcaaagttaaaatcaaaataagaagtacaaaacttccacaatgtttatactaaatctactatagctttcattgttttacctcttacaacttccaaagctacagtttgtacgtctatctcatcttgaattagcctgtatacgtccacaagctatatagaacacagatttaacaaaaattattaatcccaattctctcctctatgtaataatatttaatattagagtgaccaagagcaaacgaattttagttagttatgcagcaaacctcctgtatgtgaagctttgagtcttcagtcaaggcaagaagaagttgtcgacgaattccttcatcaataatgaataaacgagctccatctttcatggtgtctgtgagatccaactttttttcaaatgtttgcctgccccggaaatggacaaagaacatagagattgttaattagtccagaaaggtagataataattaattacactaaattgaagttgagatgagttacacatacattcccttcacttgcaaggcagggttgctactcatcttggccacgttctcttttgcaagagtgatgaggttctcgagccgcttccactggaaaaggccatctttaaaaaggacctgaaataataagtaacttattgaccatacatgatgaaataacaaaagcatatagataatggccattagcttgtgtagcttttacaagattaatacaaagatgttgcagttggttggctatgaacagacctgtatgaggcgttctcgtagagctggatttggatctgttagaagccgctttgccacgtatggataggctacctatttgactaattatgttaattcttcatcataaagaaaccatatgatatagcacacatttcatcacaggacagctaacagatttatttttgagaaattcagaataaacatttttttctttatcaacatacagaattacagatcagtgaattctaaaataaaaaacaatgtattgtgaaaattttgcagaagtaattataaatattactcaagatcgagctaaatgaagaataagcacacaatatatgtccctacctcaagaaacttgaaattcggttccagagtgaagcagatgccttcttgagttaataaagaacggataacaagagaaaacctctctgggatgcggatgggataattataaactaattgattaaatttccctgcagcacagatgactaattttaacaagctgctcctcttaattaacataatatagaaaatgctattagcaatccacatcaaaacaaaaacaaaaacagaatgaagtgtaccagttaagaagaatatggcttcatagttagagtatgaaaaatagaaatgcattaatactgtgaaacatcaattaccagtaacacttcgaaaattaaagtcagagagtccttttccagaagagttctgccagattgcttctaaagctggaataatgggagcaacatcagttccaggagccaaaaagcctagcctggtgaaatcatttgccatctcagcatagtcctcgtttacagcatgaacaacagcatcaatcagaatctgtttattttgctgaaagaaataagacaccaaatatgaagtgtcagaaaggagaaagcaaaaaaagaatgtaattccatttaaaagcatgattaactggaagaaaaaataataataataattatattattgttgtgaatcaaagagatgaggtgtacctgactaagcacggcaacattcccaaagtccacatatgcaatacgcccatcttgcatcgcaaaaatatttccaggatgtggatctccatgaaatagtccaaactctaatagttgtcgcaaagcagcacttacaccaacagttaaaacccatctaaatcaatgccagcttctttaatggcctgaaacacagataattttcattgaaaaatatgaaagctttgcagatatatagaaaactggatggccttgtcttaattgtctatcttggaaacaattacctgtggatcagtgcaacgaataccatcaatccattccatcactaaaactcgacgaccagataactctttgtaaaccagaggaattttgacagtaggatcatttttgaagttctcaagaaagtcttctatattacgagcttcctgagattaaaaaataatagtaataataaggtgaataccagaaagcaatgttatgaattcaatagcatacaattgctaataataatgacatacacatctaattagaagaacccaattgctcatattttgcaattaaaaattacaatatagccatgaaagcatcacgaattgcctttatcaacatgataaaacattattgtcttttttgatcaatgatagatcattactattcaattcaggctatgaagtaagtcagctttaaaacaaaagagaagatctgaaaagtaccaaagtataatcaagttcctccagaagcttctcaccaaattcatcaactatcagctcagcattgcagcccagtttttgtagactaaagccattcaagaatgaagccagagtacggaaaagaaaaagatctcgatatatgataggctctatccctggcctttgcacctgtaatatagcagcaatggttgtaaatatcctttcgagaggagtagtatttgaattggacagtgtacatcctttgactgccaacagattagctttcttaccttaatagcaacatcctgaccagtgctacgtaatgtagctcgataaacttgacccaaacttgctgctgctattgtctgagatgagattttactgaatatagcttcaagaggctgacccaattcctcttctattatgttgaaagcaacctagataatagccaagccatattttagtttggtccattttaagttcatcacaattaaaagttgaatcacaaaataataataagaagaacaagaacaagttagagttagagttagaattactattacctgattagggaaaggaggaacatcgtcttgaagaatgcaaagctcattcatgtaatcttctctaataatatctggtctatttgcaagaacctatcaaatttggtgaaaacccaaacataaggcaaacacaaaaccaaaaaaaaatagcacttcaaggtatgaaatgattcaaataacaaaaaaagttacaattgagtttagtgaaacacacacctgaccagctttgataaaagaaggacccaaatcacataggagattcctaagctgcctagcgcgaaatgggacaacctcttcatcccttccaaccaagaaatcatacatcaaagtagaccaataaaaacccaaactccacactatctccacacctcgaagaattaaagatacaacagctcctctagattccaacaccttattcctcacctgatcagacaccaccaacattattataacaaaatccaataaaagaaatcaacactacactactgtcttcctcctattatattatatatgttctaatacatagacacaaacctaataatcacttacaatttcaaaccaaatcaaatgaaaacactcagcaaaggcgaacaacatatgattgggttattaattctgtcctaagcttaaggcgaagccaaattcagaagaacataaataaatcaaagaatgaataagtgaaaattttaacagggcaactaaactaaattcaaaagagagagagagagag

SEQ ID NO: 294816 - DNA, 5482 bp, Cannabis indica
attttgaaccatagtttacataattcaaccaactaagcttcacataaatatatacattatatttatagtggggaaacaaaataaaattaaagatttattactctttttcactcattacaaatgggtgtgcaaaatattattatgattggattggattaattttttaaatccaaatttttaattatttatatccctacctagtctttcgaaaattatcatgtcatttgctaaagaaatctaagttgacttaaatagttatgtctttatcaaaaagtattaaaaaaatttatgagaaaccaactttttatatagttataattatagagtaaattaaggtttttttatgagaaactttttatatagttataattagaattaggtaaggttttttcataaaaacttatgtcaatccatataaaaatcttaacattaaaattcaactatttataaaatgttaaccactaagaataattaacataaaatgtcaactactaagagagaaaaaaaaaaaaaaaatattattatatgcataattttatttaatttttttttaaaaaaaatacaaattgttgattgatcagagattatgaagagtagataaataagttttaagcaagaatatttatatggtttagacgttaatgagatttaatttacaagtggttatactaaaatttcattagcgttttggcctaaaaaactaaaattattatatcaaaatagcttctatttatatgtagttatggttcgaatttgacccagtataaataaatcatagaagaacatggattacacttaacatttgcccaatggatcgacttaatggtggtagtagatgagttgacatgtcttttgtacatagatttagtatatatcagagtttcccatgaaaatgtttctctcgttagtacataaaggacatactaaaataaagaaatatagtgatactaattaaattttaaattcttaaaacttaatattatatatttgatttttatgtgtgaactttataaatatgtttatttacaaaagctaatcttaatttacaaggaaaaatgtttatttataatgtatgtaagttcagaatcattatattttttaaataatgtgggattattagaaaagtaaactcaattcataattatatgttcttttaggatataaatgtgaaactcttatcaaattttataaataaaataaaaaaaatatattataattcataagataagaagatgagaagaaaaaaaaaaaacgtgaaaaaagagaatgcatagggtgagtctaataaataccaattttctttttcatatatataataactaaagtattattctcataacatatgaagatgggaaaataaaatatgaaaaacaaaatccagtttttggccttttccttcaaatgatttgtagaaaatgttttgttcaacactccaaaactcaaaaaaaaaagagaccctttttacatttattttccacaaatctaaagtgtataagaaaatttgttaagacaaacatctctcattctacatatcaaatcaatcattgctcaacacaaatatcaatcattgctcaatcatgcactctgagcttccaagaaggcattgaaatcctccctcgcctttctcaggcgaggtgtaatgcaagtaggggaagcagggaatgattgaggagaagctgtggagaaccgaacatgtctagccgaatcatttgacttcctagctgccgttgttgttgttgttggcgctgttgttgatgatctaaccgagccattcttaagaactcctttgatgtctttgtcaaaaacaaaggctgaagaaacaggagagtttgcatcattgtttccactctgaatcaactccattggaagatcgaaatagtgattcgttgagtctccttctcctcctcctcctcctcctatgacggatgaagcccatgatccacattcaaatttctctaaggaaactgtccttgatatcacattactaatattattctccatttgatcaacttcttcctttcttgatgctctcacttgtcttccctttccaaatcccggtatgaacaagcatgcaccacacttgaaccctccaccacttgacaaatccatgctgttgctgctattgctgttgtgttggttgtagctgttcttattgttgttgtggtgaccggctttgttgcttgttcggttatcacctctagggaaactattgcggtgtttcttgttgccatattgatcagatacatctggtttttgtagccaaagatcaagatcatcagatggagagaatgatcttccttcagcacaagatttgctccttctcaagtaatattccaatggcaaattcatctgtttttctgcttcattttgaagaggagatgtttgaccttggctttggccttggccttggccttcattcttcactttcttcttcagcaaagatgtgctgaaccgaggagacgaattggcagagtttggaagactacagctcagaaacttaggctttccgggaagaagtgaggctggtaactctaaaaagccattaactttaggcgactctctaaacgaaatggggtcaatcgaaatctgcttctccctttggacattatcattccttgacaagcttctacaaacttgaatctcagcaaaaccatttgcatagtagaagttttcatgatcatcatctggtttgtggtgtctctggtttggaaccgaaaatgcagtatctgaaggtggaggaggagccatgaagataataatgtagagaagaatataagagtgatagtgaagaagaagaagagtagtatgacaatggtttcaaaggtacttactttaagtatttaaaagggtatgaacaagacccagatgcctaaaatacgtgggatgcatattcatacttaaaatgcagttagtgtcatccatgtttgtgtaaacaaaatttaataaaagagtttaacaaaaggaaggtaaggtaactactaacccatgataaaaaacacttctttattgatttttcagtcaaatattctattgagagttgacctttttgcctcattgcacgtctgcatagcagtcaacataatagaatagtcatattaatattaataaattggagatagaatgtgcttacttcaacttgtcacatataaaatttgcaacataaatagaaatagtgatatgatatgatacggaagctttcatattacaaaactaaatcattcatattcataattagggaatacagtggattcattacaaggcatgtaatttaattatacattgtgagttaaaatgaatcatgtctttctctactggagagagttgtagaatagaatcaatacaactgaaacgccgatgatgaccggaaaagctgtgactaagtacagtgctccataaccctgcaaaaaattagaaacttgttaacaccctctctcaacattagtttaagaaattagagcatattattatcaaaggaaatccatttataaatacaccaagaaatttagaaaagataggaccttttgaaggtaatatattttgtaagtgtgtggtttagaaagtaggattaaatgagtgtatggtaaggtgtatgggatttcatctcaaaactaatttgcaataaaaggagtagtccatgcatcttatgtatggtatttagtttccacatattatcaatgtgagactctctaacattgtctcggctcgtctttttagaccgatttttgaattttaatcggttactcgttagagtttagttttgctctgataccgtgttagaatattgaagtgtgtggtttagaaagtgggattaagtgagtgtatggtaaggtgtatggagttccatctcaaaactaattagcaatgagaggagtagcctatacatcttatgcatagtatttttagtttcaacacattatcattatgagactctctaacaaaaggtaatatatattttgggacaattgcttaagttgcacaagattcagaatattgaagctcttacaaaaagactaatattaggatttcatctcaatatgtgttatggaattgacagtggaaaacagtgtcaaagccgttgttagttaataaaccaaacgtcggcgaaattgaaatatcaagatttgaagagaaaggtatagtgtaacaaaccaaagccttaggcacttctgtctcttccttgtcatcactatcttcaatctcagctgctgtatcccattccatgttgagtctcctagcagcctctcggggatcaataccagtatctgtcgctttagcatatagggatttgcttggttttttcttttctgcttcaacctaaacaagaaacacggtgtggagaaaacggtcaacataatgttgaaaattcccttttcaaaacaaactccacataaagttgaggaccaacataatcttgaaacattggaactcaatgtttggtggtcttacaaatacataagaaacaaaatgcaatatcaattgtgaaggaataatgcaaagggagaaaggagaataaggaatcctccaaacgaaatcatcgacattagattatgaaatctatatcacatttacctactaaatttaacaagaagagaaaatcatgaaatcaattgaaagaggaaagatggaagtgaagaatggatagttacaaatgaaaacatctctttcaaagtgagatgatccaagtactactatgcttaactagaataaataatgataatacctcaagattgggccattgcatcatttcttctgcgagcagacgaagagtaacacggttttctggtatttttccttcattcacctgagaaaaacaaaacacatattcagtattttttttccaaatgagaaaaacaattttcccatttgttcatgcatgatgattacaattcaatagaggtttcaaaaatacatatactaattagggcagatttagagaccataacattattacactaaacccgcctgaaataacaaaaaagagaaggaaaaagaaagagatgtaacaaatggccaggaaattgggacgatcaagtttgatcgtgagcaatgatgtgagtgaattggagaatggatcccagccattggtagcaactccgggagctggaactgcttgaactggatcagccgtagccattggtgcagcggtggtgccaggatcagtcgtggaagaactcatggacgtaagtcagaggcgattgataccatgtagaaaaacataaggcaaagccaaacaaaacagagagaattttgaaagcttaactcaaacaatggagctgaactttatttatataaaagtcgaattacaagaaatcaagaaaagcaataaaactgttacagctcactaatattaactaactaaccaaattaactaacaatgctaattactttgcttatttacacaaacagaaactataacactagtatacgatatctattagtctagcctgtaaatactgagagttagtcttgtgaaagaaaggaa

SEQ ID NO: 294817 - DNA, 1564 bp, Cannabis indica
tagtttacttcactccaacaagccctgctcaatctaagcaagataaacttcaatgtcagaaataacttacccttctcctcaatcactttgtcaacaagagatggttgaaatcccatcccaattaaggacgaccgcgcattgcttccagaggaacttgcaacattctcctggaatttcaaaaggaacaatataaatatacatatgcatgtgtgtgtttgtgtgtgtggtgtagggggtatctggtaaagagggtgtaccccaaaagtgtggggaagacagtttcagaaggaaactcaaaatctaaaatttcttccttgggaatgacagcctcttggtgttcttgatcagaagaaattttactgcttgaagggttagtgaaatccacctgcagagacagatagatatacataataaatataatattcaaatacttattaaagaagacaaagtccccaaatgaagcataccattttaacacacacagaaaaaaaagactatcttcaattcacaggtgttcaacttcaagggtcaagctgcatagacaggccttctccttctccttggaacagtatttgatagttgcattaaccctgaaaacagcttttaaagggtcaagggtaaatagccctgaatcaaatatatatagaagtagaagttgaaatgcaaagcactaaaatttgatgttgcccacacaaaaataggacccaaaaagttattgaggaattctgagcattcaattaaggactgtaattacaaactctgaactcatttttgcaaaattgaacaaactccattaaattaattattaacattgtttcaaagaataataaaaagacaaactttaaacttttccaaagtacatttctgggttcctcagtaacaattaatacagtttctttataaatattacaaggttaagcagagaaagaaaccatagcttcaacatatataaaaaaaaagaatcttgttttaaatttttctccgtacccaaaccaaattaaattgactaacaaggtcgagtcaacagattcaacgagaccatcgtacctgagagagagaggaagccggaaaagggcagcggcgcgtggggaagacgctctgaggccgtgagtaaaatcttggggagaagcggagaggagagagagagaggggtgaaattgtgtcagtaatgttagtttgatgtgtaaactgttgaaagtgaaagtgtgtacgggtgacgcatgactggcacgtgtctctgataagtgcacccaactacactacactcttctctacacaatttgtttttctttctcaatctagctcctcactaatctttttttaaaaaaaaatttttttttaaaagaatttttttttttaacttgtaaatacaattaggttccttttgaaaagggaattttttttttttgtaaaaatataatttttttatagaaaaagttattttatgtgaaaaattaaaaaaaaaaattgactttcatttttgttgagttggacacttgagttgttgcctattttggtaacggaaattttcgtttaataaaatgatttttattttcaaaaaaat

SEQ ID NO: 294818 - DNA, 6042 bp, Cannabis indica
ctctctctctctctctctctctctctctctctctctctctctctctctctctctctctctctccttattttctttgcttttgatcttgtgatctaaactcaacttggtattagagcagtcgacaatggcgacctctgcaagtaatttcacgagcttcatggtgattccaatcaccatgttcttgccaccactaaggttagattggagcaagtattttttttactggtctgaagtacttcctgccatccgagctcacaatcttaaagatattctgctccataggcatccaaggccagatccttattatctgaatcccctagctcttccaatatggtacgtcattaagagaattatcaccaacaccactattactaacgcttaaaaattctcattaaaaatgactcaataacgacatttgagtgtcgttggtatttagttatttaattatttttttgtaaaatttttaatcaataacaacattatttgtacaaacgacattgtcgttattgttaataaattcaatgacgactttgtcgtcagtattattatttttttttgtcgccgttaaagccttccatcgcctgtgaaacaataaaaaccccaacccttcccatttcatcattttaaccccaaacctacctaattcctcttcctcctccttcatttcatcttttttgatttcttttttttttttattattattttatttttttttcgtatttcattatacaaatccatcttctcatctctctaaaattttattctccaaaatctctctcttcaaaccttcaaatccattttcaacatccaaactatttttaggtgagatctttaactccttgagttagtttaatttctgttatttgttgaagctcgtggttaattgagaattagtttgttggtaattttattaggaaattagttagttaaagactgatttaagttgtagtggtttgactcataataaaaagttgtttatgttgtaagatgttggcttttatgaagaattaattcaacatttatgcacctaaaaatttaaatatagttgctcattatttgttaacgagagtattaggactagagaaagagattatttggaatagttgtattccaaatgtgtgaattatatgtaacttgtattgaatattttttataaactgtaattaaattaagagttgttttttaatttggatttactttcttaataaggttttccatgtttctctctttattggacaagtgtcctttcttcattcagtgggttatataaactctgtacattgtaccaacttttctaagaaaatgaatacacatttttatcttccttctcacatggtatcagagctttaacggctccccatgtcatcaatagttagtacagcttctaccccaaaaatggaaggggtaaatacacaaaaccctactgatattaaccctcctcatacagccggccttaacatttcttctacctctgttattccatcttcttcttctttaccctcaaatatctcatatcttcatcaaacaatctcaataaaacttgatgataccaactatcttgtttgaaggatgcaaatgcaaaacatcatcattgctaatggacttgaagggtatattgatggctcagttttcgccctccatagttcattgattcaaatccaacccaggtctaccctgagttcacttcatggcacaggtataatcgacttcttatgagttggctctatgcttcactttctgattcaatgcttggtccgatcgtgagcttctccaccgctaccaagatctgggtttctctagaacgaacctacactgccactttgtttcatcggagctatgactttcaaacggcgttgcaaaacctaaaaaggaaggtctcactgctttttcttacctccaaaagcttcaatctctctgcatcatgcttgcttctgtcggagaacccatctcagaccaagatcacttaacttaccttctcaacggtttgggtctggagtacagtgagtttgttactccgatcttggctcgacccatcaaacccaccattgaggaagttcatgctctacttttgagctacaaagctcgtatagatcgccaaacagctgctgcatctataagctccctttaagccaatttcgcaaacctatctttccccaaacaatgccctaaaaccccttcatcatctcagttctcttctcgatctcccaatcaaacctacccgaatttgcatcaacattcctcttcaacttctcaaccaccatctacccattcctaacaacaaccccgacaaccatattcccaccctcctcgatcacttgccccatggattccttcagctcctcgtccacccacacgccctcccaagtgccaaatttgtttcaaattggatcatactgcctcctcgtgctaccattgaaccaatcttcagttttagcctcctccccgtcagttcaatgcttactttacccaacaacaacctcaaacccaaacccacccctgttacccactcactctccttccatggttgttaataatcccacgttgtatatggactcgggtgcctctcatcatttcaccacagatttcaacctcttggaattaccaactcagtaccatggtaatgatcaaattactatgagaaatggtaagtttgcttctatttcacatgtgagttctgccttttaccatcttcctctttttgtcttctcaaattatatcaagtttattattcgccatcattgtccaaaaatctcttaagtgtctctcagctttctcatgataacaatgcatatgttgaatttcatcccactcatttttttttttgtcaaaaatcagggcactcacaaaatcctcctcaaaggccttcttgactagggtatctatcgtgtctcgtatcttctgcccgcttctaaatccacttcatctccacagctgctattatcctccaagtcctctatcaatgtttggcactctcgcttgggtcatccgtcttacgatgttcttactcgcattttttctctttgtaattttacctttccaagaaaagatttcctacatttctgtactgcttgtcaattaggcaaatctcatagacttgtatttcctaattttgtatctcgggcttcaaagccttttgaattaatacattctgacatttggggtcctgcccccatcacgactatcactggagtcaagtatttttttttattattcattgctgattatactcatttttcttggttttatttacttcacacaaaagatgaagcattccaaacttttctcacttttaagaatttggtatccacataatttcaaagtcacatccaaacagtttggactgattagggcagcaaataccgcaccctctctacattctttacttaacatggcattcgtcatgatctctcttgtcctcacaccccacaggacaatggtcgtgttgaacgtaagaaacatcatgtcgttgaaaccggcttgactttgtgggcccaagctcaaatgcctcttcatttttggccttaagcttctccactgccatacatctcattaaccacttacctacctgcaccctctgttattccagcccttatcaccttctctattgcaaactttctaagtattctattcttcgtgtctttggttgtcaatgttttccttttctttgtcctttcaatactcacaaacttgagttttattcttcctgttgcacctttctcggttacagcggtaaacataaaggctatttatgccttcatccttccactgaccgcatatttgttacctgttatgttattttcaacgaatctcatttctctttctccaatgctataccaccctcccctccacctgcgacacctcatgctgtcattacatcattaccctttcctgtttcctctcccgctcccatcccgagcattcctgcttccccttaaccaaccacttttttgtcctcaccctttgtgtcttctaaatcacatatcctttattcctctttccaatcatcaacacctctacctcttcctgtacccttctcgacctcccctagttcttctttgcactctcatgactatttccctaatcctttgatggtagatttggatagcccacatgaaacaattattgcccattttaatttacatcccatgatttcttgagctaaatcgggcattcatttgttgtgcctgcaggtactccagttgaaccatctacttttaaagaggtcagtcgtgatcccaagtggaatttagcaatgggcactgaggttaattccttgaagaaacaaaggacttggttcttgttcccccacctccggactgcacgataattggttgcaaatgggtctaccatataaagttaaatgcttatggctccgttgggcagtacaaggtgtctctcgttcccaaaggcttccatcaaacccatggccttgactatcatgagaaattcagccccgttatcaaaccgaactccattcgattggtcctttctctagttgtctcttatgattgggttatcacacagtttgacattcaaaatgccttctttcatggtgatcttcttgaaacagtatatatgtctcaacgtgagggctttgttgatcccgatcatccacaccatgtttgcaagttactaaatctctatatggcttaaaacagtcaccccatgtctagtttctaaagttaagtactgctcttattgcctgggggttcatagcttctaaagccgatacatttcttttcatttatcggtcttccattgtcatcattgttcttcttatatatgtggacgacatcattgtcatggggtcctcctcttcacagattgctaacttactcacctacctcaacacacagtttgatgttaaagacttagtccactacatttctttcttggcatccaagttcatcgatcctcctctggtcttcacctttctcagacaaaatatgttcgtgatttacttaccaagactgagcttatagactctaaatcggtctttacactgatctctctcacacctttatctctttacgatgggaaccctctccaagatgttactgcttatcgcagcctagatgggcggggctttacaatactgcacacttactcgtcctgacattcaatgtcaacaagctctgtcaattccttcatgccccgaccactgttgctaagcgtgttcttcgtaacctcaaaggcaccgctcatttaggcattcttcttcaaccaaatgccaatcttgacctccattgtcacactaatgttgattgggcttcgtgtcctgatgattgtcgtatcaccagcgcctattgtgttttcttgggtcataatctcataccaatgtgctggcaaaagttggtattgcgctggtaaaatagaatttacttgtgatgtgttggcaaaagggagttggcaaatcaacgttggtattagaacttttgccagcataaaatgaaaagcgctggcaaaaatgactttttccagcgcataaatgcgctggtaaaagttagaatttagccactgcaaatatacactggtaaaactttgacttctttgccaacgcagtttgcgaaatgcgctggtaaaagttatttttgccagctgtgctggtaaaagtgacatttcatgtagtgtcttctactaaacaaaaggtcgtctctcactctagtactgaatgtgaatatcgtgcaattgctaatggagtctctaaagtttcctggcttcaatcccttctcggtgagcttggcttcactctatctgctcccccaactatacatcgtgacaacaagagcacaattcaattagcttcgaatccagtttttcatgctcgtactaaacttgttgagatcaattatcattttattcgtgaacaggccagtcgtggttctctctctttatatttcactccttcagcgaaccaggttgcggactgcctcaccaagtctcttgttgcatctcgatttcaagaattacgcaacaaactcatggtgcttcccagccccatgagtttgagggggaatgttaaactgtaattaaattaagagt

SEQ ID NO: 294819 - DNA, 3532 bp, Cannabis indica
tattttttttttttttcaaaatattggtatgctataaaaagaaatataagctgtgttttgccgtattaacattttggtaattccgacacggtttgtaaatttgatatttttgtgtcgtgtttgaatttatgttgtgttttgtttttcttaaaagttagctaacttttatatttaggttcaaattggtgatttatttttctatatattttttttttttacaatttatgaattaattacttttttagtttcaattatattaatataatttttcaataatatttataagatcataatttttatttttagaaaatatgaggtcataataaaattattaaaatttaaatatttaatgagttaattattttttttataaataattattccttttttttttatatataagtttataatacatatatattagttaaaaagcattgtcaaaataatgatttaataggctaataaagatttttcttttcaaattttgacatgtaccaaatcgtacatttcaaactttttagattattaaaatttttcttaaactattgacttgttacatttaaggaagtccactcaattctatttaattgtactaacggatgcctaatgtggcgattatctatttactaaattatgccctattaaaaataaagaattctctgttagggttttgtggcgatcgtccctttccctccgtttcgggggttatgctctcatcaccggcaaagagcctttttttcatattacttttgaagtatggcaaatatggaaagtctattgcctattggtgagcattatgaatcttaatgtgcttgacgatgaaggatgggaggtgaatgattcaagtgttgggttggttggcaagctatacctaagaagctgtctctgtactcggcatgaattctgcaagtccttcaaaacagtattgtgccgcatttggaaattgacagagagagattgggatttcaaattcaaaggcaagtctcattcctctttgttccttattctgtctttcaagaactcatctcacttagatcatattgtgtccaagacaccttgggtaatccaatacggtttcttgattcttgaaagaatggactgtattcctctaaattgggaaattgaactgctatggttcctgatggaaggtcgtgtgttgaacttgacaatcccgtcgatgacttccaacaatatacagcgattggcttcaatggcgggaaaggttgttttagtcgaggggcttgatgttctgaaaatggcagacaatgggtttttcctcttaaagttctaagctccattcaatctaaaatttgccctgggttcttgtttcctacttcgaatggtaagatttggtttccttttcaatataatcgtttgccatacatgtgctttaactatggaattgtgggatatgcgagcaagaattgccatgctcctgtggctatgttcaggatggttatggtaatttaactcgtgcttacgggacttggcttgagcttaactcatcttctcaatttaagtaattggtttttagggggtcattttacgccccatcaaatgcctgcccgtagccccggcatccaatctgattctcggcccaaccatgtcctggggttaatgatgttcctcccattgctaaaaggaaagaagctcctgtgttgccggaggactttttttggctcctctactactttctccaatgttggtgatgagttgacacaatcttcttctctgattgatgtccctatatcttttggtgatgttttgaggctgacaattaatgatcctggtcctactaagtgcaacaaaatttgtggctcaatgtggaggaaaaaaaagaaaaaatttggcgaggcccctactgatattgtatcgaatgtgttgggtctgggagatgttactatggacggccaggttcctcaaggagaagcttctagtttgatggattcaatctctgttgatgaatttttagcggcgaaccttgcggggtagggtcgccaagagccatgatttcccttttttcgaatgtttaaaggctggggaacccttagactatgaactccctcctttccctcgttcatgactacaatcccagtgtgttttttctgtttgagacaaaggcttcttcatttcaaatggagtgggtgcgggtgcgcctcggtttttcagggtgtttttgtgtggattcgattggtaagagtggtaggcttgcttttctctggcgttctcctactgatgttcgggttctgtcttatacaaggttttatattgactccttggtgtctaatgaggtggatatgacttggcacttcactcgtttctatgggaatcccgaccctaatcaacggatgcactcctggaatcttctttgtaggttgcaagatcggtatacggggccattggtttgtggaggagatttcaacgagatcttgggttcccatgagaagaagggtggccgacctaaacctctgaatcttatttgtaatttccaacaagtcgtaaatgattatttttttcgcgatatccctttcgaaggaagccaatttacttggtgtaatgggcgcttcaggaaccttatctttgagcgtattgatcgtgttatggggaatatggaatggcatgacatgttcctggttgctttggttaaacatctcccccagatgaactctgatcactgtcccctcttgcttagctacaattttgtgcctcacaacacgaatgctaaaactcaatgggtctcctaattttattatgagcatacctggcatgacaaagaagactgtaaatagctggtgcagaattgttggatagaggaggattcctccttgatagcagaacaatttgtgactcgtattaatagatgtggccatcgtttggctaactggaacaagcaacaaagaaagaccaatcaactgctctctccttatcttcccatcccgatgactggtccaaactcactcatgtggaaagacatttaaatagccatttagacaaagaagagatgttctgacaccaacgaagccgtgctttgtggtgttgccatggagatcgtaatacccgttatttccaccagcaagcttccaaaagacaaaagaaaaacaacattaaaggggtgtttgatgatcaccatatttggcatgagtcttcggataaagtggcagagatctttaccactcattttcaacagttcttttcatcccaacattattctgatacttctttccagcaacttcattgctttgtttcgtgttgtctaaacttccagataatgattgtctgctggaaccatttacggtgactgatatttaaaatgctctttctcaaataaacccccttaaagcccctggggtggatggttttttgggtttgttctatcttgaccattgggatatagttggcgacaatttagttcaggtttgcttgtccgttttaaataatgatatggattgtggtgtgctaaatcaaaccctcctttgtcttacacctaaggtggatcgacctgttgggttttatgccctaaataaaactcttt

SEQ ID NO: 294820 - DNA, 2642 bp, Cannabis indica
ttttaaaaaaaaaaaattgaagacactcttagttatgtaagagtggaatatctacagtagttgatatttttatcttgctgaatcaggaaaatatttttacgatccagtttgttatatttatttaagatcatttataaatttttaaaatattctaaatagtttacaaagatacaattaaagttcattaaaaaaaaaaaaactgaaaagctccccttctccaaaattatattatatcttctttcaattgtcaattgtcaattactcgttaaaatattatttgtcaatttttttatttatttattaaaatagcaaatatctaataaacatctaaatatatatctagtttacattgtttcaattcacgagatgataacagatttatttatatttcgcctaatattatatatatttttgaagaaaaaataccaattacaaagctatgcatatttggctaatgagcatcattgttacacaaaagcaacacatacttaaatcttagcattaaaaacactaatgatggctccaatatttattacttaaatcttagcattaaaaacactaatgatggctccaataccaataaataataccaagttctaatatcctccacaattgaatcaacaatcatattcttgttggaaagagcaatggagggtaaagactgagagatgcatttggatgaagtggtatggttgtggcttatattgtgccaacaatattcacattccgccatccccttccacattctatgtttggtttacataatcttaataaaatcactattatataattaaattactatatattacactctttattacaattttatttttatacaattaccattatactactcatataattacaaaaatagtgattggttaagctatgtagctccaaaaaaattctagttggtattggcgacaagtagtaatagtgaaagatttgataaagtctaagatggataaggatgatttgattcgagagccgtatgttgtctcgatttgtacaataaactttggcctaaaaatcaagttcgaacctagaacttcagactaaagaaaaggctgttcaggattggagtaactttggaggactcttgcttgatttgtaatgcaggtattaaatctcactcacacctatattttttaactgctattactattacaataaagaaataacgatgaagatgcttacattagattggtcttggttctcatcaactaagacaaccatttcaggttttgaaggcaggtgtacatagcagtaataaatgttgatgtgtatcacatttgggcagctaagaataaagtcctatgaaaccaaaatgtacatatgatttatatcgttgtaaacaacatcaaaagagttgttattgatagattttcttaagaaaaaaagagaaaattagtgttgttcatggcggataggttgtaattgtaaataacctgatgtttaatgatatattttaaataatataatagagaagagtgctctaggtgccatgacagaaaatcacaaaagcttcccttcatgaaataattaactttaataactgctaaaatagaaaaagaaaacaaaaaacataaaatgttatttgcaatcaaagccattgatatatcacatttatttaccatttctactatcattgctcaaacttcaaagaacaaacaattactgaaaatttcaattttcttcagacaaataataatttaaaaaaaaagggtgaaatttgatatataattaactcaataataatatatatatatgtacttttatatcattctttggaagaagagttgggccaaacactaacactttctttctgaaacttaacatacaatgccgtcgccgccgcaacgaagtacacctgaacgaacacaatcgacggcgtatgataatttatcacgctcttccccgtcgccagctccaccagcaacaacgccgtcaatcccaatatcgccaacctcccattcaacctctcgctgtacggactgaacccgaaatccaccttgacccgacccgccatcggctccttcaacggaactggcgggagatagatcgaggctggagacgacgtgcttttcttcgacttcctcgtctttcgaatctccgctttcttacccgttccgcttcggtagcggagtcggacctggctcagtcgatcctcaaagtcatcggattgggtggtgggcttggatgagtcggagggtggagaatcggaatcggtatcggtaccggtggctctgggtttgaatgaaaggaagaagttaagggaacggggcttggaagaggagggagcgagtgggaatgggttggggaggtggagagaggaggatggtttagtcgccattttcagtgactcgcttttcttcggataaggtattttaattatctcatctttctctacatattcattttctttttaattatttttaaaatgtaacaaactctacatatccttttatgtcctccttcgtgtattgatgcaccctttacttatttcgtcattcggcaaaattttctatttttttttgtttttcaaaatcaaaaaatttatagtagggctatacatcggtcggtttgggcggtttatcctatatattttctaacccaatctaaagtccgggttgctaaaattt

SEQ ID NO: 294821 - DNA, 3649 bp, Cannabis indica
tgtcacaacttttgactcgggtttccgttttggaaccaacttttttagtaaaaagctcatcaaattccagaccaaaagaaggtttcgaagtagaatagagctcaagaaagtgtgagttaataataccttcaatatcttttttgtcgttccatactttaccatccctatctttgagggaccatatttgattccttcttctccttatgatagttgaagcatggaaaagctggtattcttatctctaagtctaagccacacctctctagatttttacctccacataatttctctccttatccacacctcttttaattgaccttgaatcttactttcttctctagattcatctgagattggttgattttgaatccattcttctcttttttccaagcttttgatcatttcctaactatttcccataaacgttttcttccaagcttgaaatcctctcctgttactgtctatattgcaaagcagagaaactgaggactcaacatcagagtgagccaagcccttactatttcctctctacatgaggcgctcgaagactaggcttcaaaaaattgaaagggtatgttccctctttttgaaaacatatgagaatccaagaggatgggagcatgacctgagattgtgattgggaagttcagaatacctaggaagggtacctagaaatccaatcaaaggagccaatgtctctatcgagtctctcacgaattatgccaccattgaatcttttgtttttccaggttaatttgttcccttgaaagcgaaggtttacacctccagtatgatcaaaaaaatccagcagccattttgtgtcacggggtttaactctaactcccccaaccttttcctcataactacaaatacaattgaggtctccaataacaatctaagggatgtcacaaagattgacttcaacttccaaacttctccaaaacacctctttatcattctcatgcggagtaccatagatcacaaataacttctaggatagattggtttggaaatcccaaacagtagcttaaaaaaaccatcattgcatatattcacatgaagtttaatatttttattccataacaaaccaaagcctcccgagagaccttttgcattgatacaagcagccccaaagtaccccaatttctttgccaaatcatccattatgctccttttgacttttgtttccatcaaaaaaatacattctggactgtattttattacctaaacctgtgaggcctgggttttcgagtccctagctaggccatgacaattccacgaaaatactttcatgggaaagtggggcttgataatggtcgcctcctcgcccgaataaaacttttgagcatattcaactcgaacctgaaccaaattcaacatatccactaggttcttttgtgcttcaaaattggtcacctttgtaattcgatctttacttttatcttgcgttgaaagtctagaatgagaacctttcttccttcatttatcatttttcaaggaagataatgaagcgtctgatcccatcttgaaaggagtttcaagtggtcccgaggaatatttaggaagctcgagcacttcttgggagaattcacaggtggtttcaactgttctttggacaaaaggaatcaagttgaggctttctttcctcttcgtggttgtggacagtggtggacttggtctaagacatcaataggatcaagaaataaggtaggaattggcttaaatttatcaataggagctgggctcattaattctttagtcaatccaatttcattggcataagtgggctaaggaaagtgggtaggctcaggatatttatgggcttgtctagacttgcaaagttaaacatgtgatttttctaccatttgctcataagtaggcccaatattggccataatagttgtaaggattctagcatcagctgcattgagaaaaggcctagcagaaaattttgaaataatatctttttcagagacagagttgggattacctttcttatgtctgcacataaacccaggtgagactgagtgagttcttctttccctaaaggaaattatgggggaaggtgattttgcaactaagttatctccgtttgatactgctggacaaaatgaagttttctccacaactttcaaattctttcccaaaatagctcttggaagattaccttgaattttgaacactttcttcaatggctttatgttgaggtttgactacacagttgacactgtaagttcctcaaggatgagtcattttcctttgtccttactcatcgtatctttacctaagggtctcctaatcgccggagatgactatcgttcctcttttctaaaccaatcaagctggttttcgttttgaattagctaaaaattatcgtcttcgcctttatccaaggcccgtaggttgggaccgcctgtccttccagaagatacgcgaaggaaattgggcgaacacaagttttttatcatgtctgagataaccacagatgaaacaaagtcttagttacttgaagtacaaaactgaatccactcctttattcccctcttaacatctagaaagaagccagatgcaaattgatgatatgtggtaatcttgacttgaaacttcaagaagccccttttgataataggtctctggtttgtagtatcacaacctttatagtccgctcctgtagctgctactggttgggtgttaacccaattgaggtaggggttggtaagccaatggcttgggcccaaaaaaatagccttccccttatcctaattgccattttcaggccattcttgtataattagtagtttcccattaatggtccaaggtctatttttcaaaacatccacgcagtcttcctctaggtcgaagaagataccccaaacccctgttttcatggccttgattttccaatggcccttgagtttccaaatcttgtccaatatatttttcagcgtagaccttgacctcattttccttcaaagaaactagtaagaactctagttttgactatctcagcattgagctcaaagtttggctcaagttctaaggtcatagatttgagaaactccttgcgaagaacttccagttcctctacttttcttccatctgcatcaatgttttgattgtccacaaatccctcctctgaaggctccgcattaatacacgtatccccttgaggtggttgggaggcattaatattactacctactaacaggtccccctccataatcacaaagtcatcattctcaattttatgtgcatgtcttaggttgtcccccataataacaatccttaaagttagagtccaagacaaagaaacttttaaagaaagagatcaactcttgctagaactttaaggatcactagaaaaaaaaaagaagcaaaatactatacttttcctaagtaggaaatagagaagacaaagagaataacaagataaaagaatcttaagaagactaaacaaaataacacaagagaatcgggttaaggcaaaagagaaggagatgaggaaaacttttccttgagtcataggacatataatcaagttgaagactcccactctcttactaaagagaaaaactccccatatttgcctgggacggagcgaagacttaattactaggggagccaactattagtatttttttttaaaaaa

SEQ ID NO: 294822 - DNA, 5133 bp, Cannabis indica
gcagatgtcacattgcatactttgtaatacctgatcaattgatcctctcattctgtcctcatagatcattcttgatgctattttttcagcctggcaaacaattacagtattttcagaaagaaccgagtaaaaaattaaccagagtaaaatgaaccagtgctagaaaagacagccataaaccacaactacttcagtgataactaatttatttcgtgccacctcaaccactttactgcatagtttaaccaaaattcttggggcgaacttaaaaagaacaaaaacaatcgtggaaagcacaccagcaaaagaacaaggctgcattgctttttaatacgaaactgctaggtcccagctcaggttcaaaacctagaaccattactcacttgagctagcctcaactagtgaggaacagcattactcaatataaaacaacaattcgattatttgacactgtcccttcaaggacatccgataaaattcagttacaaattcaattacttgacacaaaagaagcatactaatttccagaatctaagactacactagaacgatctcattcctataatattcaaataaaccactggatattaaatttaaagccccaggattcaaaaaatgaaagaaataacattgagtgcaaaacacacacacacacactagcttaaatagagaaaaaagaaaataacaaaagaccaagaccttatgaggttcaatgcccagcaacgtgcccaactcatcgaagcaggaaaaaaaacagctgttaacactatcaatcccatcaaaatgatgtaaaaggacttaaagaacaaaagcattggaagcctaagatgagcaataaagaaaccaaatcactatcataccttatgtttgtgtacagtttgctcgcacttagcaaattatgctcaatcatagcacgatcaaggacagtgaagttgtcaggtaaaatagctttctgttaaagttgataaatgatgccacacaaataaactttctcaacaacataattaaaatgctgcatatgcaagttgcaacaaccagaaagattaaggtacctgatgtgcttttaattcttcagcaaatgcatcaatttcgggttttcttaaaattctttccaagtatacctagcatcccaattatacaacagacagcatttcaaaaagaagcaagagaaacaaagtaaggaagcacaataacagtcaacacaaaatatgatgtgagtaccttttggagaattggataaatctttaattttgagcatctttcatcctacaccaagaatctcaaagtatcagagcaatacaagaacacaagaactgaaaaaacacagtaaatagtatatgtatagtaatcttgagaagcaaattactttgtataaagttgcaagaacacgagaacgttggggtcctgcagcagctagaattgtacatgttacagctgcagatagagcttgttccagtgcttcctcatcaatctctctgaaaaaagaatatttattaaaaatatatcacccatagtgtgtcactaaatcaggctcgaggctcaattgatttactatcaaccagggaaaaataaaagaatttgttaacaattggaaataaataattagattatatttacaagcaacacaaaaacataataagttacatactcttcgcctattttcctcttctcgatttgagaaatgtcatagtaacgcaatgctgcttccaagaacttcctcttcaagtctaaaattctagcatagcatacctggaggaaaaagagggggcaaaggaagaagtaagaacccgtaaaatttgcttgaaatggaaaatttaacaacatcatttcaatggaccttgtattgtaagttcagtacttcttgctgactgttgctaaccaagaatgaggccttattgataaaagcttctgcattaatagcatcatcatcctgcatttcataaaatgcaagcacaacaacagcatactaaaaactttgaaatcccaaaggaaaaggagaagagaactactattcctacactctgcggaagtagagacaatgacccagatatatttctgggagggaaggatagtcatcaactaacgaatagtaacttcaataatttgtgtaataattattctttacatgtacctcaagatacaggcgagctacttggacacattttgatagcctgaacgtatcgtcaatcattctgatgaagacatcaaacaaaattccacatgcttaacattctagaaaactgcgagatactcattttcatgagaataaacaagaaaataaaatagggtcttactctcggacctcattccagaatctagatcaatgccactaagcatatgagctgctttcgaccactgctgttcagattcatacaattccgcaagtttctctcgtatgattagcacctgcagcatttttaaaactcaatagaataaagggttaattatctccagcagtattctgcaaaaacatcaatagtcatctccggaagacaaaatccaaaaccctattaaaggcaaacataaccaaatttctcattctagaacaatgtacattgaaatagcaaccaaacaaataaaaataaatggccaaacggacctgttcctcaaacgaaacaacccgaggctgaatctgcgcaaggatataatgggcaatctctttctgagaatccgtttgcaacccccctaattcttgcgcaaaggtttgaagtagttgccgggaaaccaccaaaggtacatcgtcagataacactgcaatacaattatgaaatcgattagggtaaaactaagcgcctaaaaccgattagacttaggtgcaatagtatggtgaaagcaagtaagttcgagatgttactatggtcaataaacttcttggcctgggttgtatcgttggaagaaattacggatgagagtatgtgtttgtactgctcgatcttttgcctctgatcagaaatggcagacgcattcgcgaaggcgctctccatggttgttcaagttcggcaaaccctaatcttttggggagaaatatcgccaccggctctggcttgtgtggttaagcggaggggagtgtttgaagagaacggctccgccccttctattacacaaatgttggtccctttccctttgtctacgttttaatattaggttaccctatccaaatgagaaatttcatttaatatacttaacaaatctcaattttaaaaagggtaagtaggagtttcgttacaaactttaatatgtaccaaatcatgttcttgaacttttttagacgttaaaaattcctctttaactattgagatagttagatttaaggacttttgtctaatttcattcaattttactatttttgtgattgtttatgtactaaaccatgttcctcagactttaatatttaccaaatcatgcctctcgaactttgacatgtactaaatcatgtcccctgaactttcatcatgttagacttttttttactaaaattggataaaaatccttaaatctaacaatctcaatagttcagtggcatttttaacgaccttaaaagttcagagggcatgatttggtatatatcaaaattcaggaggtaaaaattttaattagccttttaaaaaatatcctcttaaatgttttattcaatgccattatattaacttcctatttcacccaaaatactcttattatttatttattttcaaaacctaaaagaacctaaaaaaaattgtctctctacaaccaaccctaacataatagctgcccctaccttgagcccccttcgcccatgtccgaccccactccgcccacccgtgcaaagaaagaagaacgaaggaccactcttgtccgtccaagattctccgtcgttctccttcgaaaatctttctccatccttcgccgatccttttccttgtacgaaggactcgtccacgccgatctttctccatccacgagaaggtattgttcaaaaaaaagtttgttgttagttatttttttgtggttaatttagagtgattatatattatttgtgttgaaatacacttcgttttgatgattttttcttaatttttgatcggttttatatgttgattatagtgttttccgatctagtgtggtggtgattgaggaaaataaaaatgatgtatgttctcgattatttatcaaaagattcttgataggttatcaataagatttagcttttggtgatagtcattaaggttagctattgtcgacatgttatcgatatgttgtcgacaggttctctattgataatagatgaaaaaaattgtaattttgttttttaattgattctcgcttgaatatcgattgattattgacgagtttgtcgataagggtgacagtcattgtagtggccaaaaattgctctaagcccaacgaaaaggcccaataatcaaagtacttacaaagcctacttataagttagaaataaggaactcgtaagcccaatggttcacatgggtcacgcccaatccatgccttttgggtcatacccatatttgaatatccagtcgacaataaagtttgaccccaaagtgtaatattagggttgacacatggaggtagaaggatgttaagtttcacaattaacccacgaccatagtgatcttccctaacatagcagagcgaaaagatcaacccccaagtgatacgttgatgtgaatacgctcatccggaactaaccaaaaagagaacgctcatccctagaaaagtggaggaagaccgtttctctagggatgaaccacgtctcaagaggtagccgttttcctaagacaataaatagaccctcactgggactgagagggggatcaaatgatatacgaatattcactctctttctatagttttacgactaaacttaccatttttctacggtccgacgttctctttctcattccggtgagtaaggtttgactgttgatcatcgcataaccattggcataggaagtatttatttacacttcttattttcttttttacttcacactgtaagtttactaacttgactatcggagtgccttcgaccggcaccacccggtgtcccaagatttcacggtcattctttgtcttttttctgtaggttgtcggtgcccacaaacgctcattctgatcattgtagattttagc

SEQ ID NO: 294823 - DNA, 5224 bp, Cannabis indica
gagctgggattggaactttacgtagaaagccagattcacgtgtacttggttatgttaagaaattgaatcttagtatatgtagttgagatcatatgagaacatgatgtgagttgactaaaaactcaaatgtcaactcatctttgtttagcccaaatcatatttaacatgaataaatatgacatatatacatacatgtagtacatattacaataaaaatggttaacaaaatttctttgaagtcctcgtgtttaagaaggttttttagctttgcatataattaagatatatgaattgcatttgcatctatagttttgtacctaacttgtatgtggtgttaatgatttttttttcataaatatatgacatagaacaagtctttagatatatatgcttttcttgatattgatatagtaaacttttccaataaatatattttcaataacttgtcaatgtggactgaatgagcttatattgagaagaactaagttacatttataaattaccacaaataaacagtttatttaaccataaataggtcatatatctcatcaaaattgtgtagaaaaagaaaaattggactaatcgaatgagtcattattttttaaagaacaaatgagtcattttcaagtgatccatttgcaataataaatatataaaattatacataattgacgctgtatccgataactatggtgtaattgtacatgaaaaacgatataacacatgatttgggtatgaattatgttgagtgtgatagtcatacaagtcaagaatagaatgaaaaacaacattttaaaaagagaaaagaggaataccctttgagattagcttctttattttttttttcttttgattattattatatttttcccactgtggaaaaatctaaaaattatttatttcttccaatcttaataatttttaaaagacaatatcgttcgattgcatcatgacccatccagcagtatgggccatgtgattcaatagtaaatattacaaaaaaatatttttgatcaaattcctttattttattggctaaagaaaagattttttttaaagggtatttttggaataatgatttgctttacagcggtagtgtggtcgagattatcgtttaaacgagcaaagataacccactctcctactctccactcgtgcattacacgtcccagttaaaatgtttggcaaaagacaaagctggtgtccacgttctgacgtgagagtggcttagtatgttataaccgttgcccacttcagttctccgactcggtcacgattctactcacaaaaagtacgttttggtcgtccgagtttaataaactcggtttgaactcaataaaagttcagttcttttatttaaaaaaattaaaaccgttttccttttctctctcaaactcaaattttcatgggcaccatttctttttgatttgatgtcgtttattaacagtaaaagccataaccacagtcacaggtggtgtttttgatcattattattcttttctctcactaacccaatatttctcttttattaagtctttatagtttatatataaggtggtgatcaaagagagagagaaaaagtatattttattaattattagtttcgccatgaatgctgctttgcttcctccatacccatctgggctctactttttttaaaacttgggcattcatgactttacgaaactgacctaccaagcaaagcagaacagaacaaaaaaaggaaataatactttggccatgaatggttgtagcagtagaagaagtagtaagatattcaaagctttgttctttttaataccaattagtgtcttttacttcttttgtcgccaaaaacgttagtttggttttttctttcacctggagataataacaaggaacacccagattacaaaatttgatcttttgaagctttccaatgtctacgaacccgtcaaagcttgaccttgaaaccatgtcattatctgaggcttttaaaaagtttaaacgttttagactgtttgagccatctttgggtgttctggggttcttttttgtcatagtctgtgtggttttctgcttcttttacttggattcaagaagtttctctaaagggtatcgattctctggccaatcagagcggttcatgtggttgcagagtagagggtccgtagaagaaaatcatagagttgagtttcttgaagaaaaaggtgactcttgtaatgttttcgatggtgattgggtttgggatgaatcatatcctttgtatcattcgaaagattgcccttttttggatgaaggctttcgttgctctgagaatggtcgtcctgattggttttacaccaaatggaggtggcaacccaggaattgcaacttgcccaggttccccttttttctttcctttctttctaagtcaaaattattattgttatttaatttaaggtttctcatgcatgtataaaaactacctaggaagactagaaaaacaaaatagattagttaattgtgttgaaggtttgataattagtgaaactttacatgatcaaacataaattgttgaagttttcaaagaggactgatgatgagtttaataactccactacgtacattcacaccaaacaaaatatttgggttgttggtggagttatggggtgatataattaatggtatccgaataatataaaacataaacttggaaattgtctttgtctgttattggacgaattttccttgcataaccaaaaggataaactttctgggctttttgggttggtgctgatgcattaattattgatgttttggtatatctatatcgattggtgaaagattatttattatttttagttgttttccgagaaagtgataaccattttttttttagtttccatagatgtcataatctgcttctagtgagaatgcaagcagtttagtttttataatttggtgttgttttattctggaaatggttatgcagattaatagctaatatttggttagactttctatacggcagttttttttttgtattgacatgatttgctttgtcctttattttctcactttatgcccgtgaagtttgatggagacatggaaaataattgatccaaaaataagtctttctttcattttaatttttccgtgaacataaaaatgatgttgttctctcctatcactttctttcttgttttccgggctttggtatttcttgtaattttgttattatccgacagtcctatcattttcttgtctgtattgaagattctcacatttctacctaaagttacaacggttgttttttatagttgtaaaaagtactgatacgttggttactgatttgaaaaataaacaggtttaatgctaagttaatgttggaaaaattacgaaataaacggctagttttcgttggcgattccattggaagaaaccaatgggaatcactcctttgcttgctttcttctgcagtacctgataagaactcaatctatgaagtgaacggtaatccaattacaaagcacaagggatacttggtgttcaagtttaggacttttaactgcaccatagagtactacagggctccatttcttatactgcagagccgcccgccttctggctctcacgaaaaaatcaagacaactctgaaattggatcaaatggattggacatcttctaactggagaaatgcagatgttttgatcttcaacacagggcattggtggaactatgggaagaccataagagggtaactttttaatctctttgaatacttgatgtctgatgatttgagcactttagagtgtggctacttcattgtaatgcatatatggtttttgtaagttttggtgaaaggtagctaaaaaacttcataacatttttgttcaggggctgctacttccaagaaggggaagaagtaaagatggaaatgactgtagaagaagcataccacaggtcaatagagactgtggttcattggattgaaaatcaagtaaactcaagcaaaacccaagtcttctttcgtacatatgcgcctgttcatttcaggtttgttccctttcctcgaagtctttctagtaagaaacaattaaacaagtttgctatacctgtctctggggattttagaagctaaatttgcttagataataatgcagaggtggggattggaagaatgggggaaactgtcacttagagacactacctgagctaggatcctcattggtaccatctgaaagttgggttcagttccagataccaaacaatgtattgtcagctcacccaaacatattagaggcaatgaaaatcaacatactgaatgtaactcgaatgacatcaaggagaaaagacgggcattcgtctttatactatcttggtcctgatatgggggcagtgtctctccatcgccaggactgcagccactggtgtctgcctggagtccctgatgcatggaatgaacttctctatgccttattcttgaagcgtgagacacctggttcatggaacttaacaacaattaagaagggtgaaatttgagatttgaagaaagcttctcatttatattgtacagcatacaacaaaagtagaaaccactatgttgaagaggcaatctttctagagatgtcttggaaaggaaagaaagaaagaaagaaataccaaagtaaatggtagataagaagaattttgctaagagcttttcattttcagtggtgaagcaggtctcaaattttggtgccaaaggtagttaaaccaacatgttcatagaattttataccaaattttagagaagctggggagattattatgatttaaattatgaatatactgtagagaagagggtttttttttcttggagaaatggggtaattttgttattattatactagttagtttgattctattggagggaaactaggaaactatatgtaattagcaaagttgtatttgaacatttcattcaattttaacgacgaagttaaaaataataacctttgagtctcatcaaaatattcttcctttttcctgcaaaaactattagataaatgccaaatttacaccagctccctttgtgttgttttgaagttgaattttggtgaagggagaagaaaaagaaaaatatagaaaaaaaaaatgtgaagaaacaaaaattatgtggacttttttttcaatccagttattgcaaacatgataatttttttatttattttctacacgttttttccaacttccaaacattttctttttgtgtactaaatat

SEQ ID NO: 294824 - DNA, 1886 bp, Cannabis indica
tgcgtggatatggtcctctcactttgtttgagatcaaattcttggcaaacaactggagatcagatatgtcttatatatggataaaactgcagatataaccaaagcagttagtatacagtagcttaatttccttgtattattttcattataagcaaagagttggttgagtcagaagttcagttaattcactttgaacttctgagactatttcgtaaaattcttcttctcattttccaatctactctgcactgctataggcataaaggatttgcctcttaaaaatattaatcaatctattttccttttcaaaaaggaagtcaatccaaaataaaataaaccagtttaggtaaatggatgaaatatcatttttttttgttttctaattcagcttatttagcttgatttaaggctaagtttggactcgacatcatttccttgtcttgatttgaccctaagccaaaccaagccaagcttaattcaaccgttgctaacaagtccacctcaaccctggtctctgagactgaacaatttaattctttaatcatgaagaagaagagaacgaaggcaactgccacgcggatatgaacaaagagagaaacaagataatatgccttcgttgactctctccttgtctcttttctctcaacatatactccatactaattttattctattctaatttccaagtatattcttaagttaattcattaacaattccttaccaactattcaaacctcatttcatcatcgaaacctacctgttctcctacacattttcttaattaattaaattatcatatatatgtaaatttctaacaacgttgtgatcattatcaccaaaagaagatatccgaatatgagacaagaaacgggaaaactcaccgaccaatacgatatctcggaggtattaggccgaggaggattctcagttgtaagaaaaggaacaagaaaatcatcaccatcaaaaggtactgatgatcaagtcaaaaaacgacacgtggcaatcaaaacactgagaagggttgggggtggaattggaagcaataccgtagtttcaagcagagtcggtgctaataaactgcagagttcgacgatgacctccggcgccgtgtcggacgcacttcttacgaacgagatcttggtgatgaggaggatcgtggagagcgtatcgccgcatgagaacgtgatcgatctctacgacgtgttcgaggactctcggatcggcgccgttcacctggttctcgagctctgctctggaggagagctcttcgacagtattgtccgccaggagaccgtctattcggaggtggacgccgccgccgtagtcaggcagatcgcggcgggtctagcggcgctccaccgggcgaacattgtgcatcgagatctgaagccggagaactgcctgttcctggatgagagtcctaattcgccattgaagataatggattttgggttgagctcggttgaggaatttacggaccctgttgtggggctgtttggctcgattgattacgtctcaccggaagctctttctcaggggaatattactcctaagactgatatgtggtctcttggtgtcatcttgtatattctgctttctgggtaagtacgttcgttctcatactaatatgaaaattctatgggtaacgagttactagtacgtttcacatgcagatagttataatttcaaattctacttgtagagtggagttatttaattggaattattcacaaatattcaaatatcacaaaaagttttaagaaaataatgatttctaatatttttaattttattacgaaattctctagaaaagaatttttattttcacaatagtacttttggtaacacttttattttaaattttttaatcacaacaataaaagta

SEQ ID NO: 294825 - DNA, 5207 bp, Cannabis indica
tcttcaatgggatcacttccataagcagagagcctttgtccacttgtcataggagatgcattttcgcctcacagagaagatctctaatgtatttagtttgagttagcattatcccttggtcagtgtacaacacttcaataccaaggaagtagtctaacaatcctaaatcctttagagaaaactcattatggagctgagttatatgggatttgatagtagattgatcacttctagtgatcaatatatcatcaacatagaccaagatgatgattattgaatttggtgtgtgttgaatgaacattgaatgatctgccttggatgacacaaatccaagtttggtcagacactgttgcagcctctcaaaccaagctttgggagcttgctttaatccataaagagccttgtgaagcttgcaaacaagatgaggtgttgtgggatcttcaaaccaaggtggttgtagcatataaacttcttcttgaaggttgccatttaaaagggcattgttcacatctagttgtctcacacaccatcctttgcttagggcaagagttaatacaaatcttattgtaactggtttaacaactggactaaatgtctcggtgaaatcaaaactaggttgttggtgaaagcccttagcaacaagccttgctttgaacttgttcacagaaccatcaacattttctttgattctacacacccatttgcaccctatagcttgtctcccaggaggcaacttaacaagagtgtaggtcttgtttttcttcaaagccatcatttcttcagacataccattgttccaatgtccgtacaataaggcatgttgaatggactgaggaagtttggacacaatgaaagtctttggcttgtaaattcctgacttggatcgatttttcatgttgtgtttaggttgctgagccagagatgaagcaacatttgtgatgcaaacaggctattgttgcctcagattagtagcaatatcatgtgcactatgagttgagacagaacctggtacacgtatctcaatatcattaggtgttgaagcaccagtagcagcagcatgagcaggtgcagaagctggagtaacattaacagtagtaggaatagtagcagaagcaggtgttaatgctgagacatgacctgcaacctggtcaccaaaaaaatgttgttgtatatcagcagttcagtcaatgtaagaacataagggatcgacatggcattcttgagaaccacgtgtaattgggattgatggcacatacatggttaccgcagtgggaatgtgtgctgagggcaagcaggtaggaattgacagattttgtgaattttgagacttagacactttagcataaggaaattgatgttcatcaaagattacatctcttaagatatatagcctaccatttgaacctagagacttgtaacctttgtgattaagactatacccaagaaaggtacaacgagttgacctaaattggagtttgtgcttgttatagggtcttatgttaggatagcaaaccagttgtaatctggtttaatgttgaacataacttctattggaggtttgtcgcctaataaaggtgaaggaagtctgttatgaaggtaaaccaaggttctaaaagcctcatcctagaatttaaatggtaggtgtgcttgagcaagcaaagctaaaccattttcaacaatgtgttatgctttctctcatcaatcccattttgctcatgtgtagttggacatggatggatgtgagtgactcccatttcctgtaaatggctggtaaatgacctatactaccctccccagtcggtttgaagacattttaacttgaagcgaagatgcaactcagcttcatttttgaagtttaaaaatactttcaaagcttcagatttatttttcaacagatatatccaagtgaatcgggaatatacatcaacaaagtggacataatatttatatccattgaaagaatctatatgcgagggtccccataagtccgatacaacaagttgtaaaggctcagtgtaaactgtttgagatgccttaggaaagggcagcttgtggatttttcctaagcaagaggcttcacaaacagaattggattctttattgattgagatattacaagattgtagcacagactttacaattttcttggatggatggtcaagcctattatgccaaacatcaaaaactataaaattattggaattatgactacaacttgtacaattattggcagctatgaattcacttgaactcggttgagaagacaccataagggagttaacattggactgaggtctgaatctagactgagagggttgaacttgaggagatgactgcagctgaatgtcctcaaattcaaatgaatacaggccagtcttgtgtttccccatgagaagagtagcatgtgtcacctgatctttcacaagacaacagttagaatgaaactaaaaaatacacaccattatcttcagcaaatttagatacactaacaagattcttagtgatagtaggaacatgcaacagatttttaagaagtaaaggttgagaatgacaagatttttaagaaatgaaagtgtgaccaatgtgtttgataggccgaactgtgccatcaccaacatacatgcgttcagggccattgtagtcactgctgttcatgatgttttgagcatctggagtgcagtgattggttgctcctgaattggggtaccagttgttgtcttaagtttgattagcagcagcaatattagcttgtgcagtatgtggtgttgctgttgagctagatgtaggagagtgactaaaagatttatcaaaactgtagtaacaatcctaagcaatatgaccaattctgaagcagctttgacattgaggtttattactcgatggagaaaatcttcctcttgaaaaactagctccacctcctcttgatacacttccaaaagcacgatcattagagtaaaaggagttacttgaagaaaagttaggactgttaccttgagaaaaattgtttctattgaagtttccattgtaattccctctttgaggatgaaattgattgtgattcccttgctgactttgtctgaagttcctgttactggtgtaattagcttcaggatgaacatcagcctcatttgtaacgacataagaactgacatccaatttagtgtcaatcttctcaattcttgactcagaggcaagaagcatagcctcgatctcagctacagagtagccttcgatccttgtgttgacaaaaatcacaaaggtatcatatatgctaggcagtcctttgaaaatagctccaatatgatctcgtactgatagaacttccccaaccgaagctaacagatctatatgttgtttgattcgaagaaggtactcattcagtccaagatttcctttcttgatgttctgaagcttggttctgaactcaaatatcttggctgagacttgaagtgtaaagtatttttccagtgttcactagatctgaccagctgattcgcatcccaccatgtgagttagcaagctttcagacatagatgagagaagccaggacacaagcaattggtcttgaacgtcccactcaacgtaagctggattcagattgttcgaggcttgatctacatcagacagaaatttaagtggaggagcagctccttgaataaagtgccgtaaacaatttcctctaatagctgccataacttgttgcttccacagcagaaagttgtggtcattgagtttctcaaaaagaatatgattaaagaacacagtagacgattcatttgattccttcccgctgccattggcagctccaggatcggttgagtgttgatgttgattgctcgagttgctggtaatgacattcgccattaatggtggaaattgctctgatacaatgttgaaattcctccttgacattactgcaaaagataaccaagaaaaggataaacagaacaaagatcaagaacgaaagaaaagagagaagagagggaagagaaagattgaatcagagaaagagattgattcattgattagctctaaaaatagagaaagaatttatacaatgctaagacaatgaaagattagttacaacaaccaattgacagctcataaccagaacaactttataatagaaaataacaaactagctgacagcagtgcaaactaacataactaatttttaactgtcttaacaattatcaatccaaatttttatatgccagtgattcaaactttgttatttttagttagttagtttatactgttaactaactaacttattcgttgagtgttctttcaatgtattgattagaaggtttttatcttctttatgcatgtataaactgttttgtaatcctcttcattaataaataaatatagaatactttttctttcaattcttctctatctgtttttgtcccaaaaccttacaagttatcagagcattctctttcgttcatcaatgaagattcctcatacctctataagttgagcatcaagattgaacaatgcagagacagagaacaatcaccaagccttactgccaaaatcctaccctgtttcatttacttattgtatctcaattaaactcgatgaatacaattatctcctatgtcaacacaagttcttgcctcgaataaaggcaatcgacttcaaaaatacgtcgatcctgacagagctccaccaaagtacgtcagtgttgcagatgaaagatctcacacttttaaccctgaattcaaagactgggaacaacaagacaatctcctaatttctttacttctattgtccatgtctgagaagaccacaaatcgaatgataggctctgacaccactgcttagatttggcacgctctcaatgagtactatacaactcttaatgcaacaaatatagtaatatacaagatccacctttgaaacaccaagatgacaagttctctcaatgactatctactcgagattaaaggcattgttgatcttcttgccacgattggtcacaaaaagatacctcaaaactacaaactgcacttttggtgtcagttttaaactagcacttgtaccgttagtggcaattgatagaattgacacctattccacagtgacaaaaattcagattttaagtgtcttttataaactgagacaaatgagttttggtgtcattttaaaatcgacacttaaagtatacataaatgttttttttctttagtgtcggttta

SEQ ID NO: 294826 - DNA, 5573 bp, Cannabis indica
catacttgtgagtagatctaaatccccctaaaataatttccaacaggcattggagtaaggtggatatgacaaaggccattttctgtttccaagcttttggacttcccaccccctatctcaatcctatcaacacttccagggtggcagcaaaagcaggggtctatgttggatgtgatacagtggatagaaagttgcttatccgaaggggcttcttcaagtttcaggtttaaatttcaacggcccatcaactgtactcaggcttctaccttgacattcgaagaggcagaaaggaatggatacaatttcagtacttcaaactccttaaactgtgttataactgtgggcacctaggtcatgataagaaaagctgcttcaggtcgacggtgtatgtctatccgccagaagggaaggcggttcttgcttttggtccgtggatgaaggcaaaaacggcggtctacagctatttcaacatcagaaatcagttaaattattttcgtgaagaatccattggtcaaagacctagaagccaggggaacaccttgaaaccagtggatctcaagaataaaggaaagcagccaatgaccagcataggaagccagaatgttttacgtcctaagcttgttgtcaagactacaaagaaggctatcagagttcctcaggaacatccagggtccaattcaggtaagaaattggaactggtgaaaaggaaaactgtggtggtagcagataaacaaagtgtcgagtctatctcaaaggaagcaagccctaaggctctatttatggacagacgtgctcgatcagcttctcctcgattatggggcaatcgttctcaaggcaatgtaacagttgtcaatgagaatgatattataaaaaacttttcccaaagacttgttcctacccttgctgatgcaagggtcattactactataatgatattggccccattacaatcagatcatagaaggcccacatgttgacttatgcaagtctagacagccccacaagcatcctgaagttacccactttccttggcccacatatgcataagatattggattagcagaagagcttatgggccctgtgcaagtggataagtttgaacccagcccaaccttattccatgacccattagatgtgacggatgagatccacccatgtccacaacccaggaaaaggaaagccagcttacatctaattccttatatccccagaaccagtgagaataccagagaatttgatcaagcgatacctgatctaccagcaatcgatgtcgacaaaagtactgcttgtttcaaaatgggttcgggagcctcttcatcaacaaccaagaaggataaacgtaggaagaagggatcctccactcgtacgacccgtagtaagtcaaaattgatagagaacttttctctctctggagatacggtaagaaacttggaagactctttgaatttgatcgaggttcatgtcgattgtgtccaaaattttcaacaaaattttcaaatgggcgaggaggcggcccttatcaagccccctccttcccaatgaaaatcctatcgtggaactgccggggcttattacaagaaccggcaacccaagcacagggaaagaaaatacaggcctgactgtatttttcttattgaaacaaaagtggataacgatagaatggaaggggttgctaggatgttaggatactcgggcatcactagtttctcttcctatggaattgctagtggtgtttgttcaatgtggaagcatgttgttaaatttcaagttttgaagattgatagtaatgttattgaagtgcctgtttgggaagctaggaaagatgtcatatggagattctttggtgtgtatggcactccctatgacatagagaaagagaacttctggaaaaaattggaaatcagggtgctagattgtcaaggttcctggctcgtgatgggagatctcaatgccattcttagtccagaagagaagagtgggggtaataaagcttcgacaagagacttcagatggttatcagattttctccagagtactgggggcattgatgtgggctgtagaggaggaaagtttacatggcaaaataagagattcaagggaggtctaatccgagaaaggctggatcacgcgataggttcctatgattggattagtctctttccaaaagcttgtgtcaccaaccttcccattatctcatctgatcacgctcccatcatccttgattccaagggtgaaaactcaaagggattcaaaccttttcgtttctacgaagcttggtgtaagaaaagatcctgtgggactgcagtggaaagagtgtggaaggataacactcagctgggggtaacaaattgcattcgcaatctatctcggaccaggaaagatttacaacaatggagaaagaaagattttgggatcagcgaacagaatatcaagaatttggaaaatcgaataaattggatacaacaacaaaatatttccaatgatttgtgtgaggaagaatgtagactgcaagcaaaactagcagaagaatacagtcgtctcgagaatcagtggcgtcagaaatcaagggaagtttggctcaagctgggtgatagaaattctaaattcttccatctgtcaattatgtttagaagaagaagaaaccatggacaattaaagacaatcagggaaacagttgggaggatatgagacgcatctcaggtatctttaacgaatattttattgatcttttcaaatctgatgagtcgaatatccctttgtgtctggattcgttgtttgacaaaaaagtggatgagggtgataatctcaaactcactgctattccatcgaaggaggaagttagaaatacagtctacatgatgcatcccctaaaagcactagggccagatgggttttctgactgttttttttttttgacattactgggatgctgttggaagttcactctgctatgcggtccaagagttccttgtcactggggagatgaataagtttctaaactatacctacatttgcctcatccccaacagagaactccctgacaaagtggatcattttaggcctatcagtctttgcaattttatctacaaaataattgcaaagattcttgcacaccgtctctcccctctcatggatgggctgattactccacttcaatcagcttttattgcggggaggtggatagcggagtcttcgattctcactcaggaattggttcacaagatcaaaagaaagaaaggcaatggaggtcagatggcattaaagttggatatgcataaagcttatgatcggatggagtgggctcttcttttaagagttcttattgctaatggttttaatgaaaaaagttgtaagctcctgatggcctgtgtcacttcagtctcttactccattctgcttaatgggagtcctcataagaaattttttccgagaagggggttgagacaaggggatcccttatctcctttcctctccctcctttgccaggaagtgctgtcaaaactaattttgaaaggtgaaagtaatggagacattcacggggttcaaattgctaggacgactcctcctatatcccatctaatgttcgcggatgacactattttgttcttaagggcaaacgagaaggaagctactaacatctctgaaattctctctacctacgagagatggtctggttagaaatgtagtagagcaaaatcgagttttctcttttctaacaatctgaatcaccaaagaagaactgatattctgaagcttctccaggtccaccaggcttcgagggaggaaaaacatttacgaaatcctttcattttcaagagaaagagaaggaagtctatgagaatttaagagaaaggatgaaacaaaaactagaagggtggaaaatgaaacttctatcttttgctggtagaactactttggttaattcagtagtagcagctatgccagtatatgcaatgtcaacaaataaaatccctcttttagttagtcgatctttagatgctttggctaggaaattttggtggctggggaatgtggaaaaggaaagatttctggcactaaaatcttgggacactatctgttagccaaaacaatcaggtggattgggtttcagaagatttgaagatatgaatcgggctttactctcaaaactagcgtggagtttggctcaacaagaaaagaagccttgggtgaattgcttgcttctaaaatactgcaggaatcaatcattctggacagtccaacagaaaaacggagattcggctttgtcgaaaaacattctggatactcgaaacgtagtggcgaagggatcctgttggttaatctcttatggtagatcagtggacctgtggaatcaaccatggatcccatggatgcagtttggagagtttaaagacctaatgactactatttctactcattttcctagtttaaacacagttgcagatatctctttgggggataagtggaatgaggatttggtcatcaatgtttttggtaatgacttggggaaaagaatattcgatattcctaggcttccatattcttctcaagatagtattgtttggaagtgtaatggaaatgggaatttctctgtcaaatcggcataccatttggaccaggaacatcgattcaataataggagagaaatctggagatggacttggaacccgggtattcatccccgtttcgccatcatgttatggcgggtgatcagtgattgtatccccactaaggataaactgcatttcttgctagagaaggactgcctgctatgtgacgttgaagtggaatctagtgtgaatatctttaaagattgtcctctagtgcgggccatctggtttacgggtccgtacccctgcctctcatctcaaattcctggcaatgatatgctcaacttcttggaaaatctggtaaaagatctccccaaaagtaccagaattgaagctctaaaggtagcaggctgcatattcagcgaagtttggtttgcgagaaattcgaacaggacaaaagaaaaattaatggacagcaatgagatacttgcccgtgtccatcacaagttcaaagaattctcccctaatctgcaggatacgattggtgcagctcagagtagtaccaccttctcagggcctaccaaccaagtttttccaaacaattatatgattactgatgcttcttggtctcagaatgtggctgggttggcaaccctctccatcaataggtctgaagcaaattgggaagtgaaaacaattaaggagaaggccatttctcctatggatgctaaaattcaagcaattttgatggctattacatgggcgaaagatcaaggctgggaggatatcaccattttttctgatgctcaagtagtagttaatgctttgaataactctttgtgtcctccggattggagaagtagggggtttccctcatggttttagacttgttaaagtcgttttctagttgtagctttatctacattagtaggaatgctatgtcttttgttgatgatttagcgaaaagagttaggagatctagccagggtgctaaacactttcaaggggagggtgcaccccctg

SEQ ID NO: 294827 - DNA, 5422 bp, Cannabis indica
aaaaagctgttttttgactgttgccaagcacatttttttcatagctttttcaaaaagcagcttttagcttttccaaaagctgtgccaaacgggcccaaagtgtggttgcaaggagtagtgcaaaagaagaatataaagctatggctaacatagtatgtgaggttttgtggataaatggtgtgctcaaggagctgaagttacaagtttgtatgcctatgaagttgttttgcgacaacaaggctgccataagtattgcacataatcctgttcaacacgaccggaccaaacatatagaagttgatcgacactttataaaagagaatctagaagcagaagtaatttgtataccgtttataaagtatgaagatcaaactacagacattcttacaaaaggattatttaaacctacttttgatttacttgcatacaagttgggtatgtttgatatttacataccaacttgagggggagtgtgaattaacgtgtaaaatatcaactaggtcagtcataagttgttaacatagagttaggagttagtttctatttttatgggtgtgatattatgtaatttgttactgatgtattttattaaaaagccaattggcacatgagtgaaagataattacttttttttccctaaaactacaaaaggcaacagagggggatgtttctcgagtacaaaaattggttggggaggttgaaaatgcctctagaaagtggtaaagtttttgctaagtcgtcagtattttttagtaacaatacctctgttcaagatagagctcatattgtttctttgatgggaattattgaagctggtgaaaataacaagtatatgtggttgcctagtactctctcaaggaataaaaatatagtatttggatatctcaaggatagagtgaaaaagaaaattcaaagttgggatggtaagcttttatcacgttctggtaaagagatccttattgaagcagttgttcaaactctcccaacttatgccatgaatgtatcctaattgccaaataatatgtgtaaagatattaattaagaggtgcacgagtaaattttggtggcaccctcaatcttctaaaaaaaaaagattcattaaagttggaagaatttgagtcaacataaagaaaattgtggtatgggatttaaggatctcgtgactttaatttggctttacttggtaagcaagggtggttgctactggctaaagaagacagtttggtggacagaattttcaaagcaagatactttccaagaggttcttttctttctacagatttgggctcaaatccaagcttcattttgaggagtgtgttggccttgcaagagttgattaagtagggcattcgaagaagagtaggatcgggtactagcatttatattctaaaggatccttgacttattcatgagtctaatccttttatttcctcaattgacccatctcttgtaaatgcaaaagtgagctctcttatgaaattagtctcatgagtgggataaggaggtactgacagatgttttgaatgcaagagataataatttggtctggagcatcctattgagtgcaggcattgatcacgattcatggtactagtgtaaagagaaatatgatttttcttctataaaaagcgcgtatcagctcctccaggacaccagattgtaactcaatgttttggcgtgctctttggcgcaattaaaaattccacctaacgtcaagaacttcctgtggcaggcgtgttctagttgtctccttactagaacacagatgagagtgaaacatgttcaagtggctatttgctatccctagtgtgatgatgaggctaaatcatttatgaaccttttaatttcatgttttgtggctcaggatttttggagcataactggtgttgcagcaatagcaggtaatcacaccatgtttgctgcttagttgcatgaaggtctatcttgttggtcagttgcggtcaagatcaaggtgggtatgctgtgttggtccctttggaacttggaagcatagaaatgagagagtttggaataataaatcaccaccgttggtgagattgtgtcattatctagactcaaatttgagaactggagtaatgctcataaaaagtttcagatgccttctccgtataattaagcgagagaggtaattgagcattggaccacacttatgtttcctaatctcaaaagaatgttgatggtgctatttttcaagcagatggtcgatttggttttggtttggtgatcaaggactccatgagtttggttcttaaagctattcaatgaagtcatcctggtgttgcttattctcctttggttgaagctctgtgactcaaagaggatttgagttggatttaaaagaaagggtagattgatgtggtgcttgaaactaattactgtaatcttgtgaatgatttaaagtctaataaacctatggtttctccatatggtgttgtagtttagagttgtaagacgatcttgttagaactttcttttgtttcaatttgctttgtaaaacgacctacgaataggataccacacgctttcacttgatcttctgttcatgttgcttctatttttagtgaagattctttacccactaaaatttcatccttagttagggatgatttgatttaaattttctttcaaaaaataaaataaaataaaaattataacttaatttggaaaatttagatatatgcctattatattagaagtttgatgagttaattaagaaatttatactttatgaatagcaggcaaattgcatttttgccatacaataacgcgtgttgttggactagtccataatcgattatgcctctcacaacttacgaatagtgatttttatttatttatttattgaagatttataaatactaatcatgagactttaactcattaatgtctcagactagtccttgaaacacgaaagaacaatgaaatcatcaactatttcactgataaaacggagtgagtatttagtgtcaacaatcatgtaaatgaaaatacaagagagaacaacaagcagtatccaatgatgggggatgccagccatgttttggtttattttgcaccacaaaaaatttggacaaaaactatgaaaaaaaagaaaaacaaggctcatggttgagacccaaaactttcttcgtaagaaaaatactactgggctgagctcacttgttgcctaactcttcgagcacagtctgcgaaattccgaacaagatcagcacatttcagagggtctttgatatgttctttgtagcatgctaagcaagcttcattctctgctacacaaggcaaaggcttctggtaaggaagcttgaactctttatcacggagatcttttgctctttgtgttacttcctgcaccatgttatcttcctgcttttgcaacctctccacaaccctttcgctctcttgaaggacagatcggattgcatccaactctgcactagaagagtatgcagtagggggtactggcaaaaaaattgggggctgaagtggccatcctgaagcggttgatcccttgtgtgtttcaaagccatcggaaacttgcttctcctttgctttcgtttgaggttgttgttgaggcactcgagacttagttctagtttttttagtcttcttcttcgatttatcttcttcattgccagcaaggctattcaccaggttgcggctaatctggatactaaactcacccatgatttcacaacttcctgataaaatacctaaatgcattaacagaagtaaaacagaaagacaaatttctctcaacataacctccatatatttctcctttctgctataacgcctaaacttgttgcatagcaataaatctccaaatctccatttcgaaaacaagaaattttcatgaagttcattcacttctttattctaaaacagaaaatctatatgaagatgggatgcaatttatgtaaagataaagatgtaagaaaagaaaaagaatcaagttaaccagtcatggatatggtaactacagagttcataattggatcgaaaattcaaagcaacagaagcataggtaccaaaaataataattttcaatctttaagtcatggtggtaatgccatagcagtatcaggcacgcaatgccaaacaatgatgaaagaactggaaaaaaagttcagtcatgggtgcaagagcatcacaatcagaaaaaaatgaagaataacatatttgaacaaaatgaaagaagggttttcgcctatccccaaattcccaaatcaattgaaactcacaaacccttaatttaacaagcgctgccaaatactagcctccatttcactagcagcatgcccaatcaacaaactaattgttataatccgagcaaaaatttcatggaaacctaatcggctgaggtaaaagaaaatcaacacttgttttaccattcgatcaagttcaactacattcaaattatttataactcataaatcgaagattattcaatgctttcgccgtaatacacacatgcaaatatagaaatgagatgtacctggaagaaggtagattaaaccagaaagattcttggggacgatgaacaaaatagcgtctgaagactccgaactctgaactccccaaatgaaccgaatgcgaaagaaattttttattccagttataccctcctacaaatggagaattacaaattggactaactagcaaatagtgggcaaaattggactaattagcctcctaaggagaagtttggtttcaaaccccgcttcaaataggagaagtaggccatgctaatgtgtcttagatgatccacatctcaggatcaggcgctgatgagcacattgaactatccatgtggcttagagccctcacatcccagcccaggcacaatgacgcaattattaggggcgcgctctaccactgagctaatagcccgtcgtgcgggcctcccgctgggggcccactatgccaaaagcgagcgaaactccatgagaaaattacactctataacctttttatattgtcctcttttatttttactctcttttttaaagtctatcatttttacctcttttttaaacattctaccaattctgtccctatcacttcaagatactctccatgtgactctcttatgtcagagtattttgggtacaatacatataaaaagagatatgtttcaattaaatataaaattagagataaatttggttaattgattaataaaaatggtatttttcaacttaccccaaaccccatcccttgaactctatagattttgataaattggtcaaagtttaatctttagtaaattaatcactaaacttttactttctttttaacattaaggcgtttggttgggaagaatgaaaatataagaatgggaatgggaatgggaataggaataggaatggaataaaatttaaaatgcataaaaaaaaattga

SEQ ID NO: 294828 - DNA, 5399 bp, Cannabis indica
tttaatttttattttatttattccaggttcttcttgggctgcggttttgggaacgaggaaggaccttagtttacccgcagacttgtaccttgaaggcacagatcagcatcgtggatggttccaaagttctttattaacaagcattgctacaaaaggtagaagctgaacatattatttattaataatgttctctgtcctcgtttacaagcaaagatatcatttgtactaataatcacttgggagttgggatatttcattgatgttgagtcaaaagacaggttacatttcaataaatactatcattttattttattttttccatgaaaagaaaaatgaatacccttttcatgtttctgttttacctaagatttagatgcagagaatatttccaggtttgatcatctggaaaaagatgactgctgctttgtattctatagcctcttgtttaggtagccaaggggcgagttgcaaagcaatctaatttcaatttgtatatggaatcctgcgtttcattctatgcagccttaaatttctccccccctgaaagataaaatgtggtgagacactgcatgagtctttttcttttgtgtgtgcaggaaaggctccatattctagtgttataacacacgggtttgtattggatgagagaggtctgaaaatgagcaaatctttgggaaatgttgtagacccacaaagtgtgattgaaggagggaaaaaccagaaggttcttcaatgttaaatattctaagacattccacttcagaatcttacccatgccctagaacaatttgcgagtgagtgtattgctaaatggtctgtttctctgctggcaggaagcacctggttatggagctgatgtattacgactctgggtttccagtgtagattatactagcgatgtactggttggtcctcaagttctccgccaaatgtctgacatttatcggaagctgcgaggaacattgagataccttttgggaaatctgcatgattggcaagtatgttttagagattgagcttagtgttccccaaattcgaatttacattatgaacttctaaaatgtttcaccctttaaaaaggcctacctctctctttttctcccaaatatttatgcgacatcattgtagaaatcagttacatcttatttgttgcttataaatatgccctattttcaggctgataatgctgttccgtatcacgatcttcccatgattgatcagcatgctctatttcagcttgaaaatgttgtaaagaacattagagagagctatgaaaactatcagttctttaagatctttcaggtaaaaaataatataatattgttgatttctgttataatgatatgtgaggaatataaatgtgggatataactttacatttggttttttcgctcaaaattctgaaatttaaacttagactcgcaatgccttaaattttatttgaggaaagagtgaatagaagctttaatctatgtttcttttataaataaatgaaagaacacaaaaaaggagtaattaactgttgcatgttcattagagatgggggaaggaaagaaacaagcagggattatgtatttagtgatctacttatgatcctaagcagattgaatcttgtaaggaagaataaattaattatgaaattgttaagtttcttttgattcttatagtaaagctttgctcaccttagtaggaaagccatcacatttaactaattgcttttcttctttattcaattctgagtagtatgttttgtcttgtttccaggtcatacaacgatttgtcattgttgacctatcaaatttctattttgatgttgcaaaagatcggctttatgtcgggtaaatcttcttagttctatcttcaagtttgtaacagatcagttcatttcagatttttaatgatcaccgtgatttgccaatgcaaagattgatcttccgggaacttgttatttttctttttcactaacagtgctaatatctgcaaaataacaagaatattagcttttacgctagcaggtgctaaacgtatatatcaagtgtgcttgttttaatctatggatgtatcgtgtaatagagagtatgataatgcaggggtacaacaagcttcacaaggagaagctgtcaaacagttcttgttgcgcatcttttctccattgtaaaagtgatagctcccatattgccacatttggctgaagatgtctggcagaatctccccttccagtatactaaagaagatggaactgttgctgaatttgtttttgaatcaggatggccagctcggaatcaaacatggctttctttccctattgaagaggttgaattctggggaaaggttctcgaggtaacaagacaagcggatctaactctttttaaagccacatgtgatgcatattcctatttcgttagaaaatatttgtggagaaatcataataacgcttgcttcataacatttttgcctttgttaaatcgttatttttgttggttcaatcaagcgttatttctagtggaaaagtgaaacctgttataatagggtgtcgtagccgttctttctttcttttttttttttccccttttgcggcaattgcttatggatcatctcacatgcttattacctgtgaaatcaaattaggagatttagagtatggcttattctttccttgtttatgtaatttgaccagttgcggactgaggtgaatagagtcctagaggttgctcgtactgaaaagttgattggctccagtttggaagccaaagtttatctgtatacttctgatgctagcttggcctctagattgcgtgaaatgtgcgaatcccaaaatgatgcagacacattgcatcgcatattcataacatctcaggtatttctcactcttttttaatttctgtccaaacacaaattagaattatctaaaaatgctcaacaaatgtgctactagtgacagtatgtagtattcactactagtcacacttgtctttttcataaaattgcttttgaagtcaaacgaataagaaaatcccaatttgataagaacaaataaaatcattgctacttttggtttaaatttaaaatgacctatgcaggctgaaatccttcctgcaatggaaaaagaagtgattgaaaatattccacacaatggagaatacttgattgaagggacaactaaaatatggatcggcgtgtctcgggctgagggaagcaagtgtgaaaggtgctggaatttttcacctcaagttggttctttttcagagcatccgactctttgcagccgttgttacaatgtggtaagtgttaaacaatctccagctatagcaatggccacttgagatttattatgtaagatgagctgaggatctaatttctcaacagagccaaaaggtaaatttgataaatatttatatatatatatatatattatattcattatgtggagtaacatatatggccacatgaagtactacaacttgtgtttcatacaactcaattttgtaaggtccatttattttttaatctttggcaataataagcgctatagaagcctcttttacagcacaatctaatgcacaggatgattctagttttgatgtattgtgtatgtaaaagttaaagagaaagtagaaaaaagtgatgttttaataatgtattttgaagaaaatttattaagatttttgcttcctaaattttgacatgtaccaaatcatgttccttgaacttttaaggtcgttaaaaatgccctatgaactattgaaattgttggattttaaggactattgtctaatttcatttcaattttactattttagtgattgtttatgcattaaattatgttctccagactttaatatttatcaaatcctgccccttgaactttgataagtattaaatcatactctttgaacttttatctatgttagatttttttactaaaattggacaaaagtctttaaatctaacaatttcaatagtttggcgggtatttttaacgaccttaaaagttcaagggacatgattgtttattaaataacaaagaatatattcaatatactatgtttgattttttttttattaaattaaataatatggttataaatttaaatgcaatacgatcatattatttaatgtataaaaatgatattaacttgtcaatatcaaagtttaggagcacgattaggagaatgatttggtacgtgttaaagtttggagagcacaatttggtaaatatcaaagtttaagagcacgattctgtaaatggacaattgtcacgttaccaaacttgaatagaatttgacaaaaattttagaatccaacaatcttaacagtttgacgtaaatttttaacggcttgaaaagtttgagggtataatttagttatgtaaaagttctgaaaacaaaaattctaattagtattttaataacatattttaaagttgattcgatttatataacattttgaggcaattttttttttttttaatataataataaaatgaatttagttgaaatatttggcataattattaaaagattatataaataataggtaatagtaaaaccgtttaataaaatactaaaaaattaagagaatttttaaaattaaaattacttctattaatttacttgttaataacaaacaattttaaaactattaatgtgaagaaaaaaaaacttataaataaataaatttttgtccaactaaataaatatagtagaggtccaaccttaaaacaaaaactaaataataatataaacttaaatttaaaagaagaaaaaaaaaaaacaactataaacactaatatttggtggcggtgggatcttcaaccgaataatttataagttttggctgacataattatggttcttagagctccaattggtgctaacaccatcaatgttactcccaatactatgcaaatctgaagaaaaaaaaaacatataaaaataaagaatatttaaatcaaataacataagcaaattaaacaaagaacaaattaagcaataaagtaaaataatatatatgtatgtaaaaagttgagaagaaggtataataatgtacccaatttgcagtccaagataagctgtactttcttggtttgtagattgagagccacataatacatggaagctgaaaaaaaaaaataaagaaagaaattagaaaaaaaaaaaaaactctaagttattattatttatgattttgaaaattaattttaaatttcttacaaagtaggttgtgggagcaaaaacaaatcctccaaagaatccaagaaggccaccgaaaaatggtacagccatagctaccaccatagttattactgcaaaaacagtaattatattattgttaatataattagtaataactctatagaaatttatataataaaaaatttaaaaaaaaacacaaaataa

SEQ ID NO: 294829 - DNA, 2153 bp, Cannabis indica
ctttgctaatcaactcatctgttgttgtttaagattcatgaatcgattatcaaaatatacgaagtacagaatcgagtacaatctttttttgcagataaatttgtttggaattttattttactaattaattagtatttttcaaaggactgtcccataccatgatgagttgaaattttagacaaatcaaggacatagtgcgtacattcttaaaaaaagaaaggacagtgcgtacaaatacaattaataatattttctctaaactattattattattattatattttgttaaaatataattcatcttataaaatatttgctctaatagaatgttaaaattggaaatgtaaaaattgtgtatatttggcgtaaaaaaacttttgtaatatatttacatttgatgtacaattataaaacttaatccaaaatttgatatttttattaaaagtataaaaaaattataaaataaaaaaatagaaataacaaaatccacaatacgaagaaaaatagtcaagaaagctctgctagggtttgcccctgtttctctgtgtgaattcctccacttgctctgaatctccccacctttttgggttatgctcttgttccgtcgaagagccttctagtgtaactcctacagtgtgactgagatgtactatctttttggagaaaataaaaaatttgaatgtcatggtagaagacgattgggagattgataactcgagtgtggcggttgtaggcaaactctacctccttggtcgattgtgtaccaagcatgaatttttataagtcatttcttaaaactattctatgtcgaatcaagaaattgactaagaaagaatggaattttaagttcaaagagaaaacaaatcaggtaattttcctcatactttcttggaagaacccacaacaattggatcgtgtgttagctaaaatgatatgagtctttcaaaatgggttcttgattttcgaacggatggagcaaattgtaatatgttgggggtttaaattatcgttgttccctttcgaatggcaggtttagaacctccttatttcctcaatgacaaagaataatttggcttggttagaaggtgtggcaggaatggtgatttcggtccaagaacttgatgttcctaaaatggccaccaatggatacttttggttcaaggtcttgatctccattcgatccaagatttatcctgaattctcgttcccctttaatggtggtagaatctagttccaaattcaatataaatgatcaccatttaggtgttttaattatgggatggtaggacatgagggtaagcaatgtttagaaccagtggctatggtctagaaataaatttggaatttaactcaggcatatgagacttggctggagatagatcctcttctcagtattcacgggattggttcagtaggtgacattagctaaatatcatcaagttctctacaggaaaatgtgtatgggaaggggaagaccttgacagtggatacacgtggtcattacagcatacatttcaagcatccgtatgaatggaaccaattctccttttggtccatctcccatctcccagatggagttgttgaatttttaagcaggaggtggaactttggtcttccctttccctctatattttttgggtgtcctggagagagtggcctctaggatggtctcaaggacaacattcgagtgaggttcccctataaaaacctctgcctgagtggcctctgggatggtctcaaggacaacaactgatgcgtcctctttgatttccaccgcatcgagatggaactcctagttcaaatccatcattggaaagatgaaaagaaaaggaaagccatgcaattagaaacctactatccaaatgacaaattgggtattgggaaacgcctcccctaagatttcttgaagaggtccctgctggacctatcactcctaaaaatatatttttcctagacaactcaaagcaatagattgagaacccaaggaaagctactagaacaaagtttaattaatgcagaaatctagaaagtaagatcccctcgaattccttataactctaaatgcatgtgtccgaagataatatactggttttgtaacgtcccttcttcaagcctccattgggtccttacacccacggaatgaatggctctta

SEQ ID NO: 294830 - DNA, 2606 bp, Cannabis indica
aaaaaaaaatattaaaaaaaacaaagggttaaacctaaagcataatatcaaaagaataagagagcaaatacaaagctggaaattttcatacttctagaaattacccaagtttgcagaatgtataccttacttctttcttaattactctaaaaaagctgccaagagcatcaattttatagttatataatatactcaaatatcttgtatatatttacatacatattgagaagaaatgttcttgccaccagacttttttttaggaaaaaattctcaataactaacacctagagaaatgaatctcaacaaaagtgggggcaagatatattactgagtagcatcagctactaataagttttgaatacaactagaataattcagtcaccaaacagtgatagagaacactgtaataatgactttaactatggtgtgggcaataacattaaaatctctaggacaatgcataaaacaaacatctattactaatttcatccaagaaatgacccaaagagaaaatgagagaaattttgttcaccactttttgtataacattcaagaaatccacttcaaagattatattgtcatacccaaagcaatgacattaaaccatggcattccgaagagccaaagcctccaccacttcaggatcaagaaaaccgtccagccgccatatagcagaagttagaacaatacccaagtgatcacacactaccataccaaggccactacaagtactatttttatcaatagtagcatccctattaacttgatagaaccagccaaaggaggagaccatttggaaccaatcccatcagaaggtaaagagttcatctgtccctgagagagaggaggcccaggtggagtctggctatgttggaagttccaaagaaattcttgagctcaatgcaccaccacattaggaggcaatttaatgttattatgcaccattttattttattttttgaaccatgtacgccacaaaataaccataactaattcaattttacccttaggcaaatgatcaatgacattgtgaataaaactaagaaaattcgtatgagtggaaagagggttacccaaattaaaatcacaaagtttcctgcaagataataaagttggacaccccacaaggtatgatgagtagtctcttcatggatctcgcaaagagcacaaagaccatcagataagagactatgagaagccaaattaatcttcatagggatccaactagaggacacttgccaggtaaacattctcaactttggaggaatattcagggtctaaattttcttccaccagcctgagaaacccctagagggagaagcacgaccaaacctttactttgaagagccaactagtacccgctcttaacagagtaccatccagacttttcaaagttgcatataagtttgtcatccatatttgaggaaggccaaggaatagataagatagcttctctacttcattaggaagaaagaggtcacaaaccaaactcgaatcctacacccagtagcctcacgtaacagtgaaaccttgctaccctcatcatgaaaatgaggaaccaaaatcaaggaaggagacgcagaggggacccaagggtaagaataagtatttatattatgtccattgttaaccttccaaactgctccaaagtcaaaaaagctccttaccccataaaatgttttccacacaaaagagccgtgtttggatcgaactatatcacaaaagtttcagttcctaaaatacaaaccttttaggacccaagcagccaaagaagtaggaacattgtagatccttacttcttgctttgcaagaagatcttggttaaacaaatgcaaatctcaaaaacccatgtcaccatcttctttatggattcacaatttatcccaagtacaccagtgcattttcttattcacatcattcagcccactaaaaacgagcacacatccaatgaacattcttgataaaacatttagaaagtttaaacaagttcataatgtaggtaggaatagattgaatgactgccttgattagaatttctctacctaccatgggaaacattttagataatctactccaacaactcccaataaagccactaaactttccctctcaaggctcaaaacattggaactgaagcacactattgattttgcaaagttgacaagttgccctgaagcttcaccataccaccgcaatagttgtttgaatctcaaacaatccacttctgaagccttgaagaagaagagactatcatcagcaaataagagatgggagatcattggaccacctctcccacaaggaaacccaaacaataaactattgtcacaatcacgagtcaccaaaccagacaaaccctctgcataaagcaagaacaaataaggggacatgggatctccttatctaagaccacgatgaggagtaatagaaccaataacctccccattcaagggaatagagtattccactgaggagatacaatcaagaacttttctaacccagtctgcatgaaaccaaagcttcaacatgcactacaagaaatgtcacttttaccaacacagttcgctactatgctggtaaaagtaacttttaccaacgcatttcgcaaa

SEQ ID NO: 294831 - DNA, 1836 bp, Cannabis indica
gatatgattacagtttattttccgcatttcatatcattgtatatgctatattacatacattatatatatagtctaacaaaccttacatagaagcacacatcatattatagtaattataccagttctttcagaaataatttattagtcttggctgaattatttaagggaatatttcttaatgattctgttttgtcactcagtcaagtcgtggggtcttgacaaagatgttatgcctcgtacatattcgagataatgcccaatggggcattgtttaataattaggctttgtgtgtgacatttactatctggtgaataagcagtgattaaaaatcttccaaaaatatatattcactatagtactaagtcagacacttctacatcttctttaccacataatatattttttttttctgtgtactaaaatgtaagtaaaccaaaagcttgcatttatatatatatatatatatatatatatatttatgtaatctgggtaaagaaggaccacgaagatggagttttaatcattggttttgttaaaagtccaaatttgttatgtttgtttgctcaatgactaattatgtggacataagtatatttagagaatttcaaagtagctttctttgtgtgcgtgtgtgtgagttttacatttactgcaaggattttcagctagataacaatattggatataattaaactactatatgctacaatcttattatttgctttttaccgaagcccacaagactgtgacataggataacaaaattgatatatctataagtgacatattgctcacgtcaatatcattaagttatgacttgtgctacacaggaaaagtatataatatatttttaaatatatatatatattattttttttttcattttttaagtgataatataaaacttggttgcttctcttgggttggatggtgacaagttccttttgtttttccttacttgattccttcggccatatatattcttctcatctcttccatgcttttacatttgagaaagagaaaaatctcactaatgggtccctttaaaagaataataattgattagggtcttttctttttcttgtttttcttttcatattcatatgactttttgattctctctctcttctccaaatggcctaaggataccagtgccccgtttggcatcatcccagaatctctttatctgctatagaatattttaaagcaaagcatagaaaaggagcttctaagactaagtagacatgagtagcagctggttaaagagaaaggtacttcaattaaaactcttttattcatttattcattttttaaatatttgggccacattcgcataccataaccaactttgtcaataatttatattcctttcttcgaagttgatcaactacaaggttttttttttttttcctttagatatagaagaagcagatggttaattagtcaggaagaagaacaacaagaatctcactaccttgatagtcttgctgtaaaacttaccccatcccactttgtggggtctaccaaaatatttgatcttttagtaaagcgaagaaacgaagcttgaggaatttagaatgataacagatacacattagatccttgacacaaatcttcgtttaattttatcagctatagttaacaaggtctgagtttattaatttatttggtacctagagacaaatcttcgttttgagaataaaagaaagaagagtttttcctttaatgaatgttttttttgtcttttattggagaacattgtccctcatggattaaatgtaaaagtattgagctatatataagaacatgggctactccactcattgccaattggt

SEQ ID NO: 294832 - DNA, 5038 bp, Cannabis indica
cattctcattcttatattttcattcctcccaaccaaacgccaccttaagtgttttttccagctaaccaatgatcttaagttttaagaagcgtaccttaaaaatttgtaagaattattttctaacaagagtttgaagtcctttctccctaatatgatcgagcctctagtgccaatgatcaatgcttgtatctttctgaacaacattaatctctcttttgtgtagcctagcttccgtgatatagagagtattcattttcttttctctcaccactacaagagaaccattggtgagcttccatttaatttcaccaaactaatttatgaacccctcatcatcaagtcttccaatagatatcaagttgatcaggtgaatttttggaacatgcctacatctttgaaaatcaattttctaccaacactagtttctaagaaaatatctctaatacccacaatatttgatgcaccactatttctcattctgacattcctaaagtcactagtagtataggaagtgaagaaatcactacgatcaataacatggagtgaagcaccagaatcaatcacccaactgcaatcttgggttgcaagactaacacatccatcattacatacaatgacaacatcactttcagtggaaactgtattagtctctttttcatttttcttccattgattctactctcttttcaatattcttcaatcctttattagatggtctggcttattacattaataacacttgatatcttttcgagacttggatcttttttcagaaccatgttgatttctagtctgacttcatccccacctttcatgcttttaagtaacaagagccctagaagaagaagattcaccttttccttttggcctcttcattaagcaaattatctttagccaaatccaaggtcaaagtccctttaggcgtggaattagaaaccactatcacaaaagttttccaactgtcaggtaaagaactaaaggtgatgatgttttcatctcatcatccatatacatcttcacggtaactaactggtttgtaaaactctgaaattgacttgtacttcaaatttaaaaattttctaagtagagaaagtttattaccagtttttctttttgcaaagagatttttgctttttccgaacaacatcagctctggtttattagagatatgctcatgaagatttatattcatctatcgtctaatataggcaatggcttttatatgttaaacgtcccattcctcatcatctaatttagatggcttctcactacctctaatatgtttgtataaatatttacaatagagcaaatcttccatcaattgctttgaaacagaataatttgataagttcaatttcatcattccatttgattcatccattttttaacacacgaattcaataccaatcaactttgactctgatatcacttgttgggaaaagttattataattaattacattatttttcttttttttttcttatgtaaaaataggatacttatcaaataacacaattaataatactaaatatcaaccaaagcaccataagcactagagtgaaaggttcatactacacctactcatagtcatagttttagagtgaaaggttatcaatgaccttgagaatttaatgagttgttggtgtaaggacatagtagtaatttcaacaaaataatcaacatggatcttgttgaattataatttataactttttagtagtattttgttggtatttttaaagtattgctctcacctatattgctattaaaatagtaagagatgaagtaataagaattagagatgtaactaattcaattctaatgaactctgctgttcaattttcaagcattacaattgttcttgatcttttctttgtactaatatctattattgaagtttagagttctttgcttgttatgtcttaacaagtaatacaacatcttctattgttgggagcttttacaaagatataaatagctttattgtattcaagactgacaaaaaattacatagacacagatatacctggcactgcaactacttagagggatgagaaaatagggacgccaggcagagtagcaccagcatctacaataaatacatttccagaaacatatactgaagaatcatgaatcaaataccgaactagcgatgtcaacgctggatcggaggtgccgtatgttcttaaagggacagttttttcagcaacattggacagccaatctttcttcatcagcccctgtgttatctctgacttgaaaagccctggtgagattgcatttactctgatcttgtgtacgcccaattcaaccgccataacctgtcagtcatttctcatgcattactctattagtgaggttcaacacaagtcattcttttctttcggtactaaggtaatcattacagtgtatgtaatatcagcccacttatatttttataagattttatttagtgggacttcaacccaacccacttaagctaccctgcttctcaagtggcagctcactttcatcattccctcaaaataataataataataattcatacttgctatgatttcacaagaaacagtcaacgcttaataagcagcacagacaaagaaatgtttttatatatacccaaaatatcatctgctgccaagaatgcacagcaagtcaacaaaagtcatttgttattcatttagtagtcattttttatttatttatatagaacgttaagttacaggacattaccttagtcaacgtgttcacaccagccttggaagaagcataggcagcagcaccaggcaactgcccacgactaagaccagcaatagaagaaatgttaatgactgatcctccatgacctttatcacgcatttgtatacagacatactttgacaccaaccaagtcccagtcaagtttgttttgataacgttgttccattcctcctcggacaaatccaatggagatctcacattacctaagcagtacatacataaattagtaactttaactttcaattacagccaaagtattaataccaaaattgcttttacatttcaaagactatgttaatgtagaaattatatcagcaatctattgttcaatactagtactactacaagaaattatagaactctaacatactttaaacaatgacaaacttgatacatctcaaagccctcctccctataaataactgggaaagtactcaattacagaaattcaatatatatgtcatttgatttcaaacataggtttaaagattatcagtctttgatgaaagccgtgtgtagtttgtaagattgaataagcataataaagagaaaaaaaaccaagtaatcgaaattgagagacataaatcacttgactaaatacgagctcagttggtgaactttcaaggatacaaaatagaggaacaagcaatgggttgtataataagacaataagagtaaagattaagaataacctctaatgccggcattgttaaccaaagcatcaatccgcccaaacgcctcccaagccctctgcacagatttctctattgtgggtccatcagcgcacacatcaagctcgactgccatagctctgacgctacccgaagaagaggacggagtcgatagagagaggctattgatttcgtcacacagggacttaaggcgatcaacgcgacgagcggcagctacgacgcggcaaccggctttagcgagatcgacacaaaagtcgcggccgagaccagaggaggcgccggtcaccatcacgaccttcccctgaaggtccagccaaggctccatgtcgtccaacaatactttgctcgccatagcaatactttttactgagacgcgaaactgtgaggacgacaaaataaaggaccatatatttatagagagcaattctgataaaattaacggaaaattctaatgggagtatgggaccacagtataactacctatatcaataaggaaatttgagtttctatactttaaaatgaacccatatctaagaaatttcctaaatttatcacataacaaattgtgctactttttcaattataaccctgccatttcaattcacacacatttttcctatcatatcataataaattgtgcatttagttgaggaaaaaaatgcatttttcatactcatttcttttcaattatcactttttttttactctcaccttctctcgacacagaactccaaaggtaaatttgagtttctattctttaaaatgcgcctcatatactagttatgggaatgcggaagcaaaaataacaaaaggaattgtctgtgtatttgatattaaggaagaatatgatagagtatagaggcttatataactcagcttgtacaagaggcaatttgttactaacagtaactagttactaactaactaaccaatacaactcagctaactaactcttaccaatctaagtttaatactcaccctcaagatggagtattttatagtgtgaattttttgcttaaaaatacgaatacaatctcgtaaatagttaatacgtggactcggttcctgataaaaaatgatgacgtgtcaatatatggttttagtagaactatcctcgcatgacataaacttgcgagaaagtgcgaccaagacaatgtctaacatgatttacatgctagaagctccaccaccgtgacccaaattgttctaaatttaggaggttgataaagtggaaaagctcgatattgatctcagaattatcgactacactaacacatcgcatgcagctgaagaaataattgaggtacccattgattcttttgatatttcaaaagttttaaaaattggctctcaactaccatatagtagtgagaaaggatggtcaccttcctcaaacagaatttggatgttttcgcatgagaacattcaaacatagttggaatacagcccaatgtcatgtgtcatcgattgaacatcgaacctggatatgtgaggagtatgaaaaaagcgctgtaaaaagtgctgtttggttttgtgccctaaataaaacttatttcaatataatcagatttactaattaataaaag

SEQ ID NO: 294833 - DNA, 6991 bp, Cannabis indica
ttcaatgcatttttattattttttagaaacttcagttttttttttatgatataactttgtaaaaaattcacatttaaaaaataaacttttttcaataatatatatagtttatgatttttttaagaccgcgcaacgcgcggcttttgtttcctactgtattaataaactattgtccagttcaaccatctatatctgaaaagtgaaatgttaaagggtatcagtgtacctagcacttttcttgatatgttattgctattggtgtaattaagtatcgagtctcatataataaaaaaaaaattttaaacaatatcgctaaccaataacaccacctatatttataatgaaagaaactaagaaactactaatactcgtaatgctcatcaaaattgatattatttaatgagaaaatagtattaaattgcaataattaggagaaaatgattatacaataattttgtatcatcttaatttatcatacatctgcataggaatcaaatctgaggacacgcacggcgacagggctccttacccgatgattaccatcaacttcaacccatgtaaggctcccaaacttataatcaccatgcaccctttgccccgacaagaaagtcacctcaaacgacaccgtttctgttatcgtatcaaacctcaacacctgaggttcaactctcataactactccacccggagcttccacaactgcctcgtacaccgaatccacctcaccaacattcgtcactgtccttcttactgtcaccggcgtcgtcgatttcaggttcggaatcgttatggaagggaggttgaggttcaacccagcttgtcgtttttgactaccacaagtgatttcgatctctgttaaacgagtgatgatcgttgaggctctgtaccccaaggagcagaggtattcgacgtagtcctctgtagagatgtcgtatatgagtcctgggtccatagctctaatgggatttacctgaccaccgcctatgtcaaacgggtctgcggctttgcgatttgggcctccggcagatatatttgatccgtctgttcctgtttgggaagctgcagtttcattctaaagttgagatttttttcgtttttgggaataagattatttgggttttttttctgcactgaccagtggtgacgagagctgatcttatggctgctggtgaccaatttcgatgaagggatttgatcagagcagcaatcccagcaacgtggggacaagccattgaagttcctgataacattgtatagtaaccctttccagatttggagtcaattggtgggaaggcagctaatatgtccacgccaggggcagctacgtcgggctgtgcttagtagatcaaacattggaagaagaggtaataataacagtaataatggaaataagagtccaagattagtggtgttttattcctctttcaagacaaaattttctttttaagtgttatatatacattattgattaatgtcatgtaatgatgtaatttaggaacatcaaacatcagtagcaagcatcaataaaattttataagtaattacgtttggtggttaagtgacataattgttgcttatagatttgaagatttgattctcagtaatgcaatacctttagaacagctggggtcagggaacttggtcctctggatgagaaagtggcaactcgtggggacgtccatttgcctatcacagtgttcggagaactcagcattgctgttggagaccttcatagtgggggtggacaagcaatcaaggttagtgtaaatcgtatggatggccttttaatttaaaggggtcttcttttttttttttctgtaccttgctcttcttatgtaggaaattatttgtgtccctacttcaaaatccactttaacacatgggatatcgcatgattgaagtccatcactgtgagactgtgcaaaaatgattccaacacctcctgcttctttgacagcagttgctgctgaagctatatcctgctgatcatattggtctgaaaagcatagtactatttttcctgctgctaatgttgcatttagacttccaagctcacaatccttgcttcaatatttgtaagaaaaactagtaagagattgttttatcattattttaatttatggtcagtattatttaaattaaaaaggaaagtacaaactttaacttagacgagagatctcacgatgaagcatcagtggagtcatccgctatgcgttcggaatatgtgatgccaacaaaaccatggttatgtcttccagtatcaccaatagattggccctgaaaaaaacgaaaaccattgaagaaatctcatttcatttgcccaattttcagttttgactcgtaatgggcaatagttttacccaaagagtttggttatttcctagtgtttacgactgttggaaaggccctgtctattgtggtggctgccacagttatgagccatggtgcagtgtttgaaatagtttgtgaagtgggaccactatttcctgcagatgaaacaaccgtgatcccctttgatgctgcatggaaggacccaattgcaattgtgtcacgcagatcaacataggagaacaaaggaacctcattgccaacagaaatggatagtacatccactccgtcgtgtatagctttatcaaatgctttcaaaagatcagcattcgtgcagcgtccagaaccccagcaagccttataaattgctaaatgagcaagaggtgctcctcctctggccaagcctgcagctagtcctttataactggcctgtttcacaaaataaccggctgcagttgaagctgtgtgagtgccatggccatttccatctcttggggacaaatactctcccttaatatgggttctgtttacaggctttttaatttctgccatgaatcctttcatgaaccaacgagcaccaatgattttcttattgcagtttgtttggttaaactcatctccttgttggcagactcctctccagtgtgatgggattgggggcatgccttcatcattgaaactttcagactctggccaaacacctaaagaggtatggattagtttgaattgtagtataaattatggttattgtttaattcttttcagataatatttgtttttaccagtatctatgagaccaataatagttcctttcccagtattctcagtcaagtcatttttctgagaattatgtctgataccgatgaattcccaacttctagtggtatgtagcttgtgtatgcggttaggaatcacctggataacttcaggaaattctgcatttcccaagtgaaagccatcattagtggtgttactgctaagatagataatgcagattatatagtatatatactacttgttaagacattatacctgccatagattcagcctcactttctgttaaccttgcagcaaacccggaaaaaccatgtctgtagctgtatacaatagatctttttgcatcttttttgctttaatcacccacaacacaacaagggaaaaagaaactagaatattttatatctgtgcatgcaactcgtatccacattagaatcaatgagaaaagtaggttcgtttactcgttttccttaatacatgtaaatgcataccttcctagcaagttgactagcaatttatgttgggtttttttgttagcttctggttcaccatgcttctttcctcccaagtacacaatatagacctgaaaacattcatttctttagtatatgctgtaaagaaaaaaaaaaaataagaaaactttaagacttgtataattataagtctcttaaacaaacacaaacactcacattacttttggcctcaacaagcttaaatgacacatgtaaatagtgttgaaagaaaaacagagcaagaaccacaagtacgtggttctttttgtacatttccagtttcttgaattcatatcaaagtcgaacaaggtctttgattatttccaaatactttactgagttttgtagtttctaaagttttatatataaataaaccaatcatgcactactgcattactaatataagattaaaaagtaagaaaagagtaaaataaagattctcttttttttgttagagttctttttaatgcgttctggaatgcaaagatgctggaaaagattttacattgtaagctttacgcatggggaatcattcaatccacgtgaggcataaattttatttttcatttttctggaaaatttagattgattgattttattttgttcactttcccaacttttattattttggtttgtcaacttgaacagtaggccacgaatggttgtgatgtgtggttactccactatttgcttcagacacaatcacaaattttatatattatatatatttggttaattagaattttgtccctgaactttgccatgtaacaaatcatgttttttgaacttttaaggtcgttaaaaataccacatgaactattgagattgttagatttaagaatttttgtctaattttattcaattttactatttcagtgattgtttatgtactaaaccatgctcctcgaactttgatatctaccaaattacgtctctcgaagtttgatatgtactaaattatgcccctgaattttcatccatgttaaaaaaaatctttaaatccaacaatctcaatagttcagggaatatttttaacgatcttaaaagttcagggagcatgatttgttacatgtcaaaattcagggatcaaaaatcctaattaatctatatattattatatcacattataagcattttaatattatggtacaatacatgttttagattcaagtttgtagcttaatctcgtatttgatttagataaatgataatgtattagctcttaattaaacatttgatgggtatacagtgatttgttaaatttattctttctttggacactgaattattggctttgaaattttagacgttggtggggtatgagtatagatatgtatatacaagtgattgtgaacttagtgactctagtcaattgtaataatgacatatcaactgtggaatgattcaccttaatctcttaaaatcccatttttgatattgcctagtggtgcttttttcttagcttttgtttcttcattgtcattagtggctatctatgctctttttcaagataaagctactgttctcgtgataaaacccataatgcttcaaaaggaaatatagaaagaaagaaggaatgatgactatctatgttgagtgggatgattcacaattttgggggatgatgctattagcttgcttccacatttttgttgttccctttatacatagtcaagaactttaaagctggcctccttgaaaaagtgcttagaattgagaaaactttgcttatctatcacaaaaaatggcttcgtatagtttatgaccacttgaaaaaacagcatatttgtttcctaaagttggtctagtcactagtgggtagtggccacatagttggtctagtcactagcgacctattggctccaaaggaaatttcatccaactaaccaaataaaatatgataaagaaaacgtaactattcgtatataatgccatatataatcattaaacttatcttacaatcatattgagcttctatccataatctcacgtttatattttttagtatctgtaatatatattagtgaatttaaatctttttcatatgtttaaataagcattaaatatatattttaaaggatggtaattattctccacatttaaataagcatgtagtatatattttaattatttgatagcagttcattagtatttcatagtttcttgcaaagtgctgttctatttcttctaatcaaattttgaagtgtcgacatcttgaactcccttcaattcgtagcacttgtacacttcatttcgaagagtgtctcacatgcaattttcttcccgaagagtgtctaacttgcaatcctccttctgaaaaatgacttacttgcaatcttcctcccgaaaagtgactcacttgcaatctccctctcgaagaatgactaacttgcaatctttctcctgaagagggactcacatgcactttttcctctaaaaaaggtgactcacgaacaagacttctcccgaagcttgattaacaatatccaaggtgttcaacctgcacaatttcaacaagaaataatacagagtaacacaataataaaatactaagaacttgttggactcaagttcttcacacaacaaagaaaacactctctaactttgaaatataatttagaaatgatacaccaagagagctaaccaataccagccacttaagggtgtatttatatactttagaaagtctctaggtcgtgctcaaacaaccaagaaacgatcaagtcattaaatgaaaatcttcccaaaaagaaaagtcaaaatctgtttgaacagactgtcagtctgtttaaacaaatacaatgaacctggacagtttttcaacaaagtttccataaacaaataagacaactttaattgacaacattaatacccgtagttgtacacggtttcttgggcaagaaatcagatcaaaagaaataaaatatgaataagaattttcttaaaaagcaaaggataaaattatatattctataaaaggaaaactcatatttaattcggtaaaaaaaaaaataggatctgatcttgaaaaaccttttcttacaagaaaaggaaattatatttttgaatttaatgaataaacaattagacacaatttcaaaaataccacaagtattattttttgtctatattattaaatatgctaacaaaagattttacaaaaactaagagacaatcaaccaagaaaaaatcactacaacaaaaacccaagagcaaagaaacatcatggaatctgtacgtagttaagttatgttgattattaaaaaacagtgtacttaatacaacttggtatgaatcataggttgaattactatgcgaaatttaattttttatacttaaaaaaccttaatattttattcttaaaccaatacatt

SEQ ID NO: 294834 - DNA, 5041 bp, Cannabis indica
aaaacaaaattgttaccaaacgacaccataattactcaattctcgtggaagaccttgagaattaaagaataattaaaattccttagttatttttaattacagtgtaattacataattaaacaaatatatataattactttcaattacataccagctcttaatttgttaatttcatttcattttggttaaatggtggagagtagttatttatatcagcaccaaagcccctatttgattaagcttattctaaactacgttgaatattttttattgtttatccttgtaaggaaacaaattttaattcttgaaaataaaagtgaacataaaaatgctgtgaattctttaaattaattgtttttgaatttcccataacatataattaaaagataaagaaaaaaccaattttattgggtttaattcatgctcatcttaagaggtattggtcctacaggttagtaatatcaccaaaatatgtcatactattattaccattgtcacactactatacctaatagcaatgttattatcaataagctctgattttgtgctctttttaaatcaatttacacattatccaaaaaacgagaccacaacccattccataatcgatcaaatgaaactgtcatatgcttttttctggcataggcagaatttcattgaaggggaaaaagaactctttgaaagaaatcttttacagcattttggtgagatgtgtgatcagtgtgatttgatgtgtgtgcccccaacaatggcagggacccttagaaaaatacaagtgtgtttgacccttgcccatggcaaatctggcacaagtggcaacctatcatataatgcccatcaaccaatcataaaagtctaaaaagacaacaataatacaatacattagaatgattggctttagaaactactgattcaaaagtaacacaccatcttattaaccagttgaacttgaatgtatactaatgaatgagtcatgactatgtatgtatgtagggaggtttagccaaggagggaaaaaaaattaatattatacttttcttgtgtagtaatgtcaattgccaactgagtacaatctcattagaaacctgacctcttttgtacagattctgcatctgtcattgcctttgcatgaaaaccccaacatatatggttgtttcgattttgtcctgtaaacgattgctgctgatgctttacttaggtgggtgggtataataagacctgttgaaaggagtcaacttgattttatcaatgcccatgttcacagttcttgaactctctttagggtcaatcttttctggcctcaagtgtgtcttcctcagaaaagttgttatctttagtggctgaggttgtgtatgcctctaccacttcctgaaaatcgcaaatttgttgtttcatagttaaaataatgcaatgataagaaacatgtaatgctgttctaagaaaaggtaaagtgacaaaatgcagaagagaaacgtaaatcacagcacaagcatatgttttaaatcaaacttgtaattatacctttttgagatcttcgtgtgaaagcggtgtatccctcttgtcaactgctgagcttgtagagactgcattgtctgccacccgaaatgtgggtgccgtctcttcactttccttcaagtcatgtttagacagattaccattcacagaaactccattggaataattgagattaatgttctcagaagattgtgcttcatttttttcaacaactaaatcaactccagcctcgctttccttctcatttgctattggagtttctttaaccgcagccgcagcctcagctttcctcttttcttcttctctttgctgctttctccgtgcctcttcctccttcagctttttaaatctggaatatatcaatgaattaatattaaaataacacgaatttcttttccccaagaaataagaggaacaaaatgatatgacaattgtttaaacctttcaccaggttgtggaccctttgctgtcaacttcttttcttctgtggtaactttttgtgttacatttaaatctgagatggattgtttaacctggggttggtcttccttgacaacatcggtaaattgcataacgggaactttagccccccctaacttttgaagccatacttgttgtgcagtgctcaaaatattgtttgttagcctgcataataatgttcaaaggatgtaacttaaccttgaaaggtattgtattagagtatttatggaaactataatttacaaagaaacaaaaacaatttcctgaaagaaaagctacgatgctcatacaataaaatggctttacatctactcaccaataaaggctcagaccggaaggaactgaaagcgaaaaataaccaatcattaaaggtagcaactttgtaattgcttgagaactcttcatgttcggatcattactctgaaagttaaaatagcacatgttaaatacgaatcatttaccccacaggatatcgcatctcacatccaaattagtcctatttcaatagaaaaaaaggcgaaactacataaaatcaaccgtttaagctgataacaaagttacagatggacacttttatcaatcttgtaacgggaaaaaaattaaatgtgagactacaacggaggcaggagatagacacaaacatgaggtgttgcactaaattgaaaacctagaacaacaatgtgatttatagaagtgaaatgttttatgttggtaaccaagctcatctagtcaacgaggctaagttaatttaaacagatatgatttgcaatggaaaattactgacctgcgatgactgcataatttggatagatatgtattgtgaggcaaccagcaatataggcaacacaagatatgccaaagtatctgaccatccaaggggtggatgaccatcctgagaaagtacaaagatcgagaagagtaaaaatttgaaagtttctcccaaccaagcaaagaacagttaactaaataataattttaatagaatgtgcaaatatatcatctagtggcaaccgtaaggattatctttccttttcagtgcagaatttctaaggaaaaaaataacattgagattattataacttatacttcaatatgtgtacatttagagagaataattacccttactttttaacaatgtattcttcttacattacaatattaactcattgctctagtgaaaagaagaagaaaaaaaatcatgatggaagtcttcactgaatattgagtattaaatttcagtaaaatagcatataccaaaaaaccccttagaatttagtaaaggaaagtttagctttcaattcaagaaacttactataaatggaaaaagccaagagatgccacttccattttgccgggcagcaattgatgttggaccagacaaggagggtatccagaaaaatccttcagtaagcagtccctttattgaatagaaaaagtttgattaaatttatgatagtttggaaagtagagtagagggaaaaaaaggttgcttgcaaaactgtaaagcaaatacagcaaatggctacctcatctgccacatttgaaagagctctatataacccaatccagactggtattgtggcaagtgtaggcaggcaccctataacaaatacaggataataaataacatatacaaatagcacaagtaataacaaacaaaaaatagtttataataaacacatctttatgcacaaaacaatggtagtcagtacgaatggatgatcagttatcagtcaatttcctctgaacatgcattcacactaaagtcaaatgtaaagtcaatacctgccaaaggatttatgccagctactttatatagtcgggcagtttcaagctgaattctctcctgaaaaatatgattgaaaagaacagaccttggtcaatagaagaagaagaagaagaagaagaagaagaagctaatcagttaatcagtgtaatattacatggtcattctctttgagcaacaaaaataatcttaaaataaaaaattaccttatctgcagcataacgttgctgaatagcttttacttgaggttgtaaagctcgcattgacattgcagattcaacctaaataaaaagagatacaattataaagttccaaactttttaaaacagggaatacaatacagtcaccgaaaagctaaaatcaatccacaaagatacaaacctgtttttttgtcaaaggaaatgtggcagctttcacaagaacagtaaggagtattatagcgaaaccataggcatagggaacatgcaaagcacttagtccatcattcaaaatctgggaaattaatcaaacacccaatataaaggaaatgtttatatatatatatatatatatttatataaaaaaaaataggatagtcaacattcaacatcaattgaattgaaactcactttcaaaatagtctccatataattggtaatcccagtgaaccaatcactgttttgtttagctgtagtaacagtgtccgaagaagaagaagacgaaacagcagcatcagcaaccgtgtagagaagaccttccgctctaccaaaaagctccctaacaaacccctcagtgctatcagggtcaggaaagaaatcgggtttgaacccgagtctggctacggcgagagaaccacgaagaccgggcttagataaaggcgccaatccaaaataatgggttcgacggaaaactggattctgggttcggtcagggaccgggaccggagacaagaccaagctcggtcgatgcggtaacacagtgttcattttttttaaagtcggtgagggattgagtaggcagcggagctcgaaacagagagcttaaggaattgttgggcggaggttcgttggttttggggaagcttgttcaaagtttcagttgcttgctcactctgcctcttctcctggagaggtaagaaccatgaaaatggagctccgagtcagaggaagatggattgggtttttctttccgctgttgcggttttgtaatttttaatttttaatttttaatttttaatttaatcgttatttcgtttatttatttacagaaatatttaaatat

SEQ ID NO: 294835 - DNA, 6170 bp, Cannabis indica
aacaaaaagcctcaaaaagaaagataaggaaaacttgagattaaaaaatgattagaaaatagttttaaagaaagatgaatgctaaccagccaagaaaagcaaaggcaacgggaagaagtagagcctggaaaccaacaccagcattgagattgtgaaaagcagcgtagtgagcattcccatttctggactctgtaatgggaagccaagcatcctgaggattcagcttcgtcaggtgaccaacctcctccaagtaacccttcatgttaatcagaaccctcttcattggagtccctattggactaagaaacctcggagatatgaacgacgtcggtgtccacgccgtcgacgacttcgcctccttagaagccggcctaggcgacctctgccctgttggagtctgaatctccggcgttgaaacaccacgtggcgtcgccggaatagatatcagctcagtctcaggtctctcctccatattgtaaatctctccaaccccagaagaaatcttctccaaatttgtttctttgatcgaactcagctcaaaccagctttgctctgaaactcttcttctgtttgataatataaatagaatttatttttggttacgagaatagaaactaataataacaacaacagtaatggagtgttattatcattactttttaattttaattaattaattaattttatttttatctcttttttgctttcagtgtggagaagagaaagaagaggccgtaacaccattaatagaagtagtctgagtgagtctgagtctgactacatagtcacccagtgaaacggttcatatgcagaaaaaggaaaatcacagccaatacttcttttgtagcatgaaagtttgtacaattctaatctcaaccattcatttaacgaaatatgacattatcaacggacacgatggtttgtcattaacacatcaacgtgattttgattgatataatgattttgtatgggagggtatacgagaggtttatggtgtgggtcaggacttaggtaaggttaggttatagatattattggataggagtaggtgaaccttagtaagaagcaatatccaacagtgacgtcttacgtggcgttggtcaaacattcaactctttcagactgctcaggtgggtccccactcttttcattttaattgtttatgtatgggcacgcgtggcgcgtaacgaagcttttattacacgtggacactttttctttgtccaacgttgatttttttgactattttgaatttaacaccgaggccatgttccgacgttgtatttttttttttttataattaaatttaaaaattaaaaataagcatccaaaaatagggtgtaatggaaatgacctcttcaaaatgtaaagaacattatttattattagtattgtttacttcttttagatatttaccttgaaaaatatgtaattttgtctttcttcctttccaaacgtcccaacctagtttgagaaaatttacactgaaatttgtcaaattatttcaaaggaagtagaataaagtgacatacttttaatctttactttatatctgaccgttgaattctacccacatatcctacaaatgttagcttctaaatttagcctttattaaatgatgataatgatccctatttattagtggagaaaatacataaaaccatcataaaaaaccaaccatgaaaattggattggaggcgcgtggggctcaatcaaatacttgaagtttgtaattttgtattgtaatatgacgaagctaggtagggcttgaatttggaatggtcccgtttgagaaaaaaaaagctttgaacaaagtgaaaacacaaagaaaatagagtcagaattcccgacacaatcacgtgcttttatctcgcgtgtgctgcattagccacgtcacctattctttccctccttcattctgcctacgtggctactttgtgttcgtttgattatatcaattggttcaaacagcatgcataccgttaagataagcatgctccattaactataataatcataattaacaaaaaaaacataatcataataaactcttctaatatacgatatatatatgacaccacacaataattgaattaattataaaatataaataaatatgtaaaaagaaaaaaagtaatgattaatttacatttattatgttttgatagtcatgcgaaataaataggaagcaaaggcaaccgaaagcgatatattaataataagaatgtgttgttgaaacgaaatgaagtggggtttctattttgattgtgattttatttttatagactgtagttctttaaatgcttcatatgtaaaccatttattacaaaccatagttctttttctttttatccaacaataatatattttttgtttgtagtagctctagctgtcatccatgtatatatatacctggttatgcgttaattaatattttttttatattttaatatcgttattagtctaaaaaaaaatattagattttatgtaatttaatataataatttttaaaaaatcacaaaattatttaaaaaaaaaatgttatgcagaagtagtgcccaatactcgatatatatgtgtttatatcttttatattgggtgcaacagttgaattcttaaaatatataaattgctttggtcagctcactcatgcctcatgggtccagcccaacttccaaaatatggataagtagtgtgcggcccatactataaacaagttcccatagatattggaaataatgataagaatgaaagagaatttttatttattttttttaaaaaatagaatgaaggaaattaaaataatgaatagtttaagaatgacgatgagtgtttttgtagtagatttagggccactttagttaggcccgggtttagatataggcgggttaagtttgtggctagagctcaattaatttatgggttaaaaaaatatttttttcttttaaaattatatatatttttattgattttgaaaaatattatatttttctagggttcaaaaataattttttttcttatgacacacaaattttagagcttatcctgactttagtgtagttgtgcgctgtaagaaaaaaacagttgtagcaaaactatagaaaaaaaaaaaattgaattgattgtttgataaattataaatttttaagtgttatgaatttttaaaattctattattataataataatgttatagtgtagattattataatcacaaatatataaaaatatgttatataaatttaaattttttatatatttttaattagttttttataatataaatttatgtacatttgataaaaataatttataatatttttaaattatatttttattacttgtaaaaaaattgtagtttataagaaattctcagttgatgtggtttgttaataataaaaataaaaatattaaatattttttaaaacaaaataaaaaataagaaatttaaatattttttattttaaatattttttttcttatataataaataattaaatatattttcaatacaaaataatttattgtataatttttttaatcaaaatagtttttttaaaaagttgagttgtaccaactttagctattaattgtagtttgtctataaattcttcaataagttattttttaactatttaccaaatacttttttattacagtttttttaaaaaataacttttaactttttcaaaagttgtgtcaaacggatccttagaatgggtcctaaactgaagctaaaactaccaatagatttggtcttaaaaattagaggattaccatcaacttcatattctgacatgtgttttcgaatacagaggttgatttttttttctctttcaaaaaaaaaaaaaaaaatacaacctctgtgtacgaaaacacatgtcggaatatttgttttaaattttttttcatggcggtatttgttatatttacaatattacttctgtaaaaaaatttcagtgccgaaaatatgtttgaagttttttgaacgcatgttaaactagaatattaggaactttgttttcgatactatgaactattcagaatttttcaaaaatttacatgaatgatattgtaactataatgaatatcactatgaaaaaaaaatattccaacatgatttcagatatggagaatgactaaaaagtaaaaatgaacacctttctaaacactaatgttaaatcgattgtcgtaattattgaacgcattagttaaaactaacaccatttttacactattgtaaacaaaaaaaaaaaaagatataaacaaaacacataaccccgaaccccttgaacaacaccatttttacttggatcaatgggtgatgaaagttagattgttcattaattaattacacataaaacagaataaattatagggattgatgccgttttagattctgtgttttgtaaaagttactaattggatcatttattgtaaaaaaaaatgacaaattagatcttgtatttttcaaaatgatataaaatagtatcatgagcttaatttttgatattttttttaatataacaaatttaaagataatttatagaatgaacagatgcagaaaatatacttagttttatcattacaactctaaaacaggttgttactacttttattttgatcaaaaaatcaattaagagtactattttataccattattagaaaatatatgatcatatttatcatttaacaaaatagagattaggcctctttttttttttttttgaagaaaagcgttatttcaatagataaaatcagttagacctcattgtcgttacaaaaaatagagttcagggatagaggaaattggaatacaatcgaataattggtggaaaaacgcccacttaaccacattatgagcaacaaaatttgatgaaacaaacgaggaaaacataaagtgttggaatagttaagatccaatctaacgtctgcaaaatgactttctccattcttagtatatccttcctactgaaataatggcctgcaagacattcgaaatcactgacatgcacataaagcaaggatgctaaaaatgtatgtttaacttgagtacttcaaatggatgaaccttttctcttttccttaccccaagagatcccgcatttcttcgtattttgagtctaacaacacgacacttatgcccaccaaccataattctcagcttgatgtggtttctgttggggattattttaccaagatctaaatttactacaatgtatgttgtttaacatcttaaatatgaatttctaaaacaatagaatttaaacacatataaagttcaagaaaccttacattggttgcagcggaattaaatgactcattcgactcagatctctaacccttgttcatttatgtcgcagattattataaagatctgagctcaacactctttcagttgattggattcttcacaattttacacactatgattgagtatcaacttttctttttacaaatgcacatatattaataataaatttctattgtataaaaaaattattgtaatgaaatatggtaaatttatgttaatgattgatattcttatatatgttacatgtatatatatatatattatagttgtaattatatataattatatatatatttttgcaagggataagatatcaagtttaaaagaaaatgtttttaccaatttgtttttatagttatctattatttattttctatcttaccattaattattattgttacttttatatttttttacctaaaatgttattatttattattgttaggatatgatataaattaagaacataaattaccgaaaaaatatatttcaatatatatatttatatatacattatcttatttcttaaatgttctaaatatttttccccatatatcaaatcacataataataaaataatttttattattaataattcaaaactatgatgaaaaatggcatatattgacctaagaaaaaaaaaacagcaacaacaataacaaaatatttacttcaagcgatcaaaagaacatacacacttcaccatataaaaaccaaataaaatattcttagaaaataagaatatgcaagaaattaattgaaggtcatcaataataatagaatataggctaattagcaatttttcctcccgaactttgaaatataacaaatcatgccccctgaacttttttggccgt

SEQ ID NO: 294836 - DNA, 10865 bp, Cannabis indica
cataatttagtatatatcaaaataaaaagtcaaaaatcagtctaatgaaaaatacttttctctcatttccattacattttctttcccttcaatatttttcatcaattctattaattttctttccactcaaccaaacataggccaaacttattgcctccacatttctcaatggtgtgttggagaagctatattattactatatgagcagaataaaaaatgagattaatttcgtttgtgctggagaagctatcagctatgatcttgccacgtaagcatcgccactatgatttaatgacgtggcaaaatcagaacctttaattagctataccccacttttcaaaacaaaaattttatttaacccgccaaaaccaaaacacggtgaaactttaggcgcgccttagaaaattggcggctttatatatacactcaaaaaacaccaaaaagaaaaaactaaaagaaaatatttaaaagaaagaaaaagaagaaaaactcttcgctttggtttcaatctcagaaaaaacaaattacaaagtgtgatttgaacacaagaaatagatcaatggcggatccgaaccatctcgaaagaatgggcagagagctcaagtgtcccatttggtattttcgactttctttccttttcttttgttcttatcattttcacaatatataaatgtttttttttggttctttgtagtttgagcttactgagttccgcggctacactgaattgcaaccatgtttctgcaagtaagggtttgtcttccagaacaagtttagttggtttggtttagggtttgcattgtattggttgttgatgttagctgtgtgtgtgtgttttttttttcagttcgtgtattgtgaaatcgatgaaatcagattccaattgtcctgtctgtaaaattccatatcgacgtagaggtatgtgtttgagtttgaatctttgaagcttttatgctgaagcattatatcagttttttagaactggttagctaagctttattgttctcttatcatttttggtgtctattacattttgatgcagagattcgccctgttcctcacatggataatttggttagcgtttataaaagtatggaggttgcttcgggaatgaatatatttatcactcagaatgcatctgcatctaaatcatcaggtataaatagctggtgtatatatgcatttgacatgtaaaaaagggtgtacattaattgtgcggttaataatgtaagagcacagatgtacaatggcattttaattatgttcttatgatttttaatcttcataacaaccatttagctccctacctaaagactaattttgatcctaagctttgatacatttttcataggttagtttactgtacaaggatagagtacaaatgcatcatacttgttttcattataaccaagagcttctctcttgtgtttataaaagtgttcttgttcttaagtttggcaagatgtcatttttaatttttctttttcaaaatgcctttttttttggggttgggttattcttttcccttatgttatttccacattacagatggaaaaaagcaagtggatgattgcaacattcggaacagacatgattctagccaaaattgtatagaaaagcaggacactttcaaagaacaaggatcaatagaaagatgtaactctgatcttaatgtttttgattctggtcatgcaaaaccttcatttccagccaagaaaagaattcaggtgccacattcacaacctggagatgttgataaattatctgaagaaccgaatctttcacctttcttttggttgagagatgatgaaaatgtagagaatttaagtcagcaaacttgtacagatccattcattaatatgtcacttccagctattcctgctttcagtgatatcaaagattctgatgatgaaaactcgttagaaatggcccctgaagtgagtgcatatttagtttatttatcctatgctagctttctatttagtaatgtactttttcgagttaaacaatcaagaatcaactaagactaagtaatatgatttatgatataacaaatttattgcagaccttgaaaaattgccacttattttctcttcaatttctgatcttttgtaggaaggagagcctggtaaatcctataatgttgctgatatgtttgatagtgaaatgtttgaatggacacaaagagcttgctcccctgaattgtgtacaagcccttttaagacacaggtatggattgtagtactctatcatcatttatattgctacattttcatcccacatgacattttgtctatttcaatgtccagttttgttaagtcagcagctttactaaatcaaataaaaatgcaggttgctgatactgatgaattggcccttcaaggtgaaggcctgaaagaagtacgaaagggtaaaaaaagaagcaaagtattgccagctagaaaggaagatgacagatgcactattgaactgaatgatacttctcttcctggaaccaacaatgctagtgatcaagcaggttgtcagagttctaagaagagaggacgtaaggccaaaaaagcagttggagtgatgtgtcctcagaaaaagtccaaggaagttgtagattcaaatgagaaaagtcaagaaatgctcaatatttctaatatggaggttgctgatacgaatgaattagtagttgaatcagtagacctgaaagaagtactgcaggacaaaaaaagaggcaaaaaaaagctagccaggaaaaaagaaaaccaatgcactaatgaattgcgtgacacttcccttcacagaaccaacaatgttaatgatcaagaaggttgtcagagttctaagaagaaaggtcggaaggcaaaaaaaacagttggaactacatttcttgagaaagatgctgatgatgctcttggatttagtgttgatttaaatgaaaaaggtgaagagatgctcaatagttttacaatgcaggttgctgataatgatccattggcagttcaagcagaagacctgaaagaagtaccaagagacaaaacaagaggtaaaaaggtgctagctaggaaagaaggcaatggaagcactaatgaattgtgtgacacttcccttctgggaaccaactatgccaatgatcgtcagagttctaaaaagagatgtaggaaggccaaaaaaactggtggagccacttgtcctgagaaaaatgctaaggaggctcttggaattagtgttgatttgaataataaaggtcaagaaacgctcagtactttcaaaagagctaagaaaatttgtgctgcctctgaaggagctgaagcattagatgaagagaataaagacactagcactgaactgcctatttccttagggaagaaaaagagatgcaaggatcttagctcaaagagtcctggtagcaacagtgataagatccatgtccagaaccagatacagcatccagtgaacttaaaaaagcaaagacttgacagtatgcaaaatgattctgaagaagcatctaatgtgaaagaccaaacaaacgaggatgccatagctaatttatctgctttattagttcctctagccaataagatcaaaccctctgaatctatgaaggaatccaataaactttccagtatagcaaaagctaagtcaagtgatcatggattgaggaacaaaagaaagttgaaagtgtcatttataggggactctactggtgacatagctgatgacattcaacacaagttggatgttggaagtttcactgatccatcgaaagtgaagaaactttctttgactggtgatgtggtattgcagagatgccaaaacattcccagtaaaattcaatgcgccttttgtctttcttctgaagagacagaggtatttacttcatctaaatttctttgtcatgtaacattaattccctcatatatacactatccatttatattctaaatccgttaatcgtatttgccaaaccaaaatgacaggcttctggagagatgattcactactacaatggcagaccggttgctgcagattacaatggcggctccaaggtcatacattcacacagaagttgcactgaatggtaagacttttcctgagcagcaaaaacatattttttacttttatatgtgtaattaagtggcccttcattgacttttttctgttactatttaccaaagaactgtaatttggttgtgatgataaaccgacgctagtgtcttacaaatgagtcattatcttttgtgttttaatacactgagtcttgactttgaaagaggtaataggattagttaggagcttttcaaatgttagtacttacaactttctttagactgattactgtaaaaatatgtgaagggcaccaaatgtgtactttgaagatggcgctgctatcaatcttgaagctgaattaactagaagtcgaagaattaaatgtagttgctgtggaattaaaggtgctgccctcggttgttatgaaaagagttgtcgcaagagtttccatgtgacctgtgccatgttgatgccccaatgccgatgggatacagtacgtgctaatttccattcaaaacttttattggtttttacttgtttttgtatttcaaaataatatattctaatcttgatttgtatttcaggaaaactttgttatcctgtgtccacttcatcctgaatctaagttccacagtgagagtttggaatcacaggcaagaaagaagacttgcaactcgaaaaagtaaatagacccttttctgaaagttccaattatttacattaaccagacaaaaatactgaactaacattttctttttcatgatcatggttaggctatcatctgttaaacataataaagttaagcatgatcttggtatctctccgagatcatctgttcaacctagtaaagtcgctattaagcaagatcttgctaccactccaagctggaattcctgtggaatctctaaaaaaatagttctctgttgttcagctctgacaaattcagagagggtaaggaagattaatgtatttattaagtctttccatgttactattttaactgtaaaatctaaataatatcctttgtgggtcggtactgcaggaaacagtttctgaatttgagagaatttctggaattacaatttcaaagaagtgggaatcaaatgtcactcatgttattgcatcaacagatgaaagtggagcatgcaaaagaaccctcaaagttttgatgggtattttggatgggaagtggatactaagtatgaaatgtaagtagtactaaatcatttatcagacatttctaatgcgtgtttgatttggactctaactttaaagaggattaaaacctggttatgtatatatctatcatgtgataaaagtgctgctcataacctattattttgtttcaattgtctatgcctgaatagggatcaaggcatgcatggaagcaatgaaacttgttgatgaagagtgttttgaagttactgtggacagtcatggaatccaggatggccctcgacttggaagactcagggttcagaacaaggttggttccccataaccttcacaaaatcatttatttatcttagctcatcacttattggatttcttataaaaagcgcctagcttaacaacttaattaaatatttgaaccattgtgattttgatattgaatgcattttctgttatttttacctttacagttagtactaaaactctagtgataatctcaagtgagcacttagcattattttatcatgacattcaaatttataaactttcttgttgcagcaaccgaagctgtttgaaggatttaagttttatttcatgggagatttcgaatcttcatacagaggctatctacaagatctcatagctgctgctggaggaactattctgcatagaaaacctgtttcatctccccataaggagatgcttttcagctcttccgaaagccaaacgtatgttatttacagcctcgagcttcttaatcattctgatcccaccaagagggacgagaccattagccataggcggtacaatgcagaggttctagcaagttcatctgatgccaaagtagtaagcaattcatgggttttgaactccattgctgcttccaagttacaaagtttctaaaaataaaatgcttgttttattatttacaaaaagtcatgtacatgttttaggccaccttttcaataaacattagaaactttttttctcatagtggtgtagtaatataaggtatttttctttttaaggtgattttgtctctttggcatgtgttaatgattttaaatcaaactaaatattaggaagaacatagaaaaggtgaacagtactattaagagttgctcaaacttttcattatcatctcttgctttcaaagaaaaggatactaaataagaagtaaattggaattatacaacagtgtggggcaggggtaagaagtggggtcatgtcaaaacctggaaaaaatcaaatcacacaaacacccaacgtgctaaaagttaatgtttctcctttttgacacatcataactgattctctttggccttttctcaaaattccaaagatagtggtacaatgttgagcaccctaaaaatctacacaaaaacaaaagaggacccaaatgtggtcagaccagataggggggctcctattctaggagagcaatgtctctagcattttacatctccaccagaacccatcacctattcttaatatttattgcttttctctattttcatccacatcacacaccaccctcttgtctaaattccacaagtaaattttgagtgacttacaatctcagttactccaaaacagcagcagtagcagaacacttactgacttttttggtgtcacttttgttcttcttaggagactcacttttcttgtacctatgcttagaaatcttcaaattaagatcctcaaacataccctccaaagccttaatatcctcaataatatccacactttcatcattgttattattattattattattcttcttattaccaataataatcttctccttcaaactcttcactctctcaaccccattcttcacttcacctccaattctctcaatcacattctccattttcccattctcctcttgacaatccttaagctttctcttcatagatctatacccatcaagggatttcaaaagctgctcagaaagagtcttgttcctttcctgtaaagcagcattattattattaccttggctggactctcccacaccagataataacaatctcttattattattaataatatccttatgttcaacagcacaagctttcactttccctaacaacatgtcgttttgtgctcttaaatcacttatcaactcttcaagctcagcaatttcttgaactttcctagaaagctcagaagccataatctctttctctttacccaaacttgtacacataatctcaagactcttcctagcagccaagctcatactcaattgtcgttttagcttttctttgtcgtcgtttatagaagaagaacaagaagaacaaaccaacatctcatttggcttcttttcccttggaacgttactgcttggtttcagatccgtattgcatcttcggagctccggttttcgacccgaactctgagatttctgaatccgggtcttcaggtcttccagtatgctcatcattccggctaccctttgggttttccggtcatctttgctcccgccggcctcgttgtgatcttggactagttttaacagaagcttaacgcttgtggagatgccttaataaaaaaaataaaaaaattaaaaaagttgttgatgggatttcgagaattctctgattgtttctcgggaaaatgaaaacaaggacattacattacattacataatattatatacatacaatgatatatgaatatgacattataattattaccttcgaaactgtgatcttctgatctttcggcatgattctgtgaagatggtaaatcaggagatgaaaaagctctaagcccactcatatttgctttttcccgggaaaatggatcttcagtaatgtaatagagagaaaagaaaagagacaaaattaatatttgagtacaaataataaaaagcaaagctttattgtatatccagaaatggtggatcaaatgaaacagagagaaaataaaagtgtttaatgtttgtaattttattaaagaaaaatttataataattaaaacaaaaaagagagagagagctaaaaaggagttaaaagagaagaaggagatattgctttcgcactctctctctctctttttctttctctctctccaattagttaatatttaataatttattagttttattttttatttttttatttattttgtattttgtgaataatattattgtcatgttatgatgttgttgggtttgtttggtgattcgcaagtttctgtaatggttggctatttggatggttgtaaatgatgcacaataattattgagttcttcttcttttgactttttctttgccactcttctcgtggctccttttgactttttatttacaaaaatatggctataaaaggctctatattattatgattataataataaaaaatcatctttatcaatttatattcaaatataaatcactttatgtatgtataattcattcattagaggagaataatatttcaaccaaatgatctaatcctccacttaagacaattaaattaagaaagtggttgtattccgattttatttttgctatttaggattttttcttataaattataacttatgtattattgtgcttttaaattttttagtttgttaaaaataattccggaactattcatattataaattagtctttttatctggttttgtaacacgagcaaccgtttagaaaattgtcacataagtaccatgtgtgtaaataatttttaaaaaaattttaaaatttttaatttagttttacacattttttaatcatcattaattagtttttaatttaataattttcttttaaaaatatatattttttatttttaaattatacaggtgacaataatataataattttctaaacattcacattatcattttatttgtcacgtataataaaatttaagaaaaaaattactttaaagagcacaataatatattaatcagagacaaaaatctaatatatatttggccatatttttgttgggtgtcgtgatatattattccaaatcaaaactatatataatatattttatgttcattataataaaatatccttaatcgttgaattattatggggttacaagaataaaagaaaacattaccaagaagaagaaatagagaagagagagagttgggacggaaaaaagagaggattgagaaaaagaattaaataaaggagaagaaagtaaaggtagaaagataaccaaatacagaaattataattttagatatattacataaataaataaatttgaataagtaatggttaaaatatttaatgtttttaaaataaggtccatcctagtttataaggatgtttattgggcaacatttaatatttttaggtctatccagattcgattcaattatatattagatgttagattttaccatttaatcccacccaattaatagcacccatccaatcgatctaacatccattgaatgttggattggataggttctatccgttaaatgtatttcatatatatttattggcttaatttgaatttattcaatattttaaactagtattttttggatcggatgggatccatccaatattttaggtccagtgtatattggattggattagattggatccatcaaatctaagaaaaaaagagtaaaattttaatgttaatttttatatatacatatatggaacacttctcaatgggtactacccattgatgggtactaaataaattgaacaataaatattaaatattttacatttaatattataaaatctaattactcatccaaattaaatgaaaatactaattagtttaattggatattggatgtattagatttttagacatcccatccaacatttgatccgatccaattggatattcaaaaataacatccaatctgatctgatcacaattagatatctaatgtttagcgctcagttgtaattggatcggtcggttgtcattagattggatcgatttattcacacccctatcgttctatacataatattttacaatattttttatattaaaaaatagatctaaaatacatatggatcttaaattaatatcagattatcaagttattgtatgaatcaataagatgaaagacatacataatttcatgaaattagatatgaaatgagatgatgggtatatgatcttcgaaagactaatcttctatctatggggaggggaccaaacccttatgttctttatataacaaactaattagagccccataaactttaatttggtttagtattgggtattacacattacaaaacccttaccaaataatatgtttataggactcatttaattagatcacttatttagcacagtttagaatattcgctcaaataaatgaaattatcttaatttgtaagcccacatattagattattaaaaataacccaacaatctctcacttgggctacaaattaatttcaatgacaattacatttgattaatcttatgtgcacacaaacttgctaattattcttaaaacatctcctttagactatctggtccatctcatataccagtatgagaccaaagcgaccttcgttacatttatcgtaactggacccatgaatgatcaccatatcaaatatatttaatgacataatgttgggttttgtgctttaaataaaattcattttaatataattagatttactaat

SEQ ID NO: 294837 - DNA, 1721 bp, Cannabis indica
attttatgtgggacaatgtccacaatcaacgactgatttgcaaaagtaagggagacgactgaattgttccatttgggagggaatacgatacggtttagaaagttaattcatttctagagttagttaattagttttgctttaagaaaattcggtttgaaatattttatggtgtggttgtaatttatattgtttttaaaccgtgcaatgtttgcggttttgaaatacaaatttcttttaaatttaagtccatataatttatagctaattttttccttttgaaaaaatataaaattatcattaggcaacaatcaaaacaagtccaaaagacttgcatgaaatcatgcaaacttgccaccaaactcttttcttatccgacgagagagtcagtttaattaactagtaggcaataaaattcgttgatcgattacaaaataaaatcttaaaaacattaatattcctactaattaaataaatatcactcataatagaacgataaatttccatacaagtttcttttttattcataagctttataaccacctgacaatccgtctatacttccacattattgtaacgtggaagaaaacataattggagacccatccaaatagccattgcctttgctatatttggagataacatttccctagtcgcagaagccaacgaagcaacactaacaccattatggtcccgaataatgaccccataacccaggcaacaaatagaaggtcgcagacccgtgttcgtgttaagcttgaacaccccttatggtggaggacccatgggggctccggtgatcgactactcgaataacctgtaacgttcccacttcaagcttccattaggtcttacaaccacgaaatgatgacttttatacacgaatacgtcactttgactgcttcttggaatgacgactaaccctatagactaacacgagtgttttcagcatgttttgtcctcacttgcatgcttcctgagaaagatttcaagaggtttcccatcctgaaattacccaaagtcaagcacgcttaactgtggagttctttcataatgggctaccaaaaataagatgcaccttgttgatataggtagtaccaatcaatccatttaagttctcttcaactatgtactccaatacctatacagtctcataatcattacacttgattatcctcaggcgatgtgggattgcacaacttacccaatatttccctttacggatcactggactatcgggtgtcacacaaccactcctagacgaaatagccgcctttcctccattccttttctaggcttcccaaaaggattgagcgtaagagaaagcccaacctaaaacaccttcctcatctaatagcttccgactatggacccaaagatgcatgtcgacgataccatatacaccaaagaagtgcccccatctcctctttatgaaaaacaaattcatgggcacgcaggagcgataagagattaacccgtgttagaaaagaagaaggtagtacaaagtccaccatcttaacaatagatgaaggcttgagcaccccaaaaatgcatgaaaagaagtttcaatttccactccacacacaagacaagtttgaagagtagaaaccttgtgcatacgtagtatattttcattgactttgaagttttagtgtcacgtgtacacaagtatacacagtgacaaattttgttaacatttaatagtgaaatttaattgacatctc

SEQ ID NO: 294838 - DNA, 4459 bp, Cannabis indica
actttgtcaatgccctggaaagaacctaacacttatccaaggtgtaagtacacctattgctgattatcatgccagtctaaatccagtgtactgacaaatcagggaattcaacttttgaacatataatcatgattatattccactgtgttgacaacactataatcatgaacaaatatatatgttctagacctaatagaatttataatcatgaaataaatcatgtgaaccatgcaacaaaaaaatgatttctgatctttatttattagtaaatctgattattttgaaatgggttttatttagggtacaaaacccaacagaatggtaacctgattttactgtgtagatgcccgaatggtgatggtgccaaataataatgtaagcactaggaaaaaaactcaatggaagagtgaggatttggtcaacatctaatggtgaaaaatattgggtaagtaacccaacattccattacttttcatcagtgataaaattagctactaccccgtctggaggccccgtataacgaatcaggacaaattcattgtgacttgggatccaaggatcaaaaccacatccaacccgtctaccttcaccaatcttccatcttaaaccagccgataaaagctctcatccccacataattccttgtcaattcatagaaggtgaatggccatgatgtgtttccaagaatgaattatttgggaagtattgacttttgagaactttgctaaaaagagattgaggattttctaataatcttcacgcttgtttggggagaagagcttgattaaaattcacaaaagatcgaaagcccatacctccagctcctatcattttacaaagcaatttccaatttttttaatgtatttttgaccatttttcatctgttcccaccaaaattttgacatcatggactcaagttggttgcaaattatatatatattacgtagtagaaaacaactcatggcatacataggaatcaattgaaccaccgctttaagaagcacttttttgcctcattttggaaaaacatttcactccatgtgtgcataagactctaaattttctctttaataccgttgaataaaagtttcttatcttatcttaagtaagcaggcaggcctagatacgtttcatgagactccgaaatggacatagaaagttgtcgatgaaaataaacttgtgcagctaaagtggtattaagggagaaagacaaaacaatttatcagcatttatcatttggcctgaagctcagtgataaatatccaatactctcttgatagcttgacaagagctctcatttgcttcacagaaaagcaaactgtcatcaacaaatagcaaatgggaaattggttcagcacgtcttgtaagcttgaaaccattgagatttcccgacatctcctcaagatgtcatagtcatgataagccttctaaacatataaaaaacaagtaaggtgatagaggataatctttgtgaagacctttggttggtatcatagatccagcgaatttcccattaaattgaaaaaggaaactatttgtggtaaggtaggccataacaagagatatcaaattctcataaaaacccatttttctcataacttcatgaataaatctccattcaacaagttcgaaggccttactcatatctagtttcaaagccgctattcccttcctgcctgaagttttgagtttaatggcatggaccgattcaaaagctactaaaatattatccatgattaaacagtttggcaagaaagcactctgagcttctaagatgatgtttggaagaacatatttcagccttgctatagcacattagtgataagcttgaatagtacattacaaaggctaatcgatctgtagtgcttcatacattggggcttcttaatttttggaataagggtgatgatagatgatagtcttgttcaacgttgtcgggtcacctccatcatttagtacacttaataagactttagtgactagatttccaacaatattctaatgtttttgaaaaaccatggcagacatgccatcaatcctagggcttttgttaggtcttatgtgtacaaaggattctcaacctcagctgcaacaaaaggcttgagcagctcattgttcttttctagtgtaattgatgtgggaatgcactgaaaatggaggcaaaatagtcttgaataattgcagcaatgccatgttgtgatgtaactttagtccttattttagaaatgagaaattttatcctgttatttgcctttcgttctgatgcttttgcatgaaatttttttggtattcttatccctaagagccaaccaatctactcttgatctctgttgccaataagtttcttcttgttctaaaaaatcatccaagattgtgtcagattgctttaacaatgagctgcctcattagtgtgaatggatgcactattcatattagccatatttgtttgagctactgcaatctttttttttcattttacaatatttgccaatatgccatgattgcaagctgttggcacaagtctctaaattgttaagaacaccaataacatgatccatagtagttgacgtgatccagcaaccttaaaatatatatacactctcaagattagacatccataatttctcaacatagaacctactccgtattttcccttgttgtacaactgatgcaatagtaggaaaggttcctgtgattgctctgtggtccgagtgataataatcatggtgatgaacatgtggaagttgaaaagaattctcccattgtgaatttacaaaacaccagtcaagacactcccttatcatataaacaccagtatgattttgatccaagtgaatgcatctccttcaaaatccaattcgtgcaaatcacaatgatcaatagaagtacgaaaggctttcatttgagcttcatttctaagtggacccccaaatttattgtcatgtgagagaattttattaaagtcaccaatggataaccatgaaatcaaaggagcaacatcagcaagccttcttaagagcaactaagaattgactcaattttgagttgtaggtgcaccataaaatgctatgaagtggaaagttggtccatcatctacaaccataaaacaatcaaattaggtaggcccaaatgttaacaaagtaacatcatattgtctttccaaaagattaaaattcctccgctcattcccaccctacctaattcaagaccatggttaaaattcaaagattttcaaaagcgtgaaattgagttactatgaagtctagtttccataaggaaaagtacttagggtagctgctattaaacaagtagttggaggttcctgaacgctttggggttccctaatctccttgcgttccaacttaagattttcatggcactgtgcgggattacaaagaaatctctacagaatcattaatgaaacctttcgaatcaatagaatcagaggaaacatttaggtttcagcaaactctttgtgacgaggaaggggcaactattctagagttttggttttgacaacttttgagcatttgtctcattgaaactggtccactttgtcattttgacaacttatttagtgataagttttccttataataactgttggggagttggttgacatacttagtgatggggtagtcattgagtggcttttaatcgtacgagtgagtaaaatttgaggatgacatgatgaatagaatgaagtcatgggaggataggtagccatagaatagaaagacaatcaacagtcccaatatcaagtacataaatgtttgggagatgagtaatttgtaaagttaataaagaggggtaagttgttgttgctagtggattcattacaaagttagcaattttgtgggattgctcatttggtttaaaccaatagaaagaacactggtttgatgagtcctggatagggtagactttgtttggttcgtatcagtagtggtttggatggtatggtgaggattgatactcaaaaacaagtcttggtgaaaagcaacaatatattcaagggattggtgtgacatagtaaaggatgtcacattcagatctggtatagaagttgtttgttgtaactaatgagattgttgtgtttaacttgggttatgcatcaacaaatcagaaaaagaagaaatagttggtccaggggagatcaggcaggtagtttcccaaacagtcaaagcttttggttgaggcttgtaaatattattatggaattgatgaagtaagttatttttgggcaaggcgtgtgaggagcgaccatgctttcctctatgagaaatttgttctattcttatcatatttggtggttggtagtttagcacctttcatccaaggtccacacaacatatcatcatcatcatttctattgtccatacggtccatgaaagtaattgtaatgacctctttagtaatttggattactaaaggcaattagcactaatttttgatattt

SEQ ID NO: 294839 - DNA, 1504 bp, Cannabis indica
tatttatttatttatttgtgtactatgcatgaacatgcttagtttgatattatcctctataggacattaaattttgagcattaattatcatagtgcatttaataatattagtggaagaacaattagtagatgaccctactaagcatttataattcatggaaataatttaatgtaattaacttatagtaaataaaaaaactgttacatttccaaacctcaaaacaatattgccttcaataatgacctaattttcctatttaggacatttaattgcttttatcaaacttaaaataaaatctcataaacaacattagttttaatgaaaaagttgttatatgaggtcctatatatatctaacattaaattacatcaatattattataaggacttaaaaaatcataccaaattaaaatattacacattattttagacacaataatttataattaatcttaactacaaaattaaaagtaatgtggtattggcataaatttaaatatgacatagaaattgaataaaattaaatatgaatcaaatttaaaaaaaaaatgtgcacattttttgtaagtacttagcactactcaaaaaaatatgaaaacaagttttaaaagtcaataatttacacttgtaaattttactaaaaaaaaataaaaatcttgaagactaattttcaaaacattttgttaaaaaaaagttgaagtaaaatgtggtcctaattgactataatttcttctaaattacccaagtgggattacacaaagccaataaatgtcatcaataaaaatttgaccaaataaatataatcaaaattaagctcaaattaatatagtacagttcaacaactaaatataattattattatgattaatcttaacttggttggtaggtaagctaacaataaacctctcaacctcattgtattgaaatatgaatatagaggaaaaattaggcccaataatgtttttacaaaaatagacacatttttattgtcatttacaagttaatgacttttactaatcaatacattaacaaatatcaagtgggtgtttgttaaataataatgactcaattttcacacattcataattaatttgaagataggtaacaatcttcttcaatattctttcttatgagttatgacaacttttgctaacatcatgctaatgacatatttgcataatatataatttatttatgctaatggtgtttggtttttttttacctcacaaaaatggtgtgtataatatctagacatatgtaaaagagaaaattatataaaatattatttttggtaaaattttaatatttttacagttaaataattttttttatattcttacaaaatattttttcaattttatgacttttactttatgttaattataattttacaattttctatgaaaataacaaaatacaagaaaaaaaatttacaaaaaataacataaaaattctaaaatttatatatttatataataaaagtgcctatctaacggcatttctt

SEQ ID NO: 294840 - DNA, 9249 bp, Cannabis indica
attctcatggccccccatgagaactgaatgtaattacactgtgtaattactaaaaactttccatattaaatattagctactaaaaaatattattttcccatgtaattactaactattttgccaaacaagatattaagaattcatatgtaattaccaccttatatccaaacactttaaaatatagtgtaattactagactgtgtaattaccaccttaataattatcctacctagtaattacacagttacttccaaacattgtctaatgtacgcaaaattttcagcttttattaaaaacaaattctattttattaaatatttttctatctatgccatttttaacatctgtacatatattcactatgattacaaaacataaacttaaacaaagtagagtcgtcacaaagcttaagaatatcacgcaacaccaaaccgaacttcgctaaacaactctcttttttagcgagaagcaagaccaccagctggcaatccgtctcaacatatccacctcgacataccccaaccgaagacataactgaatgcaatgcaacacaacaatggctttagcaatagtcgcgaagaaagaaccatttgttggagtcgatgcagatgccattacatggccttcacggtcttggatcacttctccaaaccccacccgcctctccatcggcctcaaaacctgcattagtattaagcttaaaccgtcctacagttggaggaaaccacggggggacactagtagcagcaagggaggacgactcagcttcaaaagcgacaccttctttttgttagcatcccaaaaattacatgtgaaagtcgaggctcatccaacatcaccttcaatatcaagtactttatggttatggacacataagttccttcgataccagatgcgccacaaaaataccaataaaacatcaatttcattctttgtgagatcagcctcatgttccctaaggaaagtgtaaagattggttctaggcaaataagcctcaggttgcacaaactcaattaattccacaataggcctaagatttggacaatcccagcatggaaagaagttttaaaatccttaccacatatggggcacactctatcagtgggaaccttgtgagtagccaagttaaacgacgtgggaaaccaatcaaggcaagctctccaaataaaaaccttaactttcagggaaagagagaggcttcaaagatacttccaccaatatgagagacccgaagaagaatcacatttcccccaacccaaaagtcttatagcattccaataaccactctcaacaaagtattcgccagagaaattgtaatgctaaattaaacaattgggcccatgaagcgaccatggaatagacaaaacttgctcagtttcatcagtagaaaagagatcatcaatcaggtttctaaaccaattactattatcatccttcaaatcactaaccatcacaatgtgagggtgaacatgaaaagagtaggagagagaggcagtaaatttaagaatccaaacatgatctttaatattcatcgtactcccatccccaataaatcagtaactcccatccatcaagagttctttttctcaaaggatgcttttctaaatgcgggaatctttttacgtcttatccacatcattatccaaagaaatctctttaaaattcttacccgaatttttgaatttaaatcacagagtgtgtccaactccttacccttaataatctctacatgaccagaaacatgtgtcgaaataggaaaaaaaatctttcgcaataaaaaatacttaatttcgagtgccattaattggatatcttttattctgatttataattttagtttttcctttaatattccccccggcggaattagggggcattttctgaccattgtggtttccaccaaacccctcggattaagatgaagatctctactccttcccctcttattaactagaccgcagataccacaaaaataacaaaggtcaggtagcttttttatattatatggggaataacaaaggttcacagtcaggttgaagctttcgtcgaatcatcctagtaagaggatgtgtgatattgaggagaacatgaaccttcaaataacgtcccaaaagaatgggttattttttcaacccatcctcaactaacttcgcatcaatgtcctcacaatactcatttttagaatcatcttcaaccgctagagagatacaaaactgagaaatcattcatattgaaaaaaaaacacactagaaattgaaagaataaccagtggaaagacacttttctcactaaagccaaaaccgttatatattagagagaatttttatctaaaccacttggggctagctcaagtggtcataggtgggtgtgtgagtgttggaggtcctgggttcgagtacaaggtaaaacatgttgtaatatataaagtataaacgcttaaatacaaaaaaaaaaaaaaaatgaatttttatctacaatgtgaattgttattttttgaagtagtaattatggtaaagtttggtaaacacaaataaatgtaaagccagttcaaaaaaaaaaaaaggtaaaattactgtgctttttcatgtgaatttttaatgtacttttcatgtgaatttactgggataacttatttttccctttctgggtatagactgagtcaaagattctaattcttattcgaaaagaaagaaagatatctttcatcctagccttgtgtgttatgtcttggcataggataggactctatacttaactttaagctacatgtgaaagaatcatgcttaaagacactaaacccaaattaagtttgatactgtaaaacgacaccgtcacagtgttttgttcattgggctcaagaagccacgtggcacagagagtataaacttttctggccaaggcaaatcgacaatcatcatggtgtctttctctgccacgtatacaagttaattaataccctatttgaaaatactttattttctacttcgtccttcttctttctttccccatcttccttccctaacgtttcgcctcaccttaaactcttttgtcaatggagttgctttgaccccaagctctgcaacactggcattttctctgtaattctcaaattcttctgcaaatttttacagccaaatctctaaccagaagaaacgttttgtattctccacaagcaaaccttttaaccagaaaaagtttttaaactctttcaaatttttctacgtatttcacacagtcaaaaacctttgcgtagtttcttgttttcttcacttgaagattcttttgcagacccagaaacctctcattccattctccgcaattgctttgaaagttaatgtcattcgtttgattcctcctgtctctgtatttgagtcttttcagccacaccagagttggaggcctaggttttctttccctttgtttgttcttttttccgctttctgtggaccttgttttgggcttttctgaaggaaccctagtgccactctttctcgtctgacttttgcgcatttgtttacttgttttcctttataatcgtcacttgtttggtggctggttttcctgaaataccattgtttgtctaccttctttctcgttttcacatgtataaactcatgtaaggttttgatgacatgaattccgtgaagcgtgtcctaaatacttggggttttttttccctaaatgggcttgaacattaatgagagtgattttagggtttcattgtcatccgagttagctcaaagtatcaaaatagtctatcgcttggattggagatttgcggctgatatgatataaaggaagacctcgaattatctgggtttcgttaacatcactatgcctgagaacggtcacagtttcgtggcgtgggaagagcacattctatgccatgagcgtggtaatcgtgttgttcattattacatgaaggcggagtcaggggatttgattctcgctgttatagggactgagaggagtataaggcacatgatgtatgttgtctcggacgagtttgtagaggcttatgggtccaaagggtccgtcaatgccagcaccaagtggcgagccagaagagaagttgtagagtggcttacatccttggtctccaggcagcttccagcagagttcacaagtacgtactcattgtttacaaattgtttttctctccaagatgtcttttcactgattttgagttttaagattgctaaaggttatgtttggagcaaaatctttatagaatggacacgcttttgatgctactttaggactacgcattgaatgcatggttgttctttccttatggagagtgctcctaaaatgaacattttaagataattctcctttacggaatattagtattccttattgaaattgtgtcatttggctagcttagttaagtgcaggtatgctcttcctaatatgctgcaaattttagatgcctgtgtagagtattgattgttgaagtttgactagcttagtcaaatgaatatgaagtataacatactggtcaaagactctgctctgcgcttgctgaaagtggatgcttgtagtcatgtgaatgtcatgcaaggtcatgtttgtgcataatatattgccacgtgtgtaggattaaatcttatagttgatattgaaagatattaccctgagtaagaatacctttaatttcatctgttgtagtagttgttctgagtttagctgaactataaattgtttggagaagtttctgaatggtaaatgacagcttgtgagagtatgttatataatcacatgttgtgattaaattattttccagtaacttgaatggcgcaacttgtgtgatgtgcacaatcagtttacaggtgacttcttggtagaacttcactattaatttagttgtctctctcaccttgaatactttgctctatcttgacatggtagtagtagtgatgtgaacttaggatgtgtttggttgggggtaatggattggagatgagttcatttttgttcttttcctttatttggttttaatgaaaatgtctttccaactgaatgacttttctactattcattttggtagaatgactatttcaggaaagacaattccgatcaatattgaaagaaagaaagaatcatttttttattactattaaaattaattctattcctattcctctgtattcattacttctaaccacacctttccttaacgtctaggttgaacttgaccatttaggtaggatgctttgtcactatacatacagattcacacatacataaataaagggaaacttataattacttagctcttttggtttaacagacatattttgagattttatgtggttaaattcagttatttagatttgaagccaaatgaagtgatatgattttcttggctcatagattataaacatgtccttataaaccaaaaaagaatagaaaaaaaatatgttatcttagcaaaatttgaagttgttttttagcatcttttaaggaagagtggctattatatgtgtctatgtgtcatgtgtatggggagaaatgtgatgcctagatactgatcgctcctcttgtattgaactttgataattttatagctcatctcattagtcctcaaagctggtagacaaatttgatatgggtcctctgatttattttttaataaagtgattggttggtaagaatatgcagtatattctaaaatagggaatgggctgaatggcaggttcgggcattcaccagcccatgtgagtccaattgcttgattatcattctattcttttaggctggtcatcacagagtaaggttttgtttagtttcacttttcccttgttttgattcttaaaaattgatcgaatcgttcgtgttactttgacataataaattttactaggcattacagtacttacaaaattgtcaagttgctttatattaagtaaatattagttttcaagtcgctgttagctagttcaaaatatagtatatctatcttttcaatttacatgggctagcgtaccctgtatgctgattggtgtaaaagtatgcactccatccattcttatcatgaccaatataagagaatggtttaattgcttgggtctcagaggcctcacaagttaatgttttaagtacctctggatttcaccattggatctgctacgctaagcaagcttgtaaattcatcagcataaatcagattgttgaattttattttttcagataactgtgagtttaacttgacattttactcaagatcaggttattcaaacgtttaagcataacctattaacatttattctacatttgcttttcgtctagttctcatttaaaaattatgagaaagtaagatgtataattaattgatcatttgattgttactttttctttcggtgttttcaaattctaatgggtgtattgttctgatgttagattcacccacgaatgactcaacactggccccgttggctcatcgaactgtcttgtctaatcagatggtatttctatattttttttacttattatctagtatatcttttctcttttaaatactacctaacatgagcaatctctccattgtccagattttgagaaaattcaaagttcaatattcagaaatcaaatggtcaggcaatgcttggatctgtgccaaacagctcaagcactacccagctttttccaggaatggaaatactatagcagtaagttacaacctcatttccattgccacactagctaaattgttctattgtttctagatgtaatggtggtcttctcttttatctgtacaatacatcactgtgttccttttgttatttatgaagattattatttctaactataataatattggacttctctgtgctctgtacgttgctttgttttatttgcatttctatttatcacgatttcaattaatatttatgttcctctgattatcaggtccattcctttgtatttataatggcttcagactaccctcactaccttggttacttggaagatatgtatgaagataggaaagggcagaaaaaggtaaaggtacggtggtttcaccattatcaggaagtcaaggatttaatcccccacttaaatccacatcctagagaagtcttcatcacacctcatgtccaagtgatcagtgcagagtgtgttgatggtcctgcaactgttttgacacctaagcattatgagaaatgtgtagatattgtcacagaggatttactatctggacttcgaatgtgctttagacagttgaaaaaccaaattcttagaccttttgctcttgctaaattacacgggtactctaatcaagcaattctttcctccctagatatcgatactgttcccaagaagaaaatcaagttctctaagttgtgtggtggagatcaggatgaatttccccatgatgatcatgtgagggttggttccaagaggagtagaaattacaaacctgagcaaggactggaaaatggtactcttggttctaaaagttctggtcccaggaatcagacaacaaactgtgaaccaaaatacccaaagttgaaatttaggttgaagaagccaacaggtgtgaaaactgttggatttgaagttcagcctcctacatccttttcggttgatgagagaatagaggtgctctgtcaagatagtggcttacgaggctgctggttccagtgtaagatattgcagatatctcagaaacttctgaaagttcagtatgatgatgttaaggatgcagatggcataggcaaattagaggtattgctgtcatttgaatatatatgtgattgtgcatttgtatgatttgcatcctttaataggaaacgaaaattactaatatgcatagttttattgttgtaggagtgggtaaatgcatatagagtggcttctcttgataaactgggcatgagatgcagagggcgcttgacaattcgaccgtgccctcccaaggattcaacagagattatgtttgaagttggaacaccagtggatgcatgttggagtgatggttggtgggaaggtgttgttactggagttgatgtttttggacccgatacggtgcaagtttttcttcctggtaagccctactattgcattatatttttgcaaatttaaagcatatataatccttcttgtggtattttttgggtgctgatatttatctaccatggctctctttgtgatctaaggtgaagggaagcttttgactatccagaaaaagaagattagggcttccaaagattgggatggatgcagttgggttagtataaagccaaggcctgacatactcttatgtatacctgaaaatatcagtcccagtattactacaaaggtctcaaagggtacaacagagttatctgggtctgaaattcattgcattcctaagcatgaagcttttgatggtccagatggaaaaggattgcatgacttaaccgagtctgttgagcttgtaaaaagtttcgccgattccaattcaataagttgtcctttgggaaatgataagattgatactaatcattttagtgctaataaccatgctgattttgggaatgaaggtgaatcaggtttggggaaagttctttgtcatcctatttttgagaaaagtgaagcaggtgtagcagaaaatatggaagtggtctcttcttagtcttagttggtgctggctgaagatcttagaaaaggcagggttcgttgtttttgtagatagacttgaaatgtgggcatgggaaaatgcaagataatgttctaatttcctaacatcaaaagaatttggctgtggtgtacaggaattgatgtatgtggtaagtgtgttggggtagaaagaaaggtgtagtcatagttaattcaggggcgatggtagtattattagttgtagctcattgctatttgagtgaagtgagaatatgtttatatgcacgttattatagtattttctttgctgagtaaaatagttctatacttagacggctttttgggtttaattgtaaagctttaggagttttgtttgggttaataaaactagagtgtttcatattttattagctatataaagatatagctgtttgcttcctatattatacggtaattggttgctaagcttccatgtttctcctacattagtgtttggccgtgtgagacaagggttaagaaaatgtcaccataatataggaacagaactaatttctattctataaatctatttttatataaagtgtacttatataacagaatttttgatttatgaaaaattcatgggtgactttttatttatattaa

SEQ ID NO: 294841 - DNA, 3858 bp, Cannabis indica
taataataatataattatataaatatatatatttagtgctcaatattaagttaaaattatttaaatttaattaagatgaaattaaaaatattttaaaattttgtaatttttattatatatataacaatatatataagttttttaatggaacctctattatttttctttacaattttaacttcaataatagtaaaacaggttacaatgggtaaacatgaacacgacacaaatttttcaagtcaagttaagattgaaaaaattagacaagaatcaaaaaatgagtccacacaccaaaacggatcatataaaatataaaacgaacacgtcacgattacatgatttgtcacccctatttaaaatgttatcaaaatgcacatgtgcgaataccaccctatgacaaccacataatggttcccatggtgtcaccataataccagctagagcgtaacattaacatagcttgcctgccagtcatagattagagccataagcacaaaaccatgtgcgactgccttccttcctcccccatctcactttccttgtctaatattcgtgaattacctcttttgagcagacccattgccattctcaaaccttttcatcctttaaacccttggaagaagctattcaatgcttctagaaacgacgtatctcttttctgcattcccagtgtagagcctattacaaaaaagaaggtgttagggtcagacaataatcatggaattactagggacggagatgaggaggactatttcgatttcgagactggtcgtaaacaagaaaagcagatttcctccgagtttttggatttgacgggaggggtggtagatgagaaggaaattggaaaaggtaaggtgaaattggaggatgggaatggtgaagttgaggagaagttgagtagggttagtggaacatttgggattaagaatgggagacaagtgataaggaggtcgaacttgctagcgaagcaagtaatcagcatacgaaatgctttggctttgggcttcgtttctcagctttgggttgacaccacctctgtaagcattctactgctgcaattatttctaattttgtgtttttttttgttctttagggtattaattttcttatatcttaatatatatacacatttatgtatgtatagtggcatgtattgttcgtagaagtgaggccaagcttgctatctggggagtctgaacgttttcttttggaggatgttagacaagtaagttcatattctctattgaaatcattctggcgtagtacggtcttgtgaccattcatagcaaacctaatatgaatgttgtatagatataacatatgattcagtatttaatttgttccgaactccattgagattatataggttttccatttgaatccatgtagattttggttttatttcagcttatttatctgtgatcggattttttcccacggatgtaatctttaactttggctagatagatgagtagtgagtaaacttatataagggttgtaatttatttataaaatgttttctttttatgcatcctcgttttttagtcttataattctacatagtcattagaatcactatcattgttgggatgttggacaccatcttgttcgctgtggtcctaagtcctcatgaatttgtttttggatacttttacccaacaatcatcccctcaaacaaacgaacaccttgcctccctacaaacgatcctccaactgtcattctccaccaactagtgtttttccctccaatgcgttgaagccatacatggggcacctctacctcaagagtttttgttgattattgaagctcaactcttttgtttggtgttatgaggattcattcacatgactaactttgggacacgacttctgataccatttgttgggacattggacgctatctatcttcacaatggtatgatattgtacacttctggcctaaatcctcatgaatttggttttgagaaccttctcaaaatgtctcattaccaatagagatattgtctattcttatataatcatgatctgttctaattctagcaagtgtgggactttagttgtatgcccaacagtttcactcaacttgtgaatacttcccattagttctagatggttgtttaaagctacttgggcgatcaatcatgactctcaagtgaccgtagcttgtagaattaaagaagaatatgtcctcttctattgcgaagtgacaaactagtacaaacctcttcttttgaagctgaccttcaagtactgtcttttcccttcaaaatgcagtttagaaggaccagatggaactgcagtcttcttggcaacatttgtggttgcggcagaagagccacattgttaggacctaggattagtgtggtgttctaacatatattaaataaaagggtaattgggtcattgtattaagaggagtgtttgagtgagattacaatagtatatatagaatacttaggaggattggtggttatgcaatgttttgagtaaatactctaattgcaccaaaggagcctaagggctcctatcttttgtaattgaatttctcaatacatttaatatacaattcctactgtttggctactgttttattgagttcttgatccgaagatctcggggcttatcaattggtatcagagcggaagttcttggtgatcgccggtgactgcaaaaatggaatcaagagtggttggattgaagtcgatagaggcggaatctgtgagaaacagaatcggtgataaactcgaatctgtggtgatcggtcgaggggagttcaacagaagaaacttggatgtcgcggggatgcgatctgattttcgagcttcgaaaattgaattgccgctgttcgacatcggagatgaccccgatgaatgggcgtacacagttgaatggcacttcagtttgcagcagttgacaccggctgaaaaattagacgctgcaattcatagtctcggaggagaagctctgagttggttctgctgggaagatcgtagacatccttttcaaacgtggaatgaactgaaatgcctactgcttcgcagattccgttcccaattcacgtgcgaaggttcagtgtaccatcgaaggttcaaggctgaagaaatggacagggcaataagagaacaccaacgagcgtttgctagactcgatagcttcagggaaactatcgctgctgcaccaccatttcatgaagagacggagaaaaaacagcagctgaggacatcgcctgagaggaaggctgtgttgaagacggtgccggatatggaagttgttccatgtggttcgctcgcacatcagcaacgaatgaatcggaatgttggtggagaagaaaacaaatggacaaaaaggggaacgccgatgaagacggagccggagaagaaccaacagtggacgtcgttgccggagacggagaagagggtcgaactacgggtggtggtgttgggatggatttcattgccgatcccaaaaccgatcacgtcgtgggcagtgacggagccgaatccaccacggaagtcgtcgccggagtcggagaagacgggggcgtggacgctggaagcttcgccggagattcagagcttgaaggcgaagtcccgaggagcagtcgcacaagagggacggctggcaaagaggctgatggtggggaggagctcttttgcactcaaaccctaccaagtaaggcccaagcccaactccttaaaatgtacttcagctttggcccacaagagcaacattaacccaatgggtcaatttgatttacttacttcatcttgggcccagtcattccaaagtttacatggctttgaccaagttgtggtcatggcccaattaaacaaaaaaatgggccattttatttttaaa

SEQ ID NO: 294842 - DNA, 9747 bp, Cannabis indica
aaagttcaggggtcatgatttagcacatgtaaaagttcgaggggtatgatttggtagatatcaaagtctaagaagtatggtttagtacataaacaatcactaaaataataaaattaaaagaaattagacaaaagtccttaaatctaacaatctcaatagttcagggagaatttttaacagtcagaaaagttcaaaagacataatttagtacatgttaaagtttaggggacaaaatcctaattagccttagcatcaatattatttgtatcgtacgttaaatgagagaatattgaagtcaactatttatgtgttttttatgatttgcctaaaatattattaagatattgagccgttaaattttgacatgtattaaattaactctttaattttttagatcgttaaaatttttctctattaaattgttggatttaaaaattttcgtctaattagagtaacaaaagtctaataaagatgaaaattcaagagacacgatttagtagacgttaaagtttgggaatataatttagtatatatcaaagttcggggacacaatttggtactaaaacaatcaccacattaataaaattgcataaaactggacgaaattcttaaatataacaatctcaataatttagagaaattttttaactcatgatttggcgcgtattaaaatttgggggcaaaaaatcttaggaataagttaaaaattactattttttattacacattaataaaatataactctaaaataattttaattaataaatactttttttttataatcaaagtactaaatataacctcacataaattattaaaattagagtctctaacgcacctaatgaaaatatgacctataaaattaaacaaaataaatagtaataaaataaagataaaaattaaatataaagtataattttctcaaaatctaagttgagaggcaataagtgaaatataagataataaaggcagtgaaaaggatttatggggaaattgaggggtttgtatgaaaataaaattctatatataaataagtagaaaaacaaaagaaaatgaattagagattagaagaagatgattgaaaaagtgaaggctgtggtcgttttgagaatcgtctattcattcttctttttttctttttaagttcatttattgataatattgattgaattgaaccacccataactactataccatatatatacccaacctaaacccaaaccaaaccaaaccaacttcactccgatcatattccagtaatcctcactttcctcttcttctcctctcaattctaatcatggcggaatctgttgagcttcctactcggcttgggatccttccttttaggaataaggtgcttttacctggcgccataattcgaattcgttgtacttcgcctagcaggtttgtttgttcttcgattttctgatgtgcttattaagtttatgtttgcgatcgttaattgattattcgtttggttacggatgaaattcaagtgttgtgtttgagaattgtgtgtgaattctggtctgattttttgtattttgaaaaaaaaaaatgatgagagagtttgtttattaacgaaatttcttcgtggagtgaggagtttttgtttttagcttgttttgaagcatttttacgtttcgtttgctgaattggttggataatagaaagtagaagcgaattctgaaacaagtatgggaataatatgtttggttggttcttgtatttttctccgtcatcgtacagtacatggttatttttcttgtgaactcctcaacatgaatttttggtgaaagattcttaatgatcgtagttaatatatttatatttttcgtggggagtgtcatgatgttagtttgttaagctgattagttattaaatatgtgaaattttgtatagtttgtttggaattgagatgaagcaagtggtcttattaatgcagtgtgaaattggtggagcaagagttatggcagcgagaagagaagggattaattggcattcttcctgttcgagatgctgctgaggcggcagcagtggggactgtaatatctcaaggtgaaatttgagctgttattttatttggcattgggaaatgctagcagtgtattaaatggagtaattttgaataggtgttggaggtgattcaggagagagaagctcaagaattcaagttggtgcatcagagcctcacaagcttgatgggaaaaatcatcaggaagttattcattggcatacaaggtatatagcctggtcaaacatttgtaccgggtttatttagtttacatcgtttgcaaataaaatatacgaggcactccatgtaattggtgcaaattatagttttcttatcaaataacttttaatctgttttggatggcctttaaacattttagtaagttatcatattttttgggttcctcctacatttactttcgttctgttacctggttgcaaaattaacctatcacttaacttgagtgtgtgcctggtggttggttccttaccaattgtggtggtaatatttcatatgtattcttaggggagttgctgctcgtgcattgcatttgtcaagaggagtggagaagccaagtggaagggttacctatacagttgtccttgaaggcttgtgcagattcagcgtacaggaacttagcacaaggggtacatactatactgcaaggatatctcctcttgaaatgacaaagactggtaagctttcaattagaagatgctcttgattaggtttttcagttggctgactagtcatgagggattgggcatgttatatgttactgtcttttagaatatgcggtcttagtaacaactaatgagaccgaattgtatttccaaatgactgtttcttttataataattgaaggctctagcatgaaatataaatgaaaattaaaagttctcatgcttattatgcattaagaatatgaaagaagctagacaatacataagtaattattctgtttataaagaagaacctagagttgaatgttgtatatactggcttatatagaagatctctgctactgttcatgtggttttgtgtgcttttcctttcttcatcacattgactttgacaggatacgcttcttattctcgttgacaatattatttttagttccttctttcaaatgacttgtgttgatttagtttccaatttgagaacttttatgatatttttgctgcatttatcaagaaaatgacagtactattattaggcccttcagcttattagtactttttctccccttgtttctattggttaaatagagatggagcaagtggagcaagatccagagtttgtaacattgtctcgtcagttcaaagcaactgctatggagctgatatctgttcttgagcaggtaaaagctttgacaccagtttatggggatactttgtagagaataaagtttgtaacttggctatcttcctgggatttttggaaccagtatctttttctttctttgctccttgaatgaacccttaagattgtttaactctcagactgatgtctcgtttttttttctaaatgatgtatgatataacactgtttgcataatatgttctgtcaacaatgttggagacagttgatttgctatatattgatttgtttaatttaatttctgtctatgcttgtgtcatacaacctctttggcactaacttgctttagtggtgggactagggtgctctgtaaagtttggctgcaatatctttttgtcatggtagagttgtactatgagttatgggctttgtggcacagtattattgtcaggcatattaccataggttgtggacaatagtggtcttggctccatgagtggggtgcaatttgtttgaaatagggaaaaaaacattatttatcgatcgcagaactctgtcagtctctctctcaccacacacacacacagttgaacagtaattaatctataattttatttctatttacagaaacaaaaaactggtggaagaacgaaagttcttctagagactgttccagttcacaaattggcagatatatttgttgctagctttgagataagttttgaggagcaactctccatgttggattcagtagacctgaaagtgagactttcaaaagctactgaattagttgatcggcatttacaggtaaaaccttaaattactcttggttaaaatatgacatccagcattccttatgcttttatccactttcatgggatcatatgagtgttcctcatgacagtccatacgagtagcagagaaaattacacaaaaagttgagggtcagctgtcgaaatcacagaaggagtttcttttgcgacagcaggttagctctcacataatataatgaatttgcaaaggaatgtggaatgtaaataatataatcctatctgcattaggtgtaagcttttttttctggctgtagataacaatctcaggttatctatagtgtcctcatttcctccatctcattactgaaagaatttcctttagattgaggtaaaaatttaccgttcgtgtgaatccacagggagtcaacgagatgagcaacgaagttttcttcccatctctgttcccctcacccaccaagatgaaacatatagtttttgcaccctttttctttcatctagaatgcgtagctatttttctttagtaaaaaagagacaagggccacatgtcttagactgaccccaccccacatttcacctagaatacatgttttatgtaccttttctaccttaatctgcctcgtatatctgttaatcagttattcatcagtgctctattgattggttaagagttttaaagtatttgcataagagttgatcttttgggacatgatcagtatagaacattttgttcataatgatctttaattatttaataactgtaagaatttggtgcagtttctactttattattctttatcctgttaaatttaggctaaattattgttgtccatttttttttttcaaatatatatattttagtatcttatctgaccaaaatgatcttttcttcctccagatgagagctatcaaggaagagcttggggacaatgatgacgatgaagatgatgtagtcacactagaaagaaaaatgcaaagtgcaggaatgccttcgaatatatggaagcatgcacagagggagttaaggtatgatttccagagacaagagaatcaacgtttgcatctctgtttgtggctcttagtaatccattttctatttcctgtgattctcctgcaattaatacaacttcgatgttttgtttgaaaaaaattataattatggggattaatttctaatacaatctctcttatttcctgctctgagtttggtatctcagagaaatgtgagagagcaagaaaaaaggatatctgtttatgaaacttttaggagctcaatgaggactaatggaggataaactatcctcaattaacttaaataggctttgtttaagtattttaggaaacaaacaccagaattttttttcctaaaaaaattataatatttccttcttttttcatgtgtcttaggaggctaaaaaaaatgcaaccccagcaacctggatataatagttcacgtgtttatctggaactccttgccgatcttccttggcaaaaggcgtctgaggagcttgaactagacttgagagctgccaaagaacgtcttgatattgaccactatggtttagtcaaagtcaagcaacgtattatagaatatttggctgttcgcaaggtgagaattctaatttttgttgtcctgtgtttatggtgttttatgtttggaagtttatgctcatagggattcaatcaaattctgttgcagctcaaacccgatgctagaggcccagttctgtgttttgttggtccaccaggtgtagggaaaacatctttggcttcatctattgcagcagccttgggaaggaaattcatacgcatatctcttggtggtgttaaggacgaggctgatattagaggacataggagaacatatatcggaagtatgccgggaagactcattgatggactaaaggtaaattgataagacattgctgttgtgaattcaatttacccaaaaacaattgatggaagattctttgtttaattttttgttttgaagtgtgcacagttgcaagtaacgtgttacaataacataatgtaattagtttaattaattttaatttcagagagtatctgtatgtaatcctgtcatgctgctagatgaaattgacaagacagggtctgatgtacgtggcgatccagcctcagcactactggaggttcttgaccctgagcaaaataagacattcaatgatcagtatcctacttcgtgatgtctttgtgaatcatgattgtcaataaagtggttttatttttatttctattgtttcttcgacaactttattcacagaccttgttgtccccttttactttatttctagaaatccagctactgcttttaagataggtgttttggaagtatattttgctaaactcatacaacgaccgatggttgacataattgctttgtcaccaggatgagttgcattatttgaacatgctttatgtaatgtgtgcccagtgtttcattgcatttccttccttcccctgtcctactttggaagttccataggaaaacagtgatttccaagtgatagagattttatatgagatgaggttttgatcatttattaacttccaaggtttgacataccatgttgctgtatgttgtttttcttgcccaaaggggagtgagaaggttgttttgatctggtagatagttagattttctggaagtcttttagtgccttcttgactactcttggcattttcataaatgcctctctatccaaagtgattccttaattaatggtctatagctatttgaatgttccatttgacctttcgaaggtaatttttgtcgcaactgcaaatagggcgcaacctattcctcctgcactcttagacaggatggaagtcattgagttgcctggatatacaccagaagaaaagctgaggatagctatgggccatttaattccacgagttcttgatcagcacgggttgagttctgagtttctccaaatacctgaggtattaggtttacttaatgatattgtgttatgttacgcatttgaaacatacattgatgctaaatcattattgtggcaggccatggtgaaactagtcattcagagatacacgagagaggctggtgttcggaatctggaaagaagcttggcttctttggctcgcgctgcagcagtaagagttgcagagcaaggacaaactactccgctgcacaaaaatgtacaccagctcacttcaccaattttggaaaatagacttgctgatggagctgacgtggaaatggaagttattccaatgactgaaaataatcatgatatagcaaccacatttaaggttgtttcaccactaattgtggatgagactatgttggagaaagttctaggggtaattgtgattcctaccttatatttctttcttattatctggattattttttatttgagattgattacactatgctcccttgagtttatcctcacatctttcggttgtgtccatcattttaagtcgtaagcttctaatttatggtgatgttcaggaaatagagcaagccatttgtgatgcttcatgttttatcatttgtgcatttgcagttgtattcatcatgatattttggagatttgatatatttttatttgtttatactgcatgcagcctccaaggtttgatgacagagaagctgcagagcgagttgcttcacccggtatatcagttgggcttgtttggacttcttttggtggtgaggtccagtttgtggaggccacggcaatggcagggaagggtgaattacatctaaccggtcaacttggagatgttattaaagaatcagcacaaatagcattgacatgggtaaatttctctacaaaaagaaaaacttacacatcctaattctcagtgataaattaaacatatttgcttttgaattgattttgttgcttagaaagctagatcatcaaattgatattgtttgtctgtgatgttttgtacgggtattaaatttctttggctggcctacaatgtaatcatttttatttgtatgtataaatattgaagaattattcaaatgttataggtaagagcgagatcaactgatcttaatttggctgctgctgagggaatcagtctactggagggtagagatattcacatacattttccggccggtgctgtacccaaggatgggccatcggcaggtgtaactttggtgactgcattagtttcactgttcagcaaaagacgagtcagagcagatacagcgatgacaggagaaatgacattgaggggtctcgtacttcccgttggtggaatcaaggataaggtttacttttctcactctattttctaatcctttggctttgtaacttcagctgtataaatttttcaataaatcaaattcttcagcacattgtaaaaaacgtctgaaacaacgatttgttgtaaatgagtttatttagaagcacacaagttaatgcagaaaatgtatttgtgcagatattggcagcacatcgatacggcatcaaaagagttatcctaccggagagaaatctgaaagacttggttgaagtaccaccagcagtgctagccagcctagaggtaattgtttttattataccagttaaaatctctgaagaaatgtaatggaacctttgtcatttttcttaaaaatcttctcaacagattctactcgcaaagcgaatggaagacgtgttagagcaagcgttcgaagggggatgcccttggagacaccattcaaaattatgacaacacctataattatataggtaaggcatctttacattgggaaaatggtgagtaaattgctttaactgattggccacacatacatgagagacatatatatatatatatatacccttcagcaagatccaaagtgatatactgttgatcaactaaaaatcatcatggttggagctcatttcctcatgaaaaaaccatccaaaatgaagtaaagtaatggttggtacatgtaacgtgatatttattttatttttttttgcttaccaaattgtaaattgagtatggcaaccgcttccctcaattttatttctgatataatcttaaaagtcttttatgtatctataaataacctctatcaattattcattcgtgggaatggttgccctattcacatgtgtacgtatatccactactttattttgtagaaattatactattttatttactgtcctattatttaattactgatttattcttgttcgtacaaataccaaaaagaaaaatatatatgtctattctaattatacacatttaatatatgagaaatttttgttaaatcaaattttgagattttttttttttagatttttgtctctcgaactatgtattattgtaccatttgaactttttatttcgttaaaaattatccttaaactattcacattattataaatgaattttgtcaagttttgttgatgtgtataatttaaaattaaaaaaatgtaaaaattatgttatttttaaaaattaagaaaattacgtaaaattaaactaaaaggaagaaaatttgtgtattatttgattgtttgcggttgaaatcgacagatagttaagttaataaaatagagaaaatgttgtccgatttttttaaatatatttatcatattttctaagtagttg

SEQ ID NO: 294843 - DNA, 3544 bp, Cannabis indica
ttccatactagtaacacgggttaaaaaatgaactaaagaaagaacatagagaaacttttattatcttgaagcttagaaatataaaatataaaaaattgaaaacataagatagacagacttctttggcaaccagctctcagaccaattctccagtttcctatgtagatatcttttccgtcaattttcccaaagactccttcccctggaaaggtttgaaagtcctccacattttcgggttttgattcaatggagtgtaaacttccataaccaacaagtgcagctgccattggatggcttgatttgctctcaatgcttgaaacccttcataatttcaataaaatatttcagtttctattttctgcagtgatacaaacccttccaattacatgtatcagtttctatttcttactatctaattctcaaatacttatcagttaagtgtgaaaacttaccaacagagcaatgtattgaggctgatttcatcacttacagactgaaaatcaatcaccataaattcaccccttgtcaatgtcccagttttgtcaaaagctactgttttaatcttcgcaagaagttcaagatagtctccgccttttattaaaagtcctgttgcggccgccttcgaaagcgcacagaaaatggtcacaggtgtggagatgacaagtgcacatggacatgtacttacaagaacaaccaaagccaagtgaaaccagtactcttcatttggaactcttagtacggccggaataacagcaacactggctgatattatcataacagctgcattaaagtcacaaaaaatgaaaggtaaacaacaattagatgaacaataaacaaaatattagtacatttaaataaaatttgagaagaatgctgccatttcattcatctttgagagttaatcaaggtaagaactttgtcaccattaaacaaaggtgcagtttggttgagacttgaaaaggtcactattacagcactgaaatttcaagaagagtggggagcaacttacttggaatatagtactttgcgcactcatctataaatctttctgctcgagactttttcttaagcgcttcttcgacaagcttcgtcattcttgccaccacagagtctttggctaaggcagtagttttcacactaacataacctttcaaattgacaagaaaaaatctcaaaacttcaagcacaaaaatgtctgactttctatgaaattaaaatgatgcactggactgaaatggctaaccgtttagatttatggtgcctgcccaaactgtagagtcctgttcttttgtaactggaaaggactcaccagtcatcagtttctcatcaacttcacattttccttcaacaacaattccatcaattggaatggcctcaccagccttgactgctaggatagtgttcaactcaacaacatcgacatcaacttgttcaccggtttcagctattgtagctttctgaggagccatgtttgtcaatactgacattgcagccatggcctgtcatgtgtgaaatatgtggaaaaacataccagaaatcaaaaggttatcttaggccattgcacattttataaataaaaagatacagaagtaggaatgtattgttctatttaaatacctcatgactggcttttgattcaagccactgagcaatggagaatagaaagacaatagttccagcttcccaataatcctgtaaagcaagagtacctaccactgaataacatcaaatgaaatatgcattagttagcattctttagttaaatattattgtcatttagctaaattaaatacttctgctcaattcagtcacgatctgttttgtgacattattgtgcatggatacacaaaatgaaagggttactagaatttgagtagaaatgtttacatacctgccaatagaacaagaatgtttacattaagtgtgaggttccaaatggaggtaaaacttctgataataatggagggagcaccaatgataacagagccaagggccaaccactctaagggttgatataagaacttcataaacgacatagcaagtaataatccacaggccatgaccgatgggactggccatttcttctttaagtatttttcatctcccttttgcttaacactagcttccaaccttgccttgttcaaggcttcaactgccattttaacatacataaattacactgaaaaaacatagatatgctaacttacatgcgttgatttatatagggattattgtgacataattatccaaaattttgagtatgtaattggtataaactcaatattagttttttttttttaccggcaatgcataaatactcaatgttagtaaaattataattccgtctaattttgtcagaactaactccgttagtattttaattaggacacacgtaagacccaaatgctaaattactcgctatgaatggaaacatataatatcagttaattttaaaaactaaatttggttataaatttaagacactaacaaagtctgtaatgaaaaaactaaatgaaaattacagatttatttacattgggtacttaagctgccaaaaaaaaaaatcatacgccgcttataaacttaaaactttagatacttatgtcgatgtttactctagtataatctatacaaatattatcctccaatatatcacttttgtagcacttaaataatttatttaatttttagtggcgaaagtacctaaataactatgtttgtagtacttaagtacattttttttgcggtaaaaatatctaaattattatattattttcttacaacgaaaggacctagtttattagtaaactagtaaacgtagtcacccttcacgcgattatgtaatagaataaatataaattttgcttctgcgttttaaaaattattggtcattctctctatttagttaaattataatttagatatagtgtttcgcaaaataaagtaaaatgatacattgagtctaattgtgatttaatatttttaccttaacattaaaactttctcttcctaaccctcaataacgatcgtgatccgatttatgatctaattacactgaatcgatccaattacaacgaaccaatcaaattcattccaattacaaaaattggacatccagttatagttggattatattggaagtgagtagttgtattttagaattgaatcaatttttgaaagaaactttcaaaatctgattaacaactgatctaatctaattacatgtaatacatattatatttgttcatctataataaaaaaaatatttaaatttcatttttatttattgtttattaatttttgataaatcctattacacctaattaaagaaatccatataataaatactcacatatagttttgtttttatgtgtttttttagttaatattaaaaatcaagtattgaatagagatactatttatgatacccactcctagtctaaccatgattttttttaactaatgtgtcaaagaatcgtgttgtaaataatagttttcttatggttattattttataatatatttttttttcttaatactgaaa

SEQ ID NO: 294844 - DNA, 5366 bp, Cannabis indica
catacatgatagtaaatagatcctggtaaaataatttccaacaatgtgtccagtggttggtatagagttaatggtcaaatttggatgtgcatgaagatcagtaggagttttctgatgtgggaagatattggtattgatttgtgatgaagaagagtttggttgtgaggtggtattgataaaggggctgctggtgtgaccatgggtgttgtgatcaaaagggacaatagtggagaaggaagtggttataggagaggaagcagtgaaactatggacattgacagtgggattggcattgttcgaaccaacattgttattgtagtttgggggcttttcacttgaagattcaccagcataaagcacacgtggttgaggctgagttcggttgtttaatgctgggaatgtggtagtaaaagatgagcgagccaatctagtaagtagaagccaagcattacccttggcaaaatcagttcgctatcgatcatagccattagatggtagtttggcgcctttcatccatgggccatattggaagtcatcctcattgccattatctatatgctccataaaagccacacaacgctcaaaaggatgtcccaaacgaccacattcaaagcaaaattccggaagccgttcgtagcagaagtcgacccaaaattcatcttttatcctaggcaaacggatcatatggcctctcaacaaaaaattgtttgtgcaaagtttgacccgaacccgaagaaaagggccccaaccttcgttagtggagtcctcaaatacttcaataaattctccgacaatatttccaagcgcttcagccagcgcttttgacttgcttaagaaaggaagtcgataaatttgtacccaaaacgaagtaaaaatcatatcttcctttgagacattttgcagaacatctggcgccttaaaaataatgagatgattttgaaagtgccatggttctttgttaagtacccggtgcatatcgccttcacaaccaaacttgatatggaacaaaccatcttcacctttattttcaataatcaaaactggaaaccgaccattccaatggccggacatttgatcaatgaacatctgttggtatactgtctggtgagtaagaactcgagccagaagagtatgtgggctactgtcgatcagattgggacagtactcaggcagtgaaacaattgaacgctcttcctcagtgagagaaagggtgttactcatatcttgcattagtggatccatgggaaacagagaaaataaggagggtgggggtgaccggcggtaaggatgcaggggaaagaggaaagagggaacggttgagattgacaaatttaaaaaaagatagatgtaattagcagttaaaatacaaaggggagttagctaaagacataactgatacaggccccaaatggacacttcctaaattacggctttttaaaaaaatttagatagttcaaacaaacaaaaataaaaaaaaaaatagaaagttataaataacataataattaattcaatttaactaagtataaaaataaatttcctattattacaaattgtaaatattatttatttagaacatgtatcacaaaaattattgatatgataatttattttctgttaattttttatatatataaattagaagaataatttaaataatttatttctattaaaaaaaagtccagatagttattaaaaattatcattaattacaaacataatttattaaattaatttttatctttttcatttatcttcttataaaaatacatgcaatttatttattaattcaaacatttaaaatatttgttacaaaatcctcatctttttttatatttttaaaaataacaaattatgttttcaattttaacatcattactttattaataatatacacattcaaatgttatattttaaattatatcactcaaaattggccaacaccgaagcataacttagttctctaattataaatataaaaacaatataaaaaaaagtgcaaaccacaatataaatattttgtaaaaatgtgagaataacagtttgtatttttgtaaaataaatttctaatccataaatatattttaaaaatcgtgaatatgtccaaaaaaagttctcctgctttacgtttgggataattacactaaatactgaaattttcaatttttttatttttatactgtgaggcaaattttttttttaaaactactatgttttttttttcaaaattactgtgtaaattttataatgtgtattatgttaagtgtttactgttgttctacagttattttttagttattccactgttgtttttagttgttctgttttgtatttaagtgttgttttataaaatacagtatttttgaaaagattttcgtgtgagtatttttgtaaaaattaatccaaattccaatatttttaatattcataatcatatgggccgaaagcccaaaagtatatatttttcaaagttttctctaagaaagatgcttgtttcgggtttcgtggcatcgccttcttcgactaagcttaacagatcagggtcgtttctctggtttggtacattctcacgattacgcaaactcactgatcatctttcaacttttagtaggtatgcttttattgatctatcattaatgtaaattttcaattcattcttaaactttgctagatcttcgacgaaattcatctcgtgaaattgttctatttttcttcccatttttgccgcgaaatcgctactagatctgtttgcattacgccaattgtattgcgattttgaaacattcttttcattttccttgataaatatattattactttgctatttccatctctgctcacactctctcctaagctgattttgggtttgttttcaactaatctttatcaaattcttgtcggtttttctgtgtaaaactgtttgttttctaatttgtttggttctaaatttgctgatattcgttttttgattatttgaatttagattattgctgcagttcttatatggctaatgatttttttcttttcatgcgatttgattcggtaggccttaaattgaagaatgccttcggctcaggacccattttatgtggttaaagaggagattcaagaatctgtaagcttttaacttgcttatgattatgggatttcgtatgtatgtatcatataagcattgttttttaagatcccattattatgcattgttagtattagcagttgcgctttagatccttagagctccattatttaagttacaaaaatcatctcctggattttctcaaattccatttcaccttttgtgatggaccaactataaatggccgttttcatactaatactagcatagcaaaaataccagaaggtggtgtggctactagataattttattgcacgttggagttatttgttctttttgttttgtttgtcagattgacaaattgcaatcttcatttcatcactgggaacgtattccagccaatactggagagcaaatacatctttctaaagagttactggctagttgtgggagcattgactggcaggtacattctgaattacagcattttatgccttatggttacctctctgttgctatcataatacgtatgtctagcatttgctgttcaatgtaagaagatgaggttaggctaatttgaacttaaatggttttatctttacaatggatgtgacttaatcagcattttttttttttgataaatttctccaataccgtggctgagtaataaccaccgatcattgttttataccaacactatgagaaacatggcttgttatgaattttgcatgtctatttgtctttgtttcaaagtttcctgcaatcactgaaagcttactttcttgataggaaggtggatgaattggacaaaacgattgctgtagcagctagggatcctgctttatatggtattgatgagacagaacttgaaaaacgaaggagatggaccagcaatgcccgtactcaggtatttttagtataactgtattgaatattttctagtattggttaagagtacttgtttagaattagattcattgctattggattttatagttctgttatttattcttgacatgtagttcatttagtagcaatatacctctctgcgagcttacctaactcttttaaattattgccatatttttattaggtgagcacagtgaagaaggtccttacaagaggaaaggagtcaaatggtactggcaccacatctggaaatgcaatgcgtcgagagctaatgaagctgccaaatctgtatgggacagatggaactgacccttacgctgccaatgataatgatgatttcatagcatcagaatcagatagacaattgcttcttataaagtaccttttctttctcccacacctgtatcttttgatagaatcagatagatggttgcttcttgtatagtagagtacatgttctttcttccacacctgtgccttatatagaatcagatagacggtagcttcttataaagtagagtatcttttgctatccactggttccttttgttcttatttcttactgacaattagaattcttaggatatccttccccatgtactgatacatatcttgtttgtttataattttatttgtaggcaacaggatgaggagttagatgaacttagtgcaagtgtgcagagaattggaggtgtcgggcttaccatacacgaagagctccttcaacaggtaaaattccatggtcactcaccgtgatgttataagttgcattttttctggtgccttgaacaattcaatggaagaaattgattggaatttttggaatacacgtgagttttgaagatttacttgaagagtaacttttagcgcctagttatttatagagaagaaagtgggaaagtaaagagagtaaagaaaaatgagaagaaaagataaaattgagttgtttggtaagaatgaaaaatagagagaagagaaaagtgagaagaaaaatgtggtgatgggttcaccaatttttctctctaatttggaaagaaaattgaagagaaaagtctctcacaaataacataaagactaaaacatatttatacatagtattatatgaataatttcagggataatatagtaattttgcaatataccatattttttccttgctacataccacacaattaggaaaacaatgtgttttgtttctttctgtctaattttctttttctcccatattttgtttcttctgttttccttagtacgtaacatagggtatgtcacacatacggcatttttatgctgagatttcacatatatatgtatatatatatatatataatgtataaaagaaattgttgtaatctttaaaggactgaaagagcacggtgaa

SEQ ID NO: 294845 - DNA, 8866 bp, Cannabis indica
ttacttcatactatagtttcacatgtttacatgaacctcacatttatttactaaagaacagaaattcatctacatgtcatctgttatatctcatttcaaatattatagttgctgaattttggtacggtttttgttacactaacttctaactctagctgattagcattatctttttccattgacatgttaaatctatgctctttaattttttggcagttgccagagttctgtaaaaaggtatacgctaccttggtcatcaaggaaatatttggtgttgcagagttaggcctccctatccattgcatttgttatatctataaatgtttcttcctatttaaaacttaaaagcatactcaagcctttattgaaggaattttgtttgccccacaggcccaattaatttttattgtttctttgatcctcagtgaggatgccgaccaactccgaatgcacacactttctgaagcaggggacgttgaatcactccagaaaatggttgatgacagttcggattcagaagaaactattgaggacccatctgaggatcgttgattcatattcattcaggataagttttaaccaatattgtgaggattcactttatgcctttatcgacaagaaaaccggtatagaacagttcatgagttagtgtttttttcttacaatatcagtcatgtatgtagaaaattttgggggagagcatgaataagtagtttgttgaaaatgtaaccggaaaatttatatattagtttcttattgtgagaaatatatatactctggcctgattctatgtccttggcatccttgctgttatttggcttcatatgaagtcagtgaatagtagagtaggcctaggtgattcactcctctaaaaccaagcttgtgctgaagggcaaccaaaggtaaagatttttaggagtagaccagattgttaatttgctattaaaagagtaatatgatatgtgtgcattggagactattttttaagagtaatagtactagaaacaccctcaaattacacaaaaagttctacacactgtataaattactgtgcccccatccaaacgcctcctaagagaagactactgaaagtacgtgttatcataaattgtactgacatgattagaatagtttttttctcttttgatagaaacataattagaagagttaaagtgagcttgataactcaagtaacttttcaagaaaaagaataacacaagtttttgaatcatatttttgtgggtagagtccatttggcctacatacatgaaagtgaaagaagaaaaattcaaatttcaaaaccaatatatatatatttaagaaccactttattggattaaaaataaaagggcaacattacaaaggagagagattcttctaataaaacttattgtcatttaaaaatatcaaagaaaagttgtacaaaaaaactttaaagcctgaaaacaaagcttcaaaagctgaatatgaatattgaaagcaatggccgtatcatttcaatcaatacaataacaggacgtggttttatttatagctaatttggactttaaaattataaatcactatatttactagtggtatatatatatcacttgcaaaatgtgtaatctcttgtcaatatataaaaatgaagaagaggttgggagttggcaactaaccaaaccaaaaaaacagacggagatctcgaagaagttaaataaataaaaattaatcgtacccattccaaagtagaagatcagtacttgattgcttcattccctcgattccaaaatgcttcagcaattccgccaccggattatccccattcccatttcttcttctaattcctctgcttctacttcttctgcttcctccttttcaatctccgttccatttccgaattcccatctcaccaaacccttccattcactcctccaaattcaatgcaaggccgtcgactctaagccattgcccgccgttggcccctacaccgggagggatcccaacgtccagaagcccccatggctgaagcagagagctccgcagggagagaagtttcaggaagtcaaggaatcaatctcccgattgaaattgaacaccgtatgcgaagaagctcagtgcccaaacattggagaatgttggaatggcggcggcgatggggtcgctaccgccaccatcatgctcttgggcgacacgtgtactcgcggttgtagattctgcgccgtcaaaactagcagaaaccctcctccgcctgatcccaatgagccccagaataccgccatagccattgcttcttgggggtatggtttttgtttctgttgcatagttttagtttatgtctcacaattactttttgtccataatgcatagaagtaattggattgcgttttcgtttttgtttgcagtgtggattatattgttctcacaagtgttgatcgtgatgatatacctgatggaggaagtgggcattttgctgagactgtaaaagccatgaaggtctttatttctatgtagttcattgtattatctaactgctctattttacttttcagtttccttgattgtattttgttagaacttggtgatattgaattacgagattggaatgaggagacttagttaagcttacacaattccctttatgcagaacctaaagcctgaaatcatggttgagtgtttaacctctgattttaggggtgacttgactgctgtggacactttggttcactcaggattagatgtatttgcacacaacgttgagactgttaaacgtctccaacgaattgttcgagatcctcgagctgggtaagctattgttgtcttaaaccttcgttgtatactttctttatcttttagtgtttgatgtgaaatttcattttagtagttggatcatagcactatatctctattgtacgctacttttcgtaatacatcaaattttttttgatttgtttcccatgatctccattttgtatattggttgacttgtgttgcagttcttatgctgatccaaatatggtttgatgattttttttttcacctttactattgatgttattctgcttcataagaattgatggcagcaaagttcgattctctgggctctaaatgtcaatgtcagagatgaaggccttcttcattattttagatgattagagtgaagctaaatcttaataatgccttcagcttttccctcatcaattgataactttgaatgataattgttatatgcctgaaaataccaagactctccaataagtcaccccacatgaaagtagaaaaagaatgtccacattttacattcccattagctgttttgtgcctgcccttaagtcttttattttttatttctttccggaaccttagatgttaaaaccttgaagtgaaccttgtattttatctctgtactggtatacttatggtttatgtattattaatccagccactcatttcttctgattttaaagaatagataaagagaaattcagtttatggttagtgtatgtagctagagtatatacactctttaggaggattgttcccttgagatttaatatgtacttcattggtgcaggtatgagcagagcttatctgttttgaaacatgcaaaggtcagtaaggagggcatgattacaaaatcttccataatgctgggtcttggagaatcagatgatgagttgaaggaagccatggccgatttgagggctatagatgtcgatatattgacccttgggcaatatttacaagtaagtcaagtcaatctacatgctaaactgagcgattgcaatgttattcattttaaactagattttataaacacttgcagccgactccattacacttgactgtcaaagaatatgtcacccctgagaagtttgctttctggaaggaatatggcgagtctataggattccgttatgtggccagtgggccattggtaagatcttttactgttggtttatttatgacaacaattatttttcgtgatgcattattggtaagcatttgataacacatacaaaggcatgaattggactatttgtcattgtttccccaaacacagcataaaaaaataatgttttgaccgatagaaaatgtgataaaattaattgaaagcatttgtcttggattaaccttgttttggtttatgtcaattactaaaagaaaacctcaattaagtagtcaacgtgtataatttttcaggttcgatcatcatacagggcgggagagctctttgtcaaaacaatggttagggaaagtgctaacaaaactgctatgacatcttaagtttttcacttccataattattgctgttaaacggttacatttgggcaaaccaagagcttcagctgcagaagattattattgctaacctggcccaaagttttgagtacttttttgtctcatataaaggaaatgttcactccctgaagaaacttggtcttcttctccgtattcatttattagtctgcatatcatagttcaaggctacaatatatattacttaaagcctttattgggttcaagaaaagaattgttctttactaatattttcctttttttactaatttaaaaactggaatattatacggaaaattgtgtggctgtgtgtagtcatatgggtagtcctagtctttcttgaaaggatgaaaggtacaataaatttgttgggcagaaacgatagttaaatttgcttgtaaaagaatagttaaaatttagtaaagttacccgagttaaatttagttatttaagggcctcttcttaattttaatgcaaaaagtaaatgtaacttgttatggaatacatttgcatgaggtcaatactttgtttatatttattcagaaaaaaaaaaaaaaatactttgtttataattataccacttgtggtcgatttggtcaaaacccaaaatcattaaataaggtatttgccttagttgatttcttgtggcctaatctgatttagatatagattaatgagagtgttgtacgtacgcttcccataatctggtcaatatgtcacacgtttaaccgttcaaccaaattcttgttggtaatgtaaagcaatcagtatgaaatttcaactactacagttaatggtacagcaaaataaaatctggtgtatgccattcgtttttttttttttggaaagaatctatacttggtggcatttcaattacgtattttgcttcaaagctgagtaattaataatactttgtatcgtgtcactttattcttcctcatatggaaccaaatcatttctctctgtattaatgatgaagagaattggtgatatgatgagatcacttttggtgtaaaaggagtgttatcgttaattttttagttaatttttgtgcttgaaaataaatgttgatttttttttattttttttatagcagtatttgttatgcttacaacatcatccctgtaaatttttgaaaaatttcgaatagtttgccgtattaaaaatataattgaagttttttgaacacgcgtagtaaactagaatattaataattctattttcggcattgtaaactatttagaattttcttaaaatttacaggaatgatattgtaactataacaaatattgctataaaaaaaaaatattttagcatgtgattttgaacgtgaaaattaactaaaaagttgtaataaaaagttataattaacactctatcttttcacttttagataggttatacttatagaatgatgagttaaacaaagataacatagtatagtagggttagggtactactaaatacttattcaatgttagcataagttttatttatatttttgaatgaaatgtgagaataacacatacaaacaactcaaggagtccgaccaagactagtttgcagagcatgacgtttagattagaaacaaaaaaataaaaatgcaataacgtaagaaacaaagcacatgaaatgtggcattgggatgaggttgacaaacaatagacatctctaattatatattatattactataactatagctaattacattaacatgtagcataattggcctcatctacattccacatgacatggccttaagttaagaccaccttgttggctttggtgttgccatctttatttacccaacccctctgtctctctctcatccccactctctgccgactaccatcagagcataattaaaaaatatataaataaatttaaaacacagtaagaattttgtatcaaccaccaatatatatataatattaaaaatctacaatctttattcatatatgtgtttctaatacactcttctaagactttcggtgctcctttttgttctttttctgggtccttctatttcttcatacgccttctctttatagagaacaaataattttctcctttttattttttattttttttttattcttctcaaatttgacttctgggtattgttcatttctgctggttctggactctgctgttctgggtttatgtattctggtgagaaatccaggatcttgtgaatgggattttgagttccttatctttgttgcctttggctttaattttgttcttgattatatttttctgttttgattattaaatgaacttataatttctcttttgcttcacattatttttcaatctatgaatttattcatctcttttcattttacattacaaattaatgtttaacatctgattgtgactgatacagtgaaggtttgattctttgcttcacaatgtaatgttaaattgtttttacacttataactgggatatgggattggagaaaggcttggactttgttggattttatatgatcagactaggagaaacttagatacactttgagatgctattaattccagtttataattagttactcagttgacattatatacttctcttagcttcatttagtgtgatcaccaaggtcaaacaattctcttggttatgcattttattccatgtttcaaattcttgcaatgtggatttgttgtggttatataattcattgttaagtaaattataccctcaattttggtcaaagaagagatcatgggtgattgatcaccatttcattccttccattacaatgacaggatgggaaaatattgcccaccttgatagtttcttgttttgatataaaattattagttgctagtaatttcctttcttcacttgtttgaaaatttgttcattcaatccgcttgtcatttatttttcttcccatttttgtagtcaagtccttttgtttgctggatatttgttaagcttttccctctgactagctgttgcataagatacaattttctctgataatttcattttaatttgttctttaattttgttaagcctttctcttaaattttgttctttagttttacatctccagttgaattcattattaattgtttgctttcaacttgtagaaaactcatggagtttggtatttcatgggaggtatggaggacactgatccacctttgaaacgtgtaaaatatccattggaagaaccgaagatcttcttagaagattcgagtcgaaaaagttctattgcttactctttgggagacttgatggctaaatctattctctcccaaggcgatgaagaaatgcttggctcaaatggaatcataagaaaaacagagtttgtcaaaatcataacaaaggcattgtactcactcaaatatactaaaactggtgccattcttgaggatgagtcgggcataccattgcactcactgtttgttaatgagtttatgcagcaagttgttgatggaatgtgggatgatagtttagccacattgcaaaaaattgacctcatagatgaaaatactttcaaattagcaacttttttaataaaggaacagaagttccttgagcttcttaaaattgggaatttggatggtgctttaggtacactaagaaatgagcttgtgcctattcatatcaacattagtcgggttcacgagcttgccgcgtgcattgtcgctcctttttcaggtttaacactttgtcttttgagccaagatacagaagttgcaaagtctagatcaaaattgctagaaaaactgcagaagttgcttcctgcagcagtcatggtacctgacagaaggttggaatatcttgttgaacaggctcttgatgttcaatgtgatgcttgtgaatttcataatacatcgacaagtgaactttctttgtattctaatcatcattgtgggaaaaataagattccaaatcaaacattgcaggtgagtgtttctttaaagttatataagttgtgtttgggcccagcaattgtggaacttacaatttagagcttgttaagatttgttgcagcactcatgatagggggagaaatatgtgacagactattcatttgattcctttgaaagtatcttttttctgtttggacagtattgttttcgtgataacataaacacactgcataataactatcaattgaaaaacagccaagattttcttggtcagtaatttattctgctgttggtatctccttctagtaacatacttggcagattgttttgttctctgtttgtggccccttgtttttgtttttgtttagatttacaaagctacattattttcttatcttatgtaacaggtactgcgagcacatagtgatgaagtatggtttctccagttttcacacagtggcaaatatttagcttcatcatcaaaggatcagtcagcaattatatgggaggtattgttttagaattgcctttaattatatgtagaagaatgaatgttccatgttccctcttcattagtcttgcgtacttaatattttgactaatatgtagattgtctttcagaagttcttgtgtatatggaacgttttggtaattattttttttttcaagaaaattctaaataatttataa

SEQ ID NO: 294846 - DNA, 8035 bp, Cannabis indica
gtgagcatatatacatgttacatgagcttataaaagaaaatgaagtaaccttttcgactttaagtttgacagaaactagagcatctttatgatgacgaggacgacgatgatgatcatcgttgtcttctgtctcaaccaagtctgtcaaccttagatcttggagagacacaagaaattcagaatcccatttcccttgccatctcccatctcctgtggatatcgttatgagacgccgcggtggaattggaattggagccatgccatgattactacttctgctctttcttttactaatctgttgttgcagcctcaagcatcaaataccaaaatatatgatgagcaaatacatcataactgaactaaaattaagaaaaaaaatcactactataatgaaatttagcattaagttaaagatgtaacataacatacaatgttgtcaaaaaatcaaaaagaggagaaatgaaagtaaaaagatcatatggccgatggctaaggcagactaggcccgcgcttagagtccacccaacttacgggccaatttattttttattttttaaatatatatattttttagtaatttttaaaaatattacatgatttataaatatagattttaataattttaattttcctaaaattcacctaatttcaaggctggctttggatcataatgatgagaatacttgtgtgttgagcctttgatgaaatgtatcatataactgaatagagaaaattgctctaatgaaatcaagaaaagggcaaaagagaaatgataatagacactcacaatgacattgagatttctttgtttgaatatccttggttcaaatcctacatgacaaacaaaagcaattaacaaaaatagaaactaaatttatttatttatttatttatattaaaagaaagaaagaaaaaaaagatggtatagtaagattgagtaccattgatatgaagatgattaaatttgagaaagctcgaacggatggccattgttgcagttgtttgaggaagtgggagaagaacgttatccacttctttctttctcagatattcctgtgtgtggttataaccggcaaccggttcaactatatttttaactcaaaaaaaaggtgcaaacataaattaaacacaaattttgactaagagaaagatgacttaccaagaatttcttttaccaatgtcaaatttagatgtacaaatatctactctggtttcatagaaatgtttagaaattactatttaaaaaagatttaagattactcagttagaataatctcttttttattacagaacttaaaataaaaaaaatttataaaacacctcataaaaatattaaagattattattccctaactaacaaacatgaaaataataaataaatatttttttaattaaatgcaagtattatatttttggagaattatctcataaaatatattttttattttttttaaaatttacgctttaggttgttttggtagtttttatgaggattgttatacgaattttaattgcgatttaagttgctcctttaattactgtaaagatttatatataaaattcaataaaaatacaaaataaatgtaaaaataatctgaatttgttagtaaagacatcattttaataataataataataataataataatatataaataaataaagataaaaagacaaactatttatagtcttctctctcttctggtttattctgtgtggtgagtctgaacttggcttggctgcccttctagccatggcagcaacatcttcttatcttcatctcaaaggttagtacatattcactcactagaatttcatcctttccatttttcttatcttatttgtcctctgttttttacttctttttttccctactaggatggccactttcgatatcaaagccaggaactttcaaatgtcactgtaaggattattggaactgggttgttctgtaatgctcaaaattattctatttatgatttataggaatttatttgtatatttctctccaaaaaaaaaaggaatctatttgtatatttaaatattaatcttcgtctccttaattggtttttaatgcctgaattggtatgggtaaccaaaacaaaaaggaggttgtagataactttcttactacaattttttaagtaaattcctttggaattagatagatttagcaatgaaatttcttctaattttcttttggatgaactgcaatgctattaaattatgtaattggataacaagtatatggaagctagatcactaattttctaccttagcatatagatttttcctttttagatcaccattattgataatggcattttaagtagtatgtttacaaagaagctcttttgttaacattgtcaagtgcaataacttcgagtttcctgtttggattttcaaactcgaattgattgtttctaggaaccaaaaatggtgaaggaaagagtaaaacggttcttgttgattacctccatgtatggaatgactagtacggttgagaatcatggggtttcatctcaaaaccaattggtgatgagtggagtagcttatgttcttacatatggcttaatactttttacatttaatctatgtgggacaatgttctccaataagtactataaatgaagactctaaactttaagatttcaatttagtgaatgcaaattcttgtattactcttatgaatttttgtagctatcttgtatagctatttgattcttatatggcaatatatgtttaatatttgattctaatgttttgtttttgcaaacaagttaaggcttcttccactatggttgtgacaggaaaggtacatgttcccaactaaaggtactaagctgagtcgaaaagttgcagggcgtacgttatgtttcatcaaatttggaacctctactaacgtcgagctcacaaaactcgatatgaatcctttgctgaagttacatgacatacattcagttgcagaagatttcaagattgggatctcagaaccatcacatggtatctcaaatcttgttgggaaaatggtaatgttaggggatttggaccctgctacagcaaagttggctattggcattttaggaccctttttatcagcattttctttcttgtttatagtgagaatagtcatgtcatggtatccaaaagttccagtggggaagttcccatatgtgctagcttatgctcctacagagccgattcttgtcgtaactcgaaaactgattccaccccttggtggagtggatgttacccctgtggtctggtttggagtaattagttttcttaatgaaattctagtaggtccacaagggcttcttgtccttctgtctcaacaagttagctagtgatactttttacaagatgcagggagcaaagaaaattgtctttggaggtcattttgtatataatttgatctcatatgagtgagataagaaaatttttattgtagagaattgaacttttgttgttccatattgttatatataatgtattattatatctgaacctatataaagtttatgtttggtttggtttgatatgcataatgaggttggattggatcaaaacccaaaggcttttctgcatgaattggaaaaagaaatactacttagaatattgaaacttggatgaaaattgaacattgtgtgccccataataaacttactgctttttttttttggatatatgctgtttcccaattccaatgaataaaagagatatttatatttgcaaactatggtcaattgacttgatgaaaccaagttgaacaaatcacaatctgaaacccttttcaacagagaacatataaagaaagatccaagttaccagccaacaaacaaataatatttttagcataaacttttctcaatccctcaaatgcttgagatatttttagaataatatttcatgtcttgtctgtgtgtgaatgcatcacactgaaacttgtacatgaacaagaacagctactgaactggagtatataacattttggactatgaattggaacaaactaaacaactttgttctttcgagacagtgaacaatgaaaacgtagaaaattatcatgcaaaaagaatgcaggcataataagctatatagccgttatagagtgagtatttgaaaactccgtctctatgacaaaaaacgtattctccgcatggccaccacgtctatatatctgctgcaagaaagttcccagacaatgctacctacacgaagagataaataccgattacagatataattttacaagagtttcgggaaaaaatagagattttgatttcacaagtaccttctcgcccagtttgaatggaggaagacccttgtatggacatgtactgcaccgaaaagcatctcccagtccacactgcaaatagtaccaactttgttttagagaaaatcagaataataaatgcaacataagcattaagaaaagtgttgatagaaaaataggccacaatcatgggaaaagattagccttaggttctactatgctaaacaacaaggagcacacaccgaacacactgctactatatctagttaactctcttttgctagagaaatgtagtcaatttggttgtcccaaggtgatattgaaacaatagcttagtcactttaataataaccatattgggtaaaagaaaacatcattgaaatcgtcaaaatatgcattacactgccacaggctgattgaggattgtttagtagctcatcagtcaatcctaacttctccactttctcctcggcttctgctctcccacatgtgcaatttttacaagctttctttgtagctccaacttcacaatccccaactgcatgagccaaagggtacagttaaataagagtaccctcaataagaataattcgcaagatattaaattttggactatcatatgtacccggtggaagttgaggtttcttcaaatcctcttcagttaataggctatcctcatcaatcaaatctgaatcatcatcgtcaatctgaactactagtgagctttttggagccttcttaatggcaaaggatgaaccaatgttccaagaaggcttcttagccttaacctatcatcaacgaaagaaatgaaatcaagttttggtcagcaataggcaatgcaaaaagagtgaagttttcaatcaaggtaattaatggccagcacacaaatttcaatgctgctcaaattcacaatgtctcatcattctttcctctgtccataaccaataattacccaaaattgcttcgtcagatcaattttaatttggatcaatctttgaaaagcaagaaactcaagaatatattttggtaggttccacggaatccaactacaattgtgattaaccctcaacctacccctcctggttgacaatcgataatggttgaaaagctgagaaattgaaagttctctgtttataacactgaaaactcaccagaaatgacggcacatcagatgccaaaattgattttggtggaagtgaatttgcttcagagaaaccagacaatagtaggttgcgctcaatagcaaaagttacctacaagagggaaggaaaaaaaatggcatgttagtctgctaagcaaaatcagaatcagtccagcgagtcataagatgcacatattaattactatatctgcatcctcgatagctgactcagaatggcaaataaggattgttccaccaggcttcaacactcttaaaatttctttaaacagttggtcagtgggagattcaggcgatctacaaaaagatagaacgatgtcgatggaagaagattctactggcaaccgacctgcagtcagtgaagacccaaattaaaaaaaaaaaaaaaaaaaaaaaaaaagaaatcttatatatatagaagcttggactcaaaaaccatcccaaaatcccttttacatgtggtcagagaagggcataaaactaaataaataaaagatgagaaaaaaccaaaaggaagggcataaggataacttgagaaaccagaaactcataagacaatatgtaaaaaataattaaccattcacataatatccagtctgatacattgggaacagttttagtaattaaatttaaaatggtaatggaaactattgcctttaatagtaaaacactggccggaaaagtaagatacaatctcatatgtagacttatctttgttggcaacagtttctctgtgtgcagaaaataaaaactaaagagtggaaaaagaaatgatacaaagcatgagaataaaatgtcctctaaattttgaaataaaaacaaaaagattagatcatcaaagctaccccgatacacaattgcaatatgaaattagcacttcatcttaaatttgaattataacacgatatatatatcaagaaaacagaatcagaaaccagtatcataaaattagaaaggtgaagaaaattacttagcaaagacacttgagtaataattaaaggatcccgcgtttcaacccctacatccccaagctccattattgcattagaaacagcactgacagatacgattgcatcatttgtaagtgccagaacgctgcccgtcattgtattagtaacctaaaagaacaaaatgaaaagaattttgaggcttcggggttcattcattacattgcaatggaaaaaatatgtatataataattatgtccattcaaaaagagggattgtaaaagttattatcaacattacaagaaatctgaaagaaaacctcattataaacattgagactaaaatgtagcagaccaagaagaaaaatatagtgaagaggaggaacctaaagaaaagagtagccataaaaatcaaaacaaatgctagatgatctaatttcttctatcaatacacatttattcaggtagtgagcatccttctcaaagccaaagcttgaatttcaatatagttcaagctagcataatgtaatttcggaattttctaaattctaccttcaagtttctttaattattgtgaggcattgtaactcttaatgctactcatactgactgtcttaatctcaatgtttcctcattcaattatacttgtatacagctaaatatccagacaagcagctaataaagatagcaaagccatcacttttcaaatgccccatttcaaaacaatttttcaaactaggtcactccaaaatatattgaacaaaccagcatctaatgcaaaatgacaaggcagaattcaagaactagaacttttaaaaaaacaacaagatctgtaagaaagtgcaaagctgcaaaaacatgagaccattacttattttataaaaattctcctgaactcatttcattgagcatcagcccaaataacaaaaaaatcatagattaaaaaccccaaaagcacaaataaacaaaaagaaaacgaggaatgactcgaatgagcatttccattgttcaacactggtctgttatgaagttcttcaaaatcttaaaaatgaaaacaaaatgtgaaccctaaacgaacttgaagaaaacccaattagcaccacaagacaataaaaccaattccgatcgtcacaacttcaattcacacgtaacaaataagacattccagtcatatatgtagagacaacacttgatcataatacataaacaggaaaaaaaaaacaccctaaacctaaaaacaacaagtagtaatggaattgatccagaaaggtctcctatgataaatatgaaatgatcaaaacccaaaaaacaacaaaaaccacaacaatccctaaccgaaaacaccatcaaacatacatatactttaaacatatatatatatatatataacactttcttaatgggtaataaccattgatgggaactaaaaaaaaattaataaggtaataatctaataaccttttatgccaagtttctaacaattatttttttaaaaaaattatatttattatttataaaattagaaataataattacaactaaaaaaattataaattatttttaaaaattaattaaaattactactttattattttatgaaattgtgagttcgttaataatttattattgtaaaactaaaaatcatttacatgta

SEQ ID NO: 294847 - DNA, 13084 bp, Cannabis indica
tatttaagtcgggtctatgtccgaagtcggattcgaattcaagtcaaaagccaagttcagcaccagggccgtggggagggaatttgggtctgggtctggtcgtaatcaaaagattgattaagaaaaaaagaactgtttaaaaaaatattgaaagtgattttcttttgtttttaaaattttgatttctaattataaaattgaaaagtaaaaacagttttatagaacatgtttttgaaaaatattttcacttttctacttttaaaaacagaaaactgattaaaagtgttactaaacgccaccaaagtatatttgacgatccttaaagtttttcaatctacaaaacgacaaattacattgttcttcttcccttattcttcattgtaacatgcaccatgttgagtatgttgagtatttcaagttatttcttctctcttatacaatgaaactttaatacaaacatgtctgccattattaccgcttctgctctagaccccaatggtgccctttactctcgagccaaggacaaagccatcactagaggcacctacactacccgcgctccgctcctccttcgccggctgcgccttcttctatcggcggctaagctcaggctacttcttggtttctgcgtcttctgcgtcctcgttttcgtcacgtcgaggcttagctatctgatgggttggatccctcatcactcttcttcggtctcctcttcttcgaggtttgtatttatggtttaaactgaactaaccaatttctgaaaagtcggtttctgtatgctttcttcttgattatatgattttgattaccgttgtcccatttgcatttttttaattttgaataattgaatagggatgaactgtgttaaattactcgacgatcaattgccctgaacccctcagaattagataagtaggaaaatattgggaaattgggaatacctggaactttgcaaatccgtatctgttgttctctgttaaaggatttgtcgtttaagattacttaatattggtgttagtaatgagtttggattagggaactatcgctttgttgtgtgatgaaatgcaaggaattgactttttgttgtaattttcagaggtggctacactgttcttattaacacttggagaagaaattctcttctaaagcaagctgtggctcattatgcttcctgtagtggggcggatgctatacatgtggtttggagtgaaagtgatcccccatcagatagcctgaaaagctttcttaggaaaatggttttgtcttattcacaaaaggctcataaacccaatttcaaatttgacattaatgaagaagataatctaaataatagattcaagccaattaaggacctcgcaactgatgccattttctctgttgacgacgatgtgattgtcccgtgttccaccttggattttgctttcactgtatggcaaactgcaccatccactatggtgggatttgtccctcggatgcattggctggataaggaggttagtaagtttgcttccgaagtggaaacttttccttttctttgttaagattctgctttacatcttgaaaggaaatactactttacaagttttttcaaaaaaaaaatactactttacaagttcattgatatctacttgcgttgctatataaaggattcttagatgttacttaggcattacgtccttgatttctgatgagtcatctaagtactccattgctatacatgcttgtttgacatttgtaggacctgattggtgttcattttacattgtagacaaaaattttaagttttgtatctgtgactgaatcactaaattagttattccacaaaattctttccttatgttcttgccaataattttcaccattataaaatatagtgctcctacagtactcatatatatatttttttttgcagctgtcttgtatttcaagtaacatcatctttagtggttttattttaaaaattattccagtaactagctggttgagctatagcaaaaccatactctaaattgatttcatcacttgtttgggaactgtcacaataataatgtctctggttttgcaacatcttatccatctgataggatttggctaccaacagagagaattaaacagtaaataaaagcaagagaaagtaatttgatgaaaatggagtgtattgataatatccaggaacttcgagagtctggtctctcccttcacaatgatacaattctcatcaccctcataaagctaaacattacttatttatactagtactcaagggccttactaagcaccccactctacccaaacaaaacccccctaacagaattacaaaacagcaactacaccttagcacgatcccctgctccacccccactcttagctgtcctagtcctcttcctggcatacacaaatgttagaggaggcccatcaatactgccgacctgaagttttaccttgtcctcaaggtggaaattcgagaatttggtgtgtatgacagcaaagtcttcccaagtggcttcataatcttcttggagattcttccatttgatgagagcttgagggctgaccttgtgagtactggggcggatggccaacaacgattcgggtcaagcatccattccaaatccgttgtgatgcctggaggaagcgaggaagcttgctggttggtacctaaagcagcacgcagcagtgacacgtggaacacgggtgaattgtagcagtaggaggaagctcaaggcgatatgctgctgtaccaatgcgttctaggactgagaaaggcccaacaattctgggggagagcttctcattaagtcgtttggccaccgtatgttgacgataagggagaagcttgacatcccatgtctccaacctgaaattggacatctcgatgcttacggtcagcttgggctttcatcttttgttgagcacgagtcaaattttgcttgagcagggccacatggagtcatgatcctgaagcatagtctccacgggcaaagctttggtgctggtttgctcaaaacggagtagtggtggtggttcgttgttgtacaaagcacggaaaggagtcatgctcgaagaggaatggtgagaggtgttgtacaagtatttaacccaaggtaaccatttaacccactgattgggtttaaagctcacaaaacaccttaagtacgtgtcaagggagcgattaacaacttacgtctggccatcagactgtgggtgataggaagtgctgtgcttcagcgatgtgccttgcacgcaaaagagctccttctaaaacaagctgagggaaattttgtctctatttgaaacaatagacctgggcatgccatgaagcttgacaatttatttgctgaagatgttgaccacggtaggggctgaataaggatgacagagaggaataaagtggctgtgtttggaatggcgatcgaccactaccaaaatggaatcaaactcgttgaaacttggaagaccttcaataaagtccatagaaatatcttcccaaacttgctcgggaataggcaatggctgcaatagacctgttggagattgggccaaatatttgtttatttattttttgatgaatcaactacaatcttcattactccaaatcaacttttttacaaactaatagcctcaccattatgggagatctaatctgtcatctatacaagtgtatacaatataatgagtaaaaccaatctgaatccatcacactaaccttcttttgccacgtacaaaatattctttgttttacaatttccttgactctacaaacaactctgtcagtatcctcactagaagaattccatagcttgtcattcctagccttccagagatggttcactaaactgaccattacagcagctaacaccttcttttcgaacttttgtatttagctctctcaatccatctgagcaaccttgttacagaagtagcttgcactttccattggagccatttcttcactatcagcaagcataaatgagagaatgagcactcaaaaaacagatgctcatttgtttcatcttgcaggttgcagaatagacaactcacatcctcaattattccaaacttatgcagtctatctcttgctctcaatttcccctgcattactatccacagtataaaattgtgttttggagtatttagtctcccccaaacttcatcacactagtccactctgtctacagaagagcataatagcttataaccacaggaaacctggtacttattctgttgaaattgttgtagatctaccagatttttaacttggtttttaagtgctacaacctgtttccagtactatcttccctgagctggggcagtatagccccaccattcttcattctttatgtatacactgtgaatccacttaacccataagttttcttccttattagccactccccatacatacttgatcatagtagccttgttccattttgcaattctttttgatgccaattcctccattttttttggtttgacatacaagatcccaagtaaccaatccagacccttgaaggaagtgcttactcttccataggaatgctctacagattgcttcaatctccttgatcaccttttttggtaggagcaaaatttggccccaataagcatgaatggccattaatacaaaatttataagtaatgttctccctgcaattgataggtttctagtgctccaagtcttgattcgagaggtcattttctttgccagcactctagattcctgccttgaaattctcttagcacatattggtattcccagatacctgaaaggaacctcttgtttgcaaaaactagatgcaattagtattctctatacttcctcatcctgcatgccactgcaatacatagctgttttgcagcattaggctgcaagtcagaagtgcaggaaaaacagttttaggcctttcaacatataatagatacttttgaaatctcctttgcaaaatagcaatacatcatttgcaaaacacagatggtttagcttcaaatctccacacctttcatggaactgaaagtctcctttagtgccaatatttttcataattcttggcatatattccatttcaagtacaaaaatcagaggagacatgggatctccctgccttagccagctttttgattcaaaaaagccatgcactataccattgaacataagtgagaatcttggtgttctgatacaattcataaccaattttatgaatttgcttgggtatctgtaagctatgagcatttcttcaatgaaatcccactcaatggtgtcacaagctttttgcaaatccagctttatcatgcagtttgctttaatgtctaataaggtcatggcatatcatcacattgtgtgctatataccttcctttaatgaatccaccttggctttgatccacaagtgaaggtagtatatgctttagtcttgaacatatcaacttagtagcaattttatatattacattacaacatgctataggcctaaagtcttcaattgtattagggcatctaaccttgggaacaagagtgatgacagtagagtttatctccttcaaaattttcccagattgtagaaaagaatccactgcttcatagatatcattacccatcgagtcccaattatcctaaaagaagaaactagaaaagccatttggtccgggggacttcatgccaggtatttcaaataatgctttcctaacctcatcttttgtgaactttcccaacagcatctcaccttgttatggattaaccagtggcctcatcttaaccacactagcgaggactggtcttctgttttccatcttactccccagcagagcttggtagtacagtacaaaagcttcaataatctttgcagggtcatcaattctgacacatcttgttgttcaattgatagaattctattttttcttctttgatctctaatactggcatggaataggccagtattatcatctccctctttcacccaagataactttgctttttcttgcatcaaagcctgtaaatcctgatgcactttcatatacttgtttttggcctccggctcattagcatgtaattcagggttaagtggttctcgttgtaacttgttttgactttcattcaaatgctctttgagttgtatgtctgcaacatgtaagtcagaaaatccctgcttgttaatatcttttagaactggtttcagagcctttaagcttggtttttacttgaaacatctttgtccctagacaagattgtgtccatacttctcgaactcttttgtcgtactctggatgagacttccacattctgaagtatttaaatggttttcgaccactaggtacctcaggatggaaagtaagcaaactaggagtatgatcaaaaagcctatcattcagaaatacaacttctgcattagggaatttattggtccaggattgattggctagcatcctgtcaatctttgagtaaatcctctcttttccatgctttttattactctaagtaaagaaactaccactgtatttgacatcttccaatttacagttttcaacacagtcaatgaattctgtggctgaatgatacttaactttgtgaccaatcctctcttccttggcaagaagaccaatcctctcttccttggcaagaatatcattaaaatcacctaacaccaaccaagcctccttagttgccacttcctgaatttctctccataactctttcctcccttctctatcattgtatgcatagacaaaagtagcataaaaattattttttccatctatagtagtaacaaagagatagatcatttgactagagcatcttacaatgttgacattgaagctgtgaggattccatgctactgcaattctcccccaggatgccaagctatgtttgttgtgaagcatcatctagtaaagacatttgtgtacaagacccccaacttttgggccttgacccttgtctcgaggagtccaaccaagccaaccttctgtgtatttataaattgtctaaccaggctctatttctgttggccgttaactcctcggacaatccaacctagcaccttatccatttcaaagaggaggaactacttaaccccccccccccccctccctgtatttccattctcaaaatcactttgttccttgtttccactagtgcctgtgatttgttcttcccctgtatcagttagtacttgaaaaacatttcctgtttgtgttgttgccacttcattagttcccttcgatttccaaccttttgaaaccagttgaaaaccctcaggatcaaccttatcctctgttcctttcacatcaagctcttttttccttctatattccttgactatccactcttgtttgcaccttggttgcttcctacactcaacatttggatgccccattcctttgcagtgtccacaaaccaatggcttccattgatagtgaacccccacatatatatatattttctccatgttcatcctcaaaagatatctgatcagaaaactcttgattcagagttacctcgattaatactcttaggtagctaagcttatccctctccttaatgactaaatcaacgattgatggtgatcctactttaccaataatcttgaataaagacttctctccttagtattccagctccagatcttcttgttgtacccaaattggtatcaccttgatgtcctccttttttaaattgacattagaatcccaaaccttcatgattacaagtcttttgttaagaaatgtatagcccccattgagtaccttatcacgtttttctattgaaacaaatcttacaatgaatattccataagatagtaacccaactttattgacaatacccttccatattcgccttgcaaagccttccaatattgtcaaaggaggattagctcttaagacatagcaaacaattgccgagttccagtatgatatctcatcttcaatgttctccattgtaatcttaactttggattctttttcagaacttttgaatgaagcttcaaggttacgaacgactgtacctgatctcagaataggaggctaagaattcataccttgtttgaggttactcttacattgtctgtttgcttccatgaattgagcaaagtctttgcttatatccttttgctgtcaaacaattctgctagatcttagaactggaggatgagagttcataccctgtatgaggttactgttacattgcttgttcgtctctaggagataagcaaagtctgtgcgtatatcctcctgctgttgaatagctctaagagatgatctaggagataatggtttgcgtagatcatgaagaggatctgaaacttcatttctttcccttaaagtatccccaagctcactgtcctcatcatcagtgaaatcgattggctcaataccaaggatagcatccttggattttgtttttttaacatcaatagtagatgttggccctcttttcttcaattttgttatctcagatctttgtttcctttgcgcctttgatcttgttttcgccatggcaccaactcaagagctgcaagagctagaacgaagagaaaccttttttgccaaatatttataatattgttgacaaatacaacactcaaccacaaatctttgaatagtatggcgcataccgtgccaataaaagtcagcagccaaccgttgaaaggtcttgtacacccctaagtctacccctactttactgctttgatattattgtaataacagctgaataaaagatgaagaagttggtaacacttatgacctctgaacttgagacatccatgtaccattgagtacctcctgccatcttgaccttgagcaaggttctgaatgactttagaaagcatgggatttgtggcaacttaagccttctgttatagataagacattttggatcgaaatgacagcaagagatgcttccccatgaaacgagaaacagcattggctaccctattttcaaaccctggtttgtatcaatatcaaaaagatatccaagcaatttagtgagccatttctgatgctccatggaaaccaaacgatgctccagcaagtatctcaaacttctttgatccattcaaatcacaaacttgcgacccaaaagataagaacaccatttttgaatggttaaaacaattgccatgccttcttgcacataaacaaatttgagactagcttgagctaaaactttgctgaaaaaggcaagaggccgtccatgttgcatgatgacagcgccaaggcccatggctgaggcatccgtttcaagaacaaagggagctgtaaagtcaggcagcgccaaaacgggaacaaaacacatggcttttttgagttgatcgaaagcttcttgtgcctcaggtgaccataaaatagcatttcttcaattgataagtgagaggtcaagcaatactaccataaccttgaacgaacttgcgataataccgagttacgccctaaaaaccacgcaactccttgagggtttagccaaggaaccatggcctcaattttgctcgggtctgttgccactcctttagcagaagttacatggcccaaatactccacttgaggctaagcaaaagtgcacttttttctattgtcatacaattggtgattttgaaggcctttgaacactaaaccgaggtgtatcacatggtcttcaagggtagggttgtatacaagaatatcgttaaaaaaaactaattcacattcacctcggaaatcatggaatacctcattcatgagtgtttggaaggtggctccgaatggcatcaccaaaaacgtcttctccacatcttgtggagccatgcgaatcttgtggaatccagacttcaaatcgatcttagaaaagatggtggcaccatgaagctcgtcaagtaactcatctataaccaggattgggaatttttcagccactatttcgctgttaagagcgcgatagtccacagaaaagcgccaactgtcatccttctttttaacgagtaagacgggacttgagaaaggactcgtattggtctgtacaataccaagttgaaacatctttcgaaccatcttttcaatctcacccttctgagtttgggcgtagcggtatggcatgctcacgggagcgaaccggggataggcaaggaggcatctcaaaaactgctacatgcttggtcaaaagttgagctatgggctttggtagggaggctggatcaggctccacgacagtagacaactcatttaattggaaccagtaccatttggctcctttttccacttgtaagatcatagcctttaatgaggtgggagacttgcacaaatcagggtcgccttgtaatgtcacccaagttctcgccatttcaaacatcatgatcattgttttcgccttaacttgcatatttacgagtgtttctagccactttatgcccaaaataacatttgcccctccaagtttcagggcaagaaagttagtgtttaccaagttagtgtttacccttattgcccccaaattgagctcgacttgggcacaaataccttcgttcggaccttaccgcttgtacacaataggattccatagcaagtggtggctgtgatgggcaatcccacagtggtggcgacttccgttgacacaaaattatgggtgtctccaccgtcaatttagatcattacgggttgagatacgatatggctagcaactttcatcgtatgcattgttgaaatgccaactaaagaaatgagagaaagagtagcgagagtcttctgttgctattgtctcgccgaaatctggagaaagaggtggctgttcctctggtgagtcggactcgtcctcattggtggagagcaagatttggagtagcttttgctcacaatcatgactcgggtgaaacttctcacatctaaaacaaatatcctagatcggcgatcttggtattctgccttggacaatcgtttgtacaaggtgttggtggacggacggctgctgccgctcttggatgccgtagtgaccatggattcggttgaagaactctgtggttgctgctgcattctcgtgtgatatgttcgattagagaaagggttgggattggcacgtgtgggaatgagtgggctcaaggttgatttcatggtattgggctgtgggaaagggcccatattagttaactaatggccttcttcaatcctttgggttgtctccattatttgggtgaggcttttgggctgcaaaacatgtaatgtagccctaatctcttccttgaggcttccttgaggcctttgatgaaacttccttccaagagatggtctagtatgtctgatactcgagaagcaagaacttccccactagacacgatattctttcaccgttccggtttgaaccaccgacaaaaaattttcgagagagaacccgccggtatcgcacgaaaacgatgaaggaccatctgttttagcatcacccaataggtaattggccttcgttgatttacccattgaaactaggagagagcgactccttcaatcccaactatggttgtatccaacatcatggattctgtcattcacgtgatgagaaaatagcattcgactctgaatccatccgtctggattattgtcgttgaacaatggtagttccattcgtggtgggtggaaatccaggctatgagttttacccaacatgaatgatctgagttgaatcgggggtatcggtgggggaacgagcaacggtaaagtcaccttggtgccatcagagatgaatgcatagttgaagcacccgtaaaactgggttcacctatcgatgacccattcccttcattagtgcgtcgttgccggtcggcgctcgctgcagcagcttcaggggaggacctcgccgaaatttgcagaatctgtgacaactatctcgccatgttttccatatgtttggaaattgctgtgttgatgtgtttggctacggactgatcgatggagctttgaagctccccatgcaacttcgtgaacccctcgttaagcttcaacaccttggaatgaaggtctgaaacttttgctcccaccttttcctcaataatttccaccactgcatccttctttggtcccataaagcatgtgctctgataccaagttgataggatttggctagccaacagagagaattaacagtaaataaaagcaagagaaagtaatttggataaaaatggagtgtattgataatattcaggaacttcgacagcctggtctctcccatcacagtgatagaattctcataaaaacttccccctcataatgctaaacattgcttatttatactagtactcaagggcctaccaatcaccccactccacccaaataaaatccccctaacagaattacaaaacaacaattacacctcagcacgatcccctgttgcacccatactcttagctgtcctagtcctcttcctagcatacacaaatgttagaggaggcctatcactatcctgctgccacttcagcgacttatgatctttgagaaactcattttgattattttcttcatttatctaattgtttgttctttgtttattttatccaaaacagcgaaacggtttagcatactataaatatggagggtggtggtcggtttggtggatgggaacttatagtatggttctatcgaaagctgcattctttcacaggaagtacttagacttttatactaataagatgtccccaacaattcatgactacgtgaccagtgagaggtacacatatatatacttctctttgtatttttatttatatataatttcatcctgtcagtgttttctattggctggttcctatgcagaaactgtgaagatatagctatgtccctgcttattgccaattctactagcgctcctccaatttgggtaaaaggtacattgtaattgcttcatatttcagtctcatgtataaaataaataaataaagcaaatatttatacttaaatagcaagcggtgttgtttctttttgctcattttgctcatcgttactaagtgttccaagttccaacttacatactgtctcattgctcgagtaaaatagtttgatgatattttgaggcagaactatcacctgaaaaagaaatcagattcactttttataatgcatggatttttttttttttt

SEQ ID NO: 294848 - DNA, 1048 bp, Cannabis indica
gtgtattgtggtagggttagaattaaagtttaagtttattatatatgataggatttttgtggtgtaaatgggcttggtcctttctttttagtttaatctttgttgcgacggtttgtaactgattcttcataacgtctgctataaaccgaaacaaataatctaaatgtcagttttgaattgatgcaaaagtagcgtcagttctgaatcgacgtaaaagttttatgtgatgtttttgtgtcaattttgggtattgactgacgtaaaaagcccattttgtagtagtgccacattgtttttcgcacaactcatgaggaagcatttttcgacatgacagtagctgagtacagagtttgatcatttatcaaagttcgttggagacttggtagcgatagacttcacttgtaaacagaagtatattacatgattagatgttacaattgtccaagacttgaaaattaccatagatcacaacactttctcagaaaaaaaaatggtagagtgaggtattattgctaacgtgacagagcagcagattgtaaagaaaataagttgctaaggatgctgccatggcttaaactcctagctctaggtgcagttttggtaagggggcgggtggtgggttatcaaatcagaaaagaaagtttgagacttcggggtctgtagtgcataataagaggttcggaggtaacaaaggcagccattaagatcgtggtgatggtttcaagacttactctaagtgtcctaaatgtattaatggcatcaagtaggtgaatgttaggctacgacatgcttttataagtggcgaggtaggccacgtcatcaaattttgtcctcatgctgagagagagaagaacctaagaaaagtaaaacccaaaattcagaatgtctattcattgttactcaagaagatggagaggctagcccatcagtggtgatatgtcaactttctatcaacaactttccttatacaatgttctttaattctggtgctacccattcctatgtgtctagtagaatagtaactgaaaaaatgtgtatgcttcggggt

SEQ ID NO: 294849 - DNA, 4146 bp, Cannabis indica
aattttttctaactcatgtgttattttttttttatttttttctaaaaaaatttcacattaattttttattttaatttttttgtcataatatttaaaatacactttatttttgcttgatacatatattttttaagaatatgaattgaaaagaaaaaagttaaaaaaaattagtacaattaaaaatataaattttatataaaataaaaattatcaaaatagaatgcctttaaaacttcttcggtgtaaataaaatttctcttttcattatttatcatagcaatttcatctattaatttatttttaaagaaaaaaagaaaaaaaaaaagagaaaaagtaaacctaaataaaatgaaaatgaagggtattttggtcaataaaggaaaaagaatatgctaacgaagacgccaacaagatgatgcgcacgttacggcgtgtgagatacaaagccctgctacatacttagcaatacataatatccaccgttggatcagatccctaattatctaacggttgagaaagaaaccctagccacagtcgaagggcactaaagttctcctttaaattctcaaacttcgctcattcatcatcctctgctttctctcgcttctcacaacccaagtcggcgagagactctaattcttcatcttcacttcgaggtatagatctctctctcttttctctaatcttttgtttttgtatttgaatctttacgtagtattgttatgtatctttcatgtgaattttctatcttgttttgagcttttttgtatgcgataatcgaatcttcttcacttctaaatgagtttgaagtgtttatagatacatgaatatttttgatgaaagtatattttcgtttgatgattaggtttaagctgaatctttatagatctggtttactttacgatgaaagtaaatcgtaggttagatctgtgttgtatgttgaaaatgatttagctttgtgtttaacatgttgttatgtaacgcttcgctatctggtcattgaggattacttcattcccatatgactcgttccctagaagctagagttctgtgttgcttatttttttttaaaatatattccataattttgttttgtgattatggtagtctactggatgagcaactacatgtttttaaaaatatagatctatatagttcatattgtatttttggaaatgatattgattgttagtgtagtgacagtgatgagcctacagacctgtaatgatttgtggaaatgatcacagatctattgaacatctaagggactgagttttagtctttgattgttacatttctgtggttgtatgttgtttttagggtttagttattgataaactgttttatttggtgttaggtacttttcagcttttcagaatgggaaaagaaaaggttcatatcaacatcgtggttattggccatgtcgactcaggaaagtcgaccaccactggtcatttgatctataagcttggaggtattgacaagcgtgtgatcgagaggttcgagaaggaggctgctgagatgaacaaaaggtcattcaagtacgcatgggtgttggacaagcttaaggctgagcgtgagcgtggtattaccattgatattgccttgtggaagtttgagaccaccaagtactactgcactgtcatcgatgccccaggacatcgtgactttatcaagaacatgattactggtacctcccaggctgattgtgctgtcctcattattgactctaccactggaggttttgaggctggtatttccaaggatggacagactcgtgagcatgctttgcttgctttcactcttggtgtgaagcagatgatttgctgttgtaacaaggtcaatacttgaaactttaatctataattgttcaatttattgattgattgtttgttctaaatgtttctcttgtttgattcttgtagatggatgccaccacccccaagtactctaaggctaggtacgatgaaatcgtcaaggaggtttcttcatacttgaagaaggttggatacaaccccgacaaaattgccttcgtccccatctctggtttcgagggtgacaacatgattgagaggtctaccaaccttgactggtacaagggaccaactcttctcgaggctcttgacaacatcaacgagcccaagaggcccacagacaagcccctccgtctaccccttcaggatgtttacaagatcggtggtattggaactgtgccagtgggacgtgttgagactggtgtcatcaagcccggtatggttatcaccttcggcccaactggtctgactactgaggtcaagtccgttgagatgcaccacgaggctcttctcgaggctcttcctggtgacaatgtcggattcaatgtcaagaatgttgctgtcaaggatctcaagagaggtttcgttgcctcaaactccaaggatgaccccgcaaaggaagctgccaacttcacatcccaagtcatcatcatgaaccaccctggtcagatcggtaacggttacgcaccagtgctggattgccacacctctcacattgctgttaagttcgccgaacttcaaaccaagatcgacaggcgttcaggaaaggagctcgagaaggagcccaagtttttgaagaacggagatgccggtattattaagatggttcccaccaagcccatggttgttgagactttctccgagtacccaccactcggtcgtttcgccgtgagggacatgcgtcagaccgtggctgttggagtcatcaaggctgtggagaagaaggacccatcaggtgccaaggtgaccaagtccgccgccaagaagaagtgaagtgttactgtttaggaaggagctttttatagttaggctagttttgtttctggtgtctttgcctttttcgatttcgttttgctttaatatgcggacaattatatgggttagcattgcaagttttactagccttgtttttcaaggttggtttagcttttgatgtcgacttttgttttcctattattgtttttttttgtttaaacttttgggttttaatatcattgagaattgagttgtctagttgattgtcgatgaacaactacatttaaattttaaagtgttatattttcttttagtttcttttattatttttaattatttaatccttaaatgttatttttgtcactttttttgaattttttgaaaactaaacttatttagatttatgatagtggtggaggattcgtacgcttatatttatgtttataatgtttagaaactctaaatgtgagttctgtataaatatgtggccgtctttttgttaaatcttatatttgggttttttatccgtataatgttttattaaaatgtttttgatttcttcaaatatatggaagatttactttcaaaacattaaaataagaaaaattgccattatatatggcaagaaaaaacttttgtaattaatcctctcataatttaaaaaaaaaatagatttaggttattactaaggaacaaaagtatttttaaaacttggtaatcaaaatgttattaaaattgaattttgctccttagtatacactatttgttgacaatttgatcaaagtcctatataggggacctaatctaataatgttataattcacggagtgtaaatgttaattactccttaaaatttacctattgtgtttttttttatgaaggaaaattaataagtcaactcaggagagatcagactgaaaatgaactaccttttttttttttaaaaaaaggggaattttattaatcaacttgaaaaactatcatcctttacaattaaaagtaaatcagatggagcagaaagctcatcataaatacaatctgacataaaataagaccgtctcgcaatgcagtgagccgccctatttgcagatcgtttgacaaaagaaacaaaaacattagttaattctgaaagaaagctttggcaatcttgaataagtaagccaaactgaagatgacatttgaactgaaccattaatagcctgaacaactactagagaatcaatttcaatttccacatcagataaatccttcttctttatccagctcaaagcctcctttacaccaatcacctcagcgatctctggagagacccttcctactctgcttttcgaaaaagcttcaaccattttggcttctc

SEQ ID NO: 294850 - DNA, 879 bp, Cannabis indica
atactaatccttaaagtatagaattagagagacaacttaacttaaaagtgagagtgatcaaattagttcactctttttccctcttactcttttaagataaggatcatattatatatagtatagactatagaacttaaaaagagaagtttaacatgtccatgctaaggctctccatcatgacattctccatgaagccacatttggccattgggccagtaattgggcctgttaatgggctgggctttttgaaagtagtagtggatgtgggcttgaagactggacaagaagccagtggaataatgggaatgttttcacagttgcaaagctcaatcatataaccatctgggtcatgaaagaacacttggtcaaccttggcaccatcatcttcaaccaaagctgtcacatatctcatacccatttcttgtagtctcctcttcactagtccaacatcagtacactgtttcacccaatcaaatataattattattttttaaaaataaaaataaaagatttaatacaacacctttgactaatataacccaaagtagttggatgagtaagaataatcataatctaatcttctatacattgtatagagtctagtgtaatcattgattcattcaatcaaatgtcaatatatatttttcaacgatttaatacttttttgtttactaataattcaagtagtttttattcaaaaaaaaaaagtaattcaagtagttggatgagtggatgatagtagaaatagtaattagagggtgtttgttggcaccataactaaaataattagattaatttttgctataagtaattaaattttattctcagttgaagatgattacctaattttaatttttgacgataataatacttaagtta

SEQ ID NO: 294851 - DNA, 2044 bp, Cannabis indica
tttttaccctcttttttaaagtctatcatttttttttttttaaatattgtaccaattttgtccctgtcacttcaatatactctctatgtgactctcttatatcagggtattttgggtacaatagatataaaaagaggtatgtttcaaataaatataaaattagaagtaaatttgattaattgatcaataaaaggagcatttttcaacttacccctgtatttaaagagtatagttagggtagtatctctaactaactacaatacataatattcattttttttccaattttttttaggaacactctggcctctacgtaagtccgcccataaagtttaaatatttatttttgtgagagactttaaagtcattaaatgaataaacagagttagttgggccgttaataacaaaggcaccttcttagcctttacatacacttttgctcggacctattccgaccgatcatccacttctacttccggcgacaattacaatccaacatgttgctcaccttttctccttcctacaatcctcacgcggctccgattctctatcgccccatttcatcttccccttcgttttcgtcatcttcatcacttgctttcccacttactcggcggctcctcactccgcctcgtctccgctcgttccccaattcgactttgacctcatgcaattccgttccgttcgatgtcagaggtggcaaagggtacctacattgctttcttctttccgagctttatttggttttttttttaatttcaaattcagggtttcaatattttgggagtttttttttttttttttgtcagaatgaacgagttttatgaaattgagcttaaagttcgtgattatgagcttgatcagtatggtgttgtgaacaatgctgtttatgcaagttattgccaacatggtacacattttttcttggtttagagattaaatattcccttttgatcatttttcaagtgtaacaaattcaaatgctatagtttgatagagcagaattgttgaatgtgatactctggttttaggcacaattttgtagcttttagtttggtgatccatgtttggggttcttcattatcaaattcaactatgaagttacaatttttttttgagtagtatgaatttgtcttcagttttctggctcaactctttacctttctgtacaaatgggctattcaatccttttccacgcctagttcccattgtcagcgcggggtagagcagcttggtagcgcgcaaggctcataaccttgaggtctcgggttcaaatcccgtataaagattttaataaatgtcctgttagtgttagctattgtaggagaagtagaataatccaagaaccaagatttgtttaaacactccctaatgaattattctttgaatttgcaaaaccctatgtgatgtgtttcagttacttatagttaacatttctctagataattaggcatgaaaagtttataataagttctattttgttaaatactttgagccaaatttgttactttgttttcctcctctcttcttctttatgctatgcttctgctgtttatactttatatatgacatttgtggtatctgtcttgttctttctttaccttaaaataggcgtcatgagcttttcgaaagtcttggtctaagctgtgatgcagttgctcgcagcggtgatgcattagcattgtcggaattgtcattgaagttccttgcacctctaagagtatgtctatttaatgtttttgctttatttgcaaaatgctttaaaactattgagcctttgattttcttcaatgatgggtttaatctacaagtttaatgttaatttgtcctggcttagtgtttctgttaaagagggtttctactttctacaagataactcttacttatgtcaccttgctgtgcttcactagagtggagacaagtttgttgtgaaggtaaggatatctggctcttcagcagctcgcttctacatcgagcatctcatcttgaagctgccaaatcaagaggtatctctctctcttttttttttttttaacttttctct

SEQ ID NO: 294852 - DNA, 909 bp, Cannabis indica
tgttttgtttttctagtttcttctagagttacaaagttgttttctgtaactacagaaaaactgttttcaatactagttttattattccgcatttaattgaacatttaattaaataataaaactggaaatattaaaatacgaaatttcaaagtgtttctcccccatgccctaaaccgcatcttcacaagcgtctggtccgaatgactaatgtgcacaacaactcattcaaaacccgaaagttctatcttatgagtacatgaatgcccaatacacgaccgatatagtcgtaggcgttctattctataaacctaaataggtttgtgcatcaataaagtcctaagaggtttattcgtttctgaaatggtcacccaatatgtgagtaacaccactgaacctgtgagttcatatgctactcagaatgtgaacagacaatgtgcgattacagtagtcacaactgttcaaatattgattgagaatagaagaaaatgtcctttcatttattttatgaaattttttcatttgaattaaatgtaactaataatgtaacagtcttgtctgaccgattatgtaaactaagggatcacatacttcctatataaaagaatgatctaatctgaataagattaatcataagatcttcaaaagtagactaagcagaccaagctttgacaaaaaaaccactaaaatccatgtgttttttatattgttgttgtttatattatagtaatcattattttcatattgagtattctccaatttgggtgaatactcacagtttcgatacgtgggtgttcttaacctcaagaatcaacagggtttatccttgagattagtcaacaattagtcttaggaagcgagaggtataggctttaagagtcaagcaagtgataactgttgggaatattttac

SEQ ID NO: 294853 - DNA, 10542 bp, Cannabis indica
atagtttatccttatcccattccttatcatacctgccaaacatggccatgatattcttcatttatcttactatttgaattatgatattcttcatttttcttactatttgaatttggggtttggtcagattttttttttctgatttagctgattgatttgtggaaaatgacatgggtactgattattctgctcgtcttaaatcagaaaactacagaagattgcgaaactctgcatagcaatgagagtggaactgcatgccagagtttgaagaatgattttccagaaggttttgagacttcagatggtgacaggggatgctcaacaagtaatggcatgtctgcaataccttccgagtctgtgctacgtgattctactgaaggtagagggtccaaacattttattgagactgaggaactggatattgagaataagagaaggcgaactgctgtattagacagtgatgatgaatttcaggtgaagggttcagttttcagtacagttgaggtagaggatcaatctgatttaaaggatactgccggagaatctgctgctgatgctctttcttcccagaatctgaatgacaatttccactgtacagcttgtaatgagattgctattgaggtgcatccacatccacttctgaaagtgattatttgtgctgattgcagatccataatggaagaaaagatgaaatcaaaggtaaatacaaactttatgcctatcagtaaaattgttgtacagcattttcatgatgcaacacttgatggcttcgtcagttaatatatctataccttgctcattttgttttatatgtattatttaagtacacgaggattaggtctgcagaggcaaagacattaaatataaacaataacaataaagctatgtttgttaaggagggggagtaggatggatggagagttttgaaaggatggggagtaggagggatggagaggatagttactcttgttcgtgttgtttggtattagaagtaaagttggagggatggagaggatagttactcttgttcgtgttgtttggtattagaagtaaagttggaaggatggagagtaaaataaatatcaaaattactattttatcatttttaatataattatatatttattttgaaggttagaaatgtcattttatatagttttttttttgtctttttcttcaattcccccatttttggagggattagaaattgtgtatttgaagggaatgggtctccctccatcactctctcccttcccttctccctcttgccaaacaagggaattcatcaattcctctatccctctccctcctttctcttctcccctctaccaaacatagtgtaactgaaggacaaaactaaataaacatggcagctgattatttgtactctcttcatgagtatttagtagctagttgtagaacttagtgtaagtacaagaacttttgtattttgtctatttatctagtttgtataagaagaagggaacccaattttattctatcttctgtttatctatgataaaagtctgtattctttttgtgtgtccttgttgtgatgtcttgtctagggtgaattggcagcatgcctgcggggatgtatctgctctgcattatctaaatatttcatttcataggtttctttaatctgttaacaatacctttgttagtttacgatgaaagttttatatttttttaggtatctaatatgagccatcttcaaaaggctttacataaaccaaagtatattttccgtaggttttctaccaactttacttgagcttccaccattgattggttggattttaacatttacttgttagatttgtctacaggctgaggtcattataatatgttcatcacaaagaaaaaaacatgagatgttactttgcaagttgtggaagttctgcattgttttcttgtattaatttgcaaccatactgcgttattgggctttaacttttttatggattggttaatttgctatagttcttagtttttttcatgttggaacttttattaagtgtagttgtggcacttggcaggatcctgattgctctgagtgttattgtggatggtgtggaaagagcattgacttggtaaattgtaaatcatgtaagaatttattctgcacgacttgtataaaaaggaatattggtgctgagtgcttgtctgaggtccagatgtccagttggcaatgttgctgttgtcgtccaggtcttcttcagaagttgacattggaattagacagagcattgggaaatggaaaaattgttgattctagctctgaaagtgattctgataattctgatgcagatcatttaaatgtttctgtcaggtgtaaattgctcataatccttcattattattattattattgttatttgggagaattcatatttctagttggaacaaggacggttgcttatatatttcattctaatgtttgagatttttcctgccagtaccaagaggaagcggaaaaagaaaattcggaggatccttgatgatgctgaattgggagaagagaccaaaagaaaaattgcaattgaaaaggtattcctgcattaatttgactccatacgcacataacaactccaaaatatatattgtccgaacatgttttgactaatgatgtatctgagatgtatcctgtcaaatatggacgttaataccgaaagttaatgttcatgtcccgcttttgtaggaacgtcaagagcgtctgaagtctttccatgaacagttttctggcaaatctaatgttatgagctcagtaggatttaatggaaatttgtcagaagatgctagcactggtgtgcttggtgatgcatcaacaggttatattgtgaatgttgtgagggagaaaggtgaagaagctgtcagagttcccccaagcatttctgggaaattgaaagttcatcaggttttccttatgtgctctttttttttttataaagatcctttaatgctcttttgatcttgcaatgtgatgacatggacttatctaactatttcagatcaccgggatcagatttttgtgggaaaatatcatacagtctgtcacaagagtgaaatcaggtgataaaggtcttggttgcattctagctcatacgatggggctgggtaaaacccttcaggtgaggctctaattctgcatgaaacttgtccattgctctatttaattttgtactgtatgttgattttatcgtattgatttgtgtatattttatttattttatatttatttacttatgtagaatgtagatggtgcttcttttttcactccagatctttgcacatatatttagttcattagttttctataccttggaatgagaatgctggattgtgcaggggcagaagttataaagaaacacttatctttaacattatttatgattagttagtgtgcccttgtacctcatgagcattttatgataaatatggtgtttctaactcttgagaatctgtcatgtccgtatcttttgttcatgcaggtcatagcttttttgtacacggcaatgagaagtgttgatttgggattaagaactgcacttatagttgtgcctgtcaatgtcttgcataattggcggcaagagttcttgaagtggaggccttctgaagtgaagccattgcgtgtcttcatgctagaagatgtatcgaggtttgtatgaagtattcattctcagctatatattttaatttaaacttgtaagtggttgtcattacattagttggaccaaagaaattttagcaaggtgctaggtggctcttcagtatttcatagtaatataacttgagattttttaattgcatttcttgttgtggtttaacttacatcagtacactctagtttaaatttggttatttccactcttatggtttgatttctcaatttctgatacgatctgatctaggacatgatatctttttgccagggagagaagaggagaattgcttgctaagtggagagccaaaggtggtgtcttcctcataggctattctgcttttcggaacttatcatttggaaagaatgtgaaggaccggaacatggctagggaaatttgttatgccttgcaggttcttactttttattttttaatgtctgtagtttgcaatagtttgctctatttgattgatttcttttcatgttttaggctctattgtttttttttttaatataataaagaaacaaaaaaatgagatcaaaagtgatctcagaatagccaaatacagttacgtgatacactatagtccaatccgattcttgaaagcattatggaataggctctttattgatatctcaaaagaattacaaagtttccaagttattcaataaacttggcaaaactccctgagtaatcttttactctaaataatcacacaaaactcatcataacctcataagactcaatctgagaatttataggctagattaacgaagactctaactagccaaccaatagcaatttaactgtttgacaactcacaaacatttcatctcagcaactaactacatgacaactcagctatcataatcctattcaattatattttttagactaataacagagtcctaatattatgcacaaaataaaacaacaaagcattgaacaaagagtttttaattaagaaaacttccctaatctctactgtgatctaggaaagctaatactcaagttgaagttaaattctctctagttagttgaagtgctgctacttaccacatttttagtttaatgtagaatgcataaagtttttttaagtgctagaaattgttaagaggcattaaaacttatatatttgtaatatcttgctggcaaaacccacatgctctgatgctgagatttcaacatatagttagcaagtgatgatacattttctttctttatatgatttatgttcaacatattgggcttttgagctgatcttataacattgctaagggatttttacacaaaatgcctaaaataacattttgtttttttttttttacatttttatgattttttttttctttctaattacatttttacggagccttgtgaaagcaacatgaaaacatgtaaacaacataatacaaatataaggcaacatagtataattttgaaaataacataaaaaaagtgtaaaaaaaagtttaaatccgtaaaattgctgaacaaacggaaagatccatatttttgtgatctgtcatttttgggtaattatgaaaatatccctattgttaaatgtgtcataacttgtcatatatcctctcaaagctggttggttagatttctccataagcataagtttttctacttcaagctcaaactctttattttaatatattcattaaagttgctacaacaaaaaaatattcattaaagttttctcttccccatgttgtgttccccatcatgtcttgatgtagtcttttgtagtttaacatctcctattctattttatgtatcgtccacaaatttgcattattcgtatatatattttagtatctcattagcctatctccctctcttggaaaaacatgtttctcatgcttacttctaatataaatatatgtttcaactttcaggatggacctgatatactcgtttgtgatgaggcccatgtgataaaaaatactaaagctgatgtaacccaagctttgaaacaagtaaaatgtcaacgaaggatagcattaactggatcacctctacagaacaatctcatggaatattattgtgtgagtttatttaagggcaataattctggtttactatgtatgtaattttaatatctataatgtgtattgatgctgtggttatttttatctgtaacagatggttgattttgtgagagagggttttcttggaagcagtcacgagtttcggaatcggcaagaattctctacttgaacagtttttgggtgctttgttagtttgtatctcatgtctaactcaatccctgtgtatgcagcttccaaaatcctatagaaaatggtcaacatactaattcaactctggatgacgtgaaaatcatgaatcagaggtctcatatcctctatcagcagttaaaaggctttgtccaaagaatggacatgaacgtggctgcaaaggacttaccacctaaaactgtttttgtcatagctgtcaagctttctcccttgcagagacaattatacaagagattcctggatgtgcatggatttgccagtgacagggtctctactgaaaagattaggaagaggagtttttttgcagggtaccaggccttagcacaggttgctatctagcattttatattattacttatgttttcagttaactcgcacacagaaatcaacagaaaattacacatgaagtgtttatatatgtacttgtatatatattttccttatcttttctgaaaaggacatgtgagtaacaaatgggaaacaagacgtttaattaatatttttgaatgcctctgatcttttactaatatgaattttgaacctttttgggatggaattacaaaaactttaaggtgctgctgctttctcatttgtagtagtggtgtgctttaatgacttgatcccttgtaaagttgacctggcagagaagcaatctataatttttagtattgctttgtgtgagtatttattcttatgaaatgctatgttttctgtagtagatatggaaccaccctggaatcttgcagttgaaaaaggatgacaaagattcagttagacgtgaagatgcagttagacgtgaagatgcagttgataattttcttgcagatgagagctctagtgatgaaaacattgactataatatggtttttgaaggtatggaactatctacaggctcttctcttatagaagtcaaattaaaggttttttaaaaaaaatcgtgtatttattatattttatgctttacagaaaagcagaagaattcaaatgtggtaacacctggaaaaaatgatgatggtttttcttaaaggtaagtttgtatgacttttcttcttggattatttttcattatggtgtgccttcttcaaatacatcatttctacttctgatattttgctttaggtataatatatggccttttctttttcaggattggtggaaagattttctccatgaaactagctataaagagcttaattacagtggaaaaatggtaattctgctagacattatatccatgtgttctgatgtgggtgataaggcattggttttcagccaaagcataccaacacttgacttgatagaacgttatttgtcaaaactacctcggcaagggaagaaagggaaattttggaagaagggaaaagactggtataggtgggtatttgttagaaatattgttaattgattggtgtacgtattttttatgtgtgtttgaagatgctgcttacttttaacttatatatatggagcgactacaatttaacggcaaaaaatagccatctaattgaagcacttctaatattttttatgatgatgtctattgtagtcatagcaaactctgcaaattttcgaaaaattctgtacaatttacagtttaagcagtcatttcccatgcgtatgaaaatgtaggcacaaactatatgaaccttatttgagcatggtaaattatctagaatttcttgaaaatttgtagctatggctacaatgaatactgtcataaaaaggttggaaaaaaggtattttaagtgcctcagttagactgtaccctagtgtagttgcttcctgtatatatgctcaactggctttataagttttttcaatatcatttatttcctatttttttctttacttctcttacatattcataagattggaatgtgatgtttcatttatggggaaactgaattgtgtgctgcagctttgtagaattactactttaacgtattgtttcccttgttctgcaggctagatggaagaacagagagctcggacagacagaagctggttgagagttttaatgatcctgttaacaagcgggtgaaatgcactttgatttcaaccagagcaggatctttagggattaatcttcatgctgctaaccgtgtaatcatagtcgatggttcttggaatccgacatatgaccttcaggccatatatcgagcttggaggtaagtgtgtcccttcaatttatttaatttataaatcaacttcataatgacaatggatacatttacactgcatcggtattgtgttatttaagaattggtacccaaagagacttggctgtgggttacatctaatctccgagtaagcgcgatgtgatgattgattacttgctgggaaatttcaagtgcaagtaattttaacaagttttgcaatacttttgtttatggtttaggatgatcttcattctggatcagggtttagactttagattcaacgtgaaggcctaataggggctgcagcccttatgaagagaacccttggctgtgcagtgcatatagattatagcatcatttttaaactttggagctatgtgacagatcaattttgtttctgaaaatgtaacataattcactacatggaatcccacattccaaatctatggcatggcattttatgatttttaattattgatagtcagaaacctcaatagacacagaacttgactcatccaaggaggttacgctaaaattgtcagtcatgtggtttgcttctacaaggtctgagatttgagtatcttaggcatgtaagcactcaagagggtgacctacacagcaatagatatagtttctttgtcccgaaatattttatgaacaacttgaaaagaaaagaaaaagcataaaattcaaggtttattttttattttctcatatcgcttgaaagactacataaacaaacatttgtgctacaattttaggtatggccaaacaaagccagtgtttgcttacagattgatggcacatggaactatggaggaaaaaatttacaagcgtcaggtaatagcagcacagaatttcacctttatgtgatgcctgtatatcagttaaatttttattaaggactttcaatttcaaataggtaacaaaggagggtctggctgcaagggtggtagatagacaacaagtgcatagaacaatttcaaaggaagagatgttacatctttttgactttggagatgatgacaatcttgacaacttgactaatctcgatgaagagaatgagcaagtaaataaagatactacgggtgcacaggcttccaagtttcccaaacagaaagtgactgcttctcatggaagttgctcttctgacaagctaatggaaagactacttggcaagcatagtccacggtacatgttcatatttgattttactttgatatctagatggatccttcattctgtgtcatttttcgttctgctgtaagagaactagggcatgtgatttcccatgatcagttgatcacttcattgcacttttctctgaagctagtgcttttgattgttgcttggctgccactcagtctttagtcaatcttgtttttttaaacgtgaatgaatttccttggtggaagttccgcatatacctctatcaatcatattttttttttaatatatttttttcagctggattgcgaattaccatgaacacgaaacacttttacaagagaatgaggatgagagactttcaaaggaagagcaagacatggcttgggaagtattccagagaacattagaatgggaggaagtacaacgagttcctctcaatgacactacaccagcagagcaaaggccagccgcaccaaatgatgttcaggatgaacgggaacctgatttgggtagcagccttacacaatcaaacatgaggaagcgtagtgtgccacggaaatgcactaaacttgctcatttgcttacactacgaagtcagggaaccaaagttggttgcagtactgtttgtggggagtgtgcccaggagatcagttgggagattttgaatcgcgattctaaaccagcaaagtgaagaaattgtcattgtgttctgccaaagtatatagggctactgctgccttgagttcaatgtccctttgaacacaattattcattagattatacattcttttccctcaattctctatttgttttttcggtttaaaaaggttttctattggagaaaaggggttggtaaaaaggtttttgtaattgatgatgatatgaaactgataagcagagcatgataccctgtccctccctcttgtatataaatttttattaattgtgcaagtacttttgatcttctgatattgctaacattcttacaatttactaaatttcaattgcccagttgctgacatgttgatttgtgatgtgaactaatcttctgttgtgcttacgtctttataattactaatttcaaaatggattgttttttttttgttcaattgtatattacgaaactaaaaaaattatattgcatgcgtttgtatttttaatttaaaacaatgataacttcattgatgagaatcaaaatgtcatacattctttaagctaatatcataattttattttagtttttactttttttaatatcataattttaaaattaataacatt

SEQ ID NO: 294854 - DNA, 6672 bp, Cannabis indica
gataccaacttcagcaatggcagagtctcttgctcttctacatgttgttaattggtgcatcgatgttcacctccccatttctcatattgaattagattcaagtttgttgtgaataggcttaacaattccacttttgatctgtcaatattgtctgatgttttagtgaatatcaagaattctttgtccttgttcccaaatgttactatttcttacattcctagtgaggtaaatattttagctcacaaaattgttagaaaagctttaggagtggataaagagttggtgtggaatagtccattaccaccttttaagttataatctctgtaccttactgtttcattaattgagattatagtttttttttaaaaaataaaaatctaaaccatacatatgttttgtttattaacattgaaataattatgccgctaagaaaaatcacgattatacactcaaaaactttaatgcttacaaatttataaatcttaaatgacatcagtataaatatattttataaattattcaaaaaatatattctctatttaggaaaatattatctttattttgttaaaatgtatggaggaatcataatctcctacctttattttataaaatagatgaacatatcatgaacttttactgatttgtttcccccaagatttgatcttcaactctaactaaagccttcaacaatttattgacgaacactatcaaaagtaatacagacagaaggccactgaataagctaaaacttcgataaattcattagaagcaaactagttcctattcttccaaaaagaccttcaaacactttaaggttgtacaaactagcaacaatacctgctccacaaagaaccaaccaggttctgtaaagcattttcgccaaaataaacacggaaatcttatagaatttcatcaactttgagaccgatccacttccaatatggtcttactaaataattgtttccaatcaactctgtgatgttcgcttctactcgtagactgcaatcaccagtttttggtgctgccagctcccagcaaacgtcgttcaactttatccaatagcatcatcccccatgtctcactttgcacttcaatagcctcaacaatcatctctgatgggtgcagtttatgaaccagtagacctctcactccggtgggatttgtgtcgtttgtgagagcgttgttcctccctattcttgtagtttctcttgtgagaaccatcttctttatctacagatttcctattataatggtcttcctccctctctacagaatgcgaggaataatcaagcttgtccatagatgtcctttcagcatattctttgcctttctcctcaggaaccctatgagagcgcttttcccggtctgtagatctcctcttatgatattgttcttcccttttcacaggactgcttctgctaagttgtccatccctatcttgggacctactcctatgagatacttcttctctgtcagctatgttcctttctcttctaggtggagatgggacctacaaccataaatagtgagaaagaaaaataccactttttacatgcgtttcaaatttaaagtcagaatacacaataacgaattgttagatagattttttacaatcacaaataaaccatttaatgctttcccaaaattataccagaaaattgtaattcaaggcaataaaagaacgagaatttagaaaagcttaaaagacaattaggaaggcaaataacaccagtatgctctaaattgaccttcacaaaagcagaatgtgaataaaagaatctgaatttagtaaagtgtaaaagacaattaagaaggcaaatgacacggttatgctataaaattgaccttcaaaaaagcagaatgtgcataataagtatgtatcatattcgagatctatatgattaatgaagtgaaatgacatatacggacatacctgataccgtgacatgtattttccttctggtggaggtggaatacccagtttttttaaatcatcatacgggattggtcgcctgatcacatgaaaagggaaaaataggaatcagtttattttgctgatagacatggctcaacaaactaaaatgatgcattgttgtattacaatacaatgcaagacaacatggatttaattttgatacacactagtgcaccatttagttcttgaaagaactatgaaaagctaagagtaagaacagatacaaaatctcaagttactcgagaaacttgttaaactccctgagtaatattttactctacataattcacacaaaatcccgtacatctaataagagtattataggctaggctaacatagactcctacttgccaaccaatagcaatctaagaactaggcacacttaaacaatcatttcagccactaagcacttgacaactcagcctccaaaatcctaatcaattatactagagactaatatcaaggcctaacaaaatttcagcactaaccagctaattcaaaaaggttatacagaaagcttatgtaaaccttgttcaaaatattcaaaaagttcataagcagaaaatattcaaaataaacgttgttcaaagccaacaataatctgtcagaaatatcaccaatcttttaataaatgaatcgtactgtaatgcatgcttaaggcacatatgcgaaacttcacatttttaaatatttcaatccagaaaactggggacacaagttaatctactctccttctctcagtgattgaacatacttgtggccaaatccaaataaaatattcacaagctatttgttaatgccaatgcaaataatttatatttaaaaaggtaaattgaatccacagaggaaattctatgcatgtaaacttgaatttacctcctacaaaggaacccatagcaacagtacgaagctattggtttctggtttagcatgtaagaaataattttggtacagaaaaagaggaaaatcgcaacacgtaagtaactgacacaaggtgtatcatctacatcctatcatgaatattcttagtagatttaactacagatgatctcctttgtggcatattctgtaacttgacagagttggaaaacgtatagaatgaaatgactccacttcatatgtgtgtgtgcacacgtgtttgtaaagtcatttaattcatatcgggaataaatacaaaaaaaatatataaaagtaattcaactgtaaattgagcttaaacagtggttggaggtcaaagaatcatgtatctagaatgtgcactgggcatcaaaagcccacatttaaatcacttgaagagtaaattagtgaaaaaaataaataaatcagatagaagtcatgcatacaggggagcacgaaatggtctctctcgtcctccaaaacgaagttgtcctgattccttcttaccaccaagtccccctccttgcaatagataacaaatttaacaagaatttgatcaatgtcggattctaagtcgatagataatataaagagcaccagactgacctaaccttcgcgggatccagcctggcatcaactgctgtctgttgtaatcaactataatttcagaatcatcaataatcgaatgttgagcatcctgcacattatacatgaaaactgatttaaggactgggatacatctggccactataagaattagatgacaaaagagctctaacattctgaactcctaacaaacttaccataatttaatgtactaagtcataattatgtagtacttaaagtttaactttaaaaacagttccagttaaatgaatgaactaaatttcaggttctttaaagttctatatttaccataggcagtatctcaacagcagccttttctgtcaatttgttagatgactttattcttttagatcacttatttcaaaaataatgctaacaaaagttcatagccccaactataacaacaaagcctattaaaaaagaagagcaacaaataatcatacaaccttgaatgcacgccgcatatctctttctgtttcaaactcaacaaaagcataaccacgtgaagcacctgttactgaagcaagtaacaccaagtaccaactccataaattacataaatgcagaggaaaaaaaagggggggtttctctaaatcataaataaattacataaaacatacaccgttcaaatcggatacaacaataattttaagagtaaagcatttggtctttggcttgaaattaaaaggaaaaaggttgaagacatattgcagccagatcgataatattgtccacgataagcaggatattacatcagaaactaaagtttaaacagaagacagaaaaaatatttaagggtgcacttggaaagccacaatgtaattggatttgtgtgtaattggaggtaattacacaatttgacatgtttgtctgaccatgtaattacactgtaactgtgtaattgaggggttccaattacactctccaattctcatggcccccatgagaattgaatgtaattactgtgtaattactaaaaactttctatattaaacattagctactaaaaaatattattttcccacgtaattactaactattttgccaaacaagatatcaaaaattcatatgtaattatcactttatatccaaacacactttgtattttaaaatatagtgtaattaccacactgtataattactagtaattacacagttacttccaaacgcacaagcaaaaaagaaaaagtcagcaaatttgaacatatacattcaaaatgattaagcaggctgttgtattaaatcatgcgtaaaaatcataaataattattagcattctagttcacaattcaatgaaaatgtaataagaaataaatatttaccaatgtgcctaactaaacgtaaattcttgacccggccatacttgctcatagcctgaagtgaaccatcataacccccaaattcaaacgacagaaaaggttaattcgttagccgtaaagtaaataaatagagaacatatacagcgaaaaaaaaatgacaattttcgaaaaagaaaaaggaaccttgcgaagagtatgttcggtggtctggtgattgaggcgagcaacaaagagagtgcagtaagggtctccgatgagcttgggatcaccgaaggggtcatctgcagaagtatagttaggggagatgagagagtgatattaagaggaagaggaggaggaggagaaaaaatgaaatacggacatagagcagcagagttgcagagatgagccctatatatagcgttgtcgtgtggaaggacatcggtggcgtcgatgcttccggcttggatgggatgatatgagtcagcgtagaacactgagtttaagttactcatctcattctctctaacccttttctccaatttttgttgatggggagggaaatggaagatgatggatgttttaaataaaacacattaattatttattttattatttgtaattctacccacgaggcattaagcaagatcaaattcaattcaattacaaaatactaaaaaataaaagaccccgctcttatgaaatcataagctatatacattattaaaaaaaaattaatatttttaaaaatttttaaattgataaaatattaattaattattagataaataaaaagtttattttgggtgattttaatgagattctcacacatgaagataaaattggtggtcttcctagaagtaatgctcaagttgaagccttccaaacaacaattgatttctgtcatctcaccccaactagctatgaaggtaaacttattacttagactaataaaagtcaaggccttggaaatgttaagaaggacttgattatggattctacaacgaattctggacgaatttctttaataaaccaacaattcagcatcttgatttttaccactcaaatcacagagctctcaaagttgttattactatggcaggtgtgccaattactaaaccttccttcaaatctaggttcatatgtgaaaaaatttggctcaatgatcaagttgcttagacatcatcctcaacaattgggtcaactcctcatcaaactccattttctcaaattatgagtaacttcaatttttgtgcaactcatcttcaagcatggcatcatcacaagtttggacatatgaagagggatatcaaagaagctcaaaaacatgtattagttctgcaaaattcatccgacactgacccttctcacttcacggctctcgaaaattcagagtttatcttagatgagcttcttgcacaagaagaagactattggtgacaaagatcatggatctcttggctgaaatatggcgagtcaaacactaagttctttcatcagtgtgctaatgctcgacattccaacaaccgaataaaaaagctggttaataatgatgggttgtattcataccaatgaccaaggcatactagatcgggttgaaaattactttgctggcatattcacatcacagggccttgattagcatgctttagacaccgtcctagaaaccatttcagtttccatttcacctgaatcaagagtagctttatctctcccttacactgctgttaatgtgctccaagccttgaaatcaatgtctgaagatagcagcccaggactagatgggatgtcagttatgttctataccaactactggcatattgttggtccgcttgtcacttctactgtgttggaggtgttggattttgtgcccta

SEQ ID NO: 294855 - DNA, 2543 bp, Cannabis indica
ttttagaattcatattaggatcttaatgaaacatacttgttagtaaatctagatcctggtaaaatatatccaacatattgtgtctatccattaattcccagaatagtaaccatatccccctctgcttcttgcaaagcttcatagccattccgagttgctgcctcctactgggcttttgcaactatttttgtccccttctttttaggcgttacccaactttcagcatttttactcccctgaggtttcgctacctgtttggaatggccgatcccttcctctgtactcagctggttcacattattgattgggattgcctcttcttctgatgtttcagtatttccttgtgctagaacactctcaacattcatctctttttcttcatctttccttttatccccttgttgctttttccttcacataaatggcttatccttgttgcaatttgagacattgtgaccaagcatattacaagctgcacacttcgttggcaaccactcatattcaacctgttgctcaacaagctgttttttctcattaacaaaagtaatggacctcgggggttcatctttgatctctacatctaccaacactctagcaaatttcaccatggttctttcaagcgctaccttatcagccattatgggattcccaattgtgcttacaagcgcactcaagttcttcttcccccaatactgaaggcctaaacgattcaaccttatccaaacgggcaccgattttatcatttgtgcagtgtccatgtcctcggaccatggtctaagaacaaccagttttttatcgaattgaataacccctgtttctaggataatgtccctagttacttcatccttgaaactcaccaaagtaaacccagaatgcattctaacaatcctctccacacccaaatttccccaaatcctcttaataaagccctcaaagactctaaatggagggttggctcctaggacaatacagactatcgaggatctccattacgaagcttctacttcggcatcttctaaatcaattttagcaaccacttaaagttcagttgggatgaaggggttctcacctgattcaccttaaacttgctccacgccaacttcgccgactcctggtaatcagtagcctccacctcatctgcccagttcgtcatagtgggtgtcgacttcacattctctggttctaattctttccactcaggttcgatttcttcacacgggtccaggaacacctccgtttgtgctgtagcatcatcatcttggattaaaggtagctccggactcactctcgagatagcttcagacttcgatctaggcttcgtaaccccttttctccttttcgccatggaaggagaacgagagcaatatacgcctattatttatttaaactataccttgttatactaatatttaacaaaatgtatttgtgcagtttacaaccaaaaactttaacgatgtgggacgaactaattgagaccgttggaaaaacaatatgtgaaattcttccacaaaatcctattataataggaacacgtctaaaagttgtttcacacaatggttcgatttctttcaactaattacttattattattaaaagtcatcttataatatatttttttttaataattcaataggtatatctttatcatccaagcaacaaagttcatttatcatcaaccttacgaacattccacaaataaatgagcttcgtcaatggtaaactaatttatacttatcttttataaattatttcttattacacctatccataaataattcttacatatctaattattttgtcctataagttaataggagcattaacaataaagaatacctatctgccattatcaatgagaagagactcttccaaacccaaactgctctaagaactcttcaatataataatatcattactattaatgatattcaaaatcttccacaagaggtatgtaaaaatatgtttatttaagttttaattaactgattagtttcttttctcaatgtttataattattttttgttctacataatattatatacttaatttcaataaccatatcatgcttcattagcaaactactttttggatcaatgcatcaatctccatcaaaaatttaagacaacccttctggtacatggcttgcacaaaataccgtcaaaaagcagatcttgacaatgaaacatcatgttttaaatgctacggatacaacaaatcagctgttgagaaaattccaaagtttatatgaacttaatttaaacaaatcttattatcataatttgctacttaaataaattattttgcatctgaatatattagatgtcgctttcacgctcaactaacagaccacgcaggctcactaatagtgacattcttcggcgaaaatgcagaaaagtttttaaattatgccgcagaagagcttattcacatgccaaatgtaaattctactacttaaactcgttcacttcattaacatacattaataatactatcttcctcaatgatgcttttaataacaggatcaaaatattgttgggttttat

SEQ ID NO: 294856 - DNA, 2765 bp, Cannabis indica
taagacacaaacgagactgagcccgaaatatagaagaccaaaaaaaagacgatcatctctacccggatcgaaaagaaaacataaagcacctaagaaaccaaaaaatcagacaattgtctgtcataaaaatttctgaactctcttaagtaagaatacaacacgaaaaaatctcaggaatccatgctaaaaaacatatatggatagaaaagcatgcttaccataaatgcagatatgatagttgtaacagaagcaccaatgaatccctcccaagttttctttggagatagcttgattaatggggtctttccaaagaagaatccaaagatatatgcagcaatatcgttaataacaatgagtgttgccggaagaagaaacctgcatacatatggtacagtgcatcaagaaaaataaattataagatcagagtataagcacatacagaatataattgaggggtataagcccataataagtggacaacaagtacaataccagttcccatttgtacaattcaacttagcaaaatgataacattctaggacacttcacggttaactcacttctacaggagataagaggtgaaaacagagtacaatcatcaagcaatttcacactctaactttctaatgtagaaagataaggtggatcaatagatgatttaggaaggtcctatacagactgattttctgaggaatttattttaccagaaaattccttcaaaaatgttggctactgtgaacgaggactgcgtaaacacaacaatgagaatcatgtgtgtccatgcatactggccaaattgatatttgtacatcttcttcttcaatgtaacgatgaaccacacaaaacctgagccaaattacaaattaaaaaaatgatgtacataataagcagctaaacatcaaggaaggaaaaataaaacaaaaaggaacaagacacacaagaaagtaaacattatatataagaagtaaccaaaatgaaatgctaagtgataattatggctttgtgatgctatgagtctatgagtgacacagtgacaccaaaatcaaagttcccaaaattaattaaaataaaatgtttattgaacctgtgatatataaggagtaacagataaccatatgatacttgataaggttgctaacaagttgatagagaaacttgtccgaagttactgtattgaaaagccgttgactgagaatgcgaccatatacaaataacatggcagtgaagaagaagtgcctggcatagaaatagaaagaaaaaaaaaagagtacgcggaaagtatacattagctattattttaaagataaattgcttcaattagaaacacacttcaaccatcactagaacaagtaattaaaatcctcaccaatttaaaagcctaaatcctggtagatgactatcttcatgagctttccttaataaattgaacagctctttcgccataaagatttgaataacaacaaccatagcagtaatataaagatgacccatataaacaattaacacaaaacccccaatcatccaaatggaagaatacgcccgtatccacattgacttgtacttgttacgatcattaacaagtaaactgcctccatttgttttactaacatctggaacagcctgaaaggccaaaaataaacagattaataaacaaaaacaaaggcattccatttgttttactaaatataaaatcacaccaattagcacccattacatattcatgaatatgtttccccactcccccacaccccaaaaggggaaaaaaagaaaccaataacaaaaaaacagttataagtactttcaacttgattgacaatgacagaacaccaaattatgaagtgactaacctcatttgaacgtcttcgatggcgagctcgaccagttggggttgatggagtggtaacgttatccctctgcatgactttaatttttgctttcactcatacgataaaagtcccacctgaaacatttaagggcacacaaatttatttaattttttttaaataaagaaatgattttcaaagtacccaaatcagctaatatatacgaataataattctccaaagcacagaagtaataatctacattgctaatcagattcaaaactccatataacgtttagaaccccaaagaaataaaacaactgaagccatatatttctcaagaaaaaactactgaaatgtaatgaaaaagaaaaaactctttacattcaaatctgagagatatagacagagtgagaacaaagttgaagtatggtttttccgagtggacagagttagtgagatgaataagaaatgggtttcgaaacccaaacaatagcaaaaacggccgaataagaatctggcgcaaaggggtttgggtttggatttcggtaaacgaagggaggagaatagaagcaaaaccaactatcaaatttccgtgcgaaatagaaatatcggaaaataaaagattacatatttttgctactcttgctatttatggttaattaccgccattagtccctacattttctaaaatatcatactttagtccctcaaacaaaagaaattcgcattttcattcaaaaaaaaaagctaattaggatttttgccccctgaactttgacatgtaccaaatcatgctccctgaacttttaaaatcgttaaaaaagccccatgaactattaagattattggaattaaggatttttgtctaatttcattcaattttactatttcagtaaattgtttatgtactaaactattgatcccagaactttgatatct

SEQ ID NO: 294857 - DNA, 847 bp, Cannabis indica
gtaatgggttttatttagggcacaaaatccaacaatgtggtgctcattccaaaggttcccaatcaaaagaaagcctcccaattcagacctatctccttgtgtaatgtaatgtacaaagttatctcgaaaatcattgctaatagaatgagagatatttttcccaagttgatttgccccacttaagcagcgttcatccctggtaggaacatttaggataacaatgtgttagtccaggagatcgtctactcatttaaattgagttggccattcgttgatcatattctctgtagcttcaaagttccacatatgttctgcaagtaggtttaccagtgtatatcaaccacatccctcaacatttgtctcaatgggggaatggtggggaaaattgatcataagtgtggcattagacaaggagaccccctttatccttatatcttcatttgggccactgaaattttctctcgtattttaaaggatgctcttaataaatgagtgattaagggaatcaagctgagtaggaatgggcctcgaatttctcatctcttttttgccgatgacctcattctcgttggacgggaaaacattatcgaagtgaaaggttttgggggtgtcttgaaaaattatgtcagtggtccggtcaacgtattaataaataaaaaaacatctatattctttagcaacaataccagtgtcgggatgaaaaaatggtgcaaagagttgttgggaattcaaagctctactaggaacattaactacttgggtctcccccttttcagaattcggcaaaaggatgcagacttccattttattttagataatataagctcaaagtgttgggttttatgcc

SEQ ID NO: 294858 - DNA, 6667 bp, Cannabis indica
gtcttgtattctacttaggtatgccatcattttttctccctgagccatgtattcacccagaatatgatttacgaccaactaggagtcactacaaatttctaagtattaaacatttacttctcgtgccaatttaatccagtagttagtgtttcatatttgacttcattatttgatgttgtaaaatcaaactttattgctccatgcaagggattcccccaggtgtgatcaaggttatccctggtctagagagctggtctttggatgatccatccacatgaagcttccaaatgggcttgttttcactattttccttaggcgtggattcttttcctggcttgggactttcttctaaaatttctttttcttttctcatgcattcggttacaaaatctactaaagcctgtccttttgttaccgtatgtggctggtaagtgatctcatattgccctaattcaatcgcccatttaagtaactggccaaaagcggctgacttttgcaagacctgatgtagaggttaatcggtataaactcaaattgggtgagcttgaaagtaaggccttagctttcttgatgctcgaagcaaaaagtaggttagtttttttttatcaggggtaattgactttctgcatcaattaatcttttgctgacatagtagagtgggtgttgggagttactttcttctatgatcaataggacacttactacaaattctatcactgtcatttaaatccctaactcttctccatccagaggttttgataaaataagagattgtgcgagttgtatttttagcccttgaaaggccttttcacactctctccgctcaaacttctttcttgttcagatgatattgaagaaaagaacgcatttatcagtgtattttgacacgaacctgcttagtgcagctatccgaccaataagactttgtacttcttttacttttgttggcgatttcttgtccagttgggcttgcattttctctagattggcttctattccgtgagatttgacaataaaacgaagaaacttaccgagctgaccctgaaggaacattgtaagggattgagtttcatattgtattttttgaggattttgaagcattcatctaagtcatatgtgtcccctaacatttctagatttgacaagcatataatccacataaacttccatgtttcatttgatttgatctttaaacatcttattgaataacctttggtaagtagcccttgcattctttaaaccgaacgatataactttgtaacagttaagccaacatctgtatagaagcatgtatgcttttgatcagatggatggatccttatctggttgtaccacgaatagtatccataaaactcaaaatttcacgacctggtatggcatctacgagctggtcaattcttgggagtcttttgaacatgccttattgaggttggtgaagtcaatgcacacatgccatttcttatttggttttggcactaggacggggtttactacctaggacggataaaaggctttaatgataagtctatttatacgaagcttttccacttcttccttagttcctttgctcgtctttgtcgagtaaccttcttttttattgtatgggtttaacatcaagatctacgtttaggacatgtgtagttattaaagggtcgattcctaccatatcttcatgcgaccaggcaaatgcatcaagattcgctcttagaaattttatcaaagttgatttcattttaatcagaaaacctttaccaattttgattttcctagacagaatgtttggatcgatctcaactccatccaattcttctagcaacccaatgtttgtacttttctccccaagccacgaatccacatccccatcccttccttaggcggattcctggcttttcctttctctaaacccttgttggatttttcttcttttttggccttacttagagcaaggttgtaacattctcgtgcagtcttctgattgcctcttagacaaccaatcccattctgtgttaggaattcgacacacaaatgaaaaacataagttactgcttttaagtcatacaaggctggacaacctagcataatgtcaaatgcagaggggatgtctactaccaagaattgtgctatgattgttgttgtagctggagatttcctactatgagtggtagggagcatgtttcaagaggcgctatgctttggccagagaacccataaactaactgcatacaaggaaccatgtctttaagtttaagatccattttctcataagtagtcttgagcaagatattagatgaggctccattgtcaatcatggtctgtgccactattttttttgatattttcacatccactgcaagcggatcattgtgcagatagatcacatgactggaatgttcatcactgaaagttatgattggatcttctctcttctacggccaagccttcattgccctactcgtactgaagagtttgagcatatctttcccctatgtatttagaatatctagcaatatgcgggcctcctataataacttgtaagtgcccgtccacaggtggaggcattaagaaattttggttcttatcgggtttggtggccctttgatcttggtcagcctttacatacctttgtatgtgcggattgttctttctaatgagaaatttaatcttttcttttaagtttttgcactcattggtatcatggtcaaagttcatatagaaacggtagtactttgagtgatccctttttcttacatcccttttcattggtggaggtcttttgtacgacactaccgactttattaccgtaaggatggtttctatttcttctgtgagaacagtgaaagctgtgaactttggggtcttctcgcaaggatgttagtgtataggattgttattaaactttccttttttaccatttccttgattgttcatgccattcaagttttttccactctggctgtttccagcttggtttggggtttgcgtcattgacataccagtggccgtattaggcattggccaatttttttctaactggaaacgtctactctttgagtagctattcaaatttcctcttctagctttatgaatctgttagctcggtccaaaaaaaattccatggatcccaatatcaacctcttgatatctttcataaatcccccattggtaaaattcctccaagtatgattgttagccttccttcctctgtcgaccccttcacccttactacctgtgtcataaatcagccaatataatctctgaggggttcatttgacagttgtttaactctgatcaagtcttccaagtgaacatggagttgcctagaagacaaaattatgcatggaattttgatgtgaaggtatcccatgaatcaaacttacctggtgagaacttgaaataccattgttaggtagcttccgctaaagtagctggaaaaattctacaacacacatctttgtgcaccacttgtaagtccattttcatttcaaagttctttatatgggataaagggtcttctttactagtatacaccttccaagttggcattttgaacttgtgtggcaggggaagtgcatttattcaagcagtgaatggtgagacttgtcctcggtcaagttctaggtcaatgatttttggaataatcaagctttgtactatgctcttaagatgatctatttgagcttgcacccttggatcaacttgacctatttgttgcccagtctatgtcacctattgtccccttctaacttcaaccaacacataattgtccaaatcaattggctacatgtagcgaggaattactctatctctttgctctctctgttgattcaaagtgtttttgagatcacctagttgagtttcaattctttcaaagattgactaaccttggggtcttcttgtagcatcagcattggttggtggcatctccctctgggtacctcaatcttgccgtctttcagcacaagtcacaccatctgcccgatcttcattgttacttaagaatgattgactacgagcgattgtagtctaatcttgttgttgggctgtgtatgggacatactggaaatactaaacttgcccatttcgataataaatagctataggctctcaaaacttttcattaggctggttgggtgtttccacatgggggcaaaatttttgactatttttcctaatgtgacaccctagcaatacatggatgtctaccgtggggcctacatttgtattttgtgtcctaggatttgacggtccagcttgctgggtgtattgggtgtaactcattgaaggaacttttggcccatgtctattttcaggtggcatatatgtctcttttcctctattgggatctctaatgaggggaataatttcttgtcgttgttgtccagttttttgattaaattatcttatcaactttgtggtttcgtgtgaccgattaataattgcctcctattgagcccttacactttcaacctatctatccatccactcctagaaaagcctctttttcagtgtgaatgattcattcatggttgctcgagtatctgcttcaccatgatgaagtgtattagtacgattctaaatgtgagatactgcttctcttaaattatgcaactcagtatcatcatctatagtcacccaaggttcgcagctggtggccccccaatacctgagttggtctctccaacaccatgggtactggtagttccagtattttgagtgcctggagtaacgccaattctaggacagttgttgtttagatcattttcatgaggaattctcgtatttgtaggattttgaacatttggataaatcaccatgggatccgtagaattagtagcatgattcatttgatttgttacaaccatttatgatttaaattgaacaagatcaatccaattgcgttcttgagtttagctctcaataaaagtgcaaaatgttgacctcacttttggtcaataatactgagtcttgaaagagatctagaattaattagattcaatgagaatatgtctataaagcataaactgagaacatgagattttatagaggttcagacccatttatttggtaatagcatactcctcatttagttgtatttcacttgtgagaagagcagaaagaacaacttgatctctctcgaaagcttttatagatatttgagcggcgtaatagatctcttgaaagtatgatttccccaccctaaataatggaatggctccactatttataacgcataattacaatagaaaatagtttcttaaaagttgtcaagccgcgaaataggaaacaaataacttttttaaactgtgataattacatatggaaatcctctaaaataggtattttattaaatataaaatgggaaactgactttaatgagttctcttcatgcattttgccgaagtcagaccacacaaagtgctaattgcttcttgttgtccaaattaactttgtttcctctgtacaaaacattttatcttattcttttattgttgcatttggcaagttgattatcctaggcgggcacttggaagaacatttattccactcaggtcttgataacatgatacgtgtcacccaaaaaatatgccacatcacccagacaagattcaagataataatgtaaaacgtgagataaagcccatgatttataactgtccactaaatagtcttgagtaactgttatcctgattctagaaatagtgggaaaatcaaggggaaagagatggctaattgatacataaaaactctgccaaaatttctacttatcaaatactcagaaaatatactgactcatggactagataaatttaaactactgaacaaagtaaaatcttgtctttttttattttgttttaccgcatacttattattatcaacctacgatcaattcatagtattaattatctagcctcatttattattaccaaatttttgagttaacagataacctttaaaaaaattataaagcaaaaaataattatcgaagatatctaaattaactaataaaatcatatttaattaaaaaaatagccatgagtacaaaaatggattttcttcatcctcatctttccctcccgctaagtcgccatagctgtcttgacaaaggttcagcgattcattctaattgtaagtagaatcaaatgggttcaagacgtcgtttaattcctccattctgcttcagtacaatgttgcacactattaaattttaggataagttgaatgaggttccatctcaaaaccaattggtaatgggaggagtagcccattcatcttatatattctactatctttccatacattagcaatgtgggactctctaacatctcctctcaagatggtagctattttatttcctcatcatcatggacaactcgatcataagtggctcttttttggttcactatctcaaatcacaagtggcttttttttttttttttttactttttggctcttggatcagttttttttgaattttaggtggctcctttttaattggctttacttctatcagtttttttgggggtcggacttagaggtttttgttttttttttctctaataccatgttaagtttaaggataagatgaatgagatttctttcgggattttatgccctaaataaaatccatttcaatgtaatctgatttgttctcaatagaagattagaa

SEQ ID NO: 294859 - DNA, 2118 bp, Cannabis indica
tattatccttctcatcaaagaaatcccacttggatcaccaccttgttcttcaaacaccaccaataagttaccctttgggtgcagccaagatcgcggaacatgatacctataattgttacaccaagaatatattgcattatattatattctattgtataacttagtataaaatgggacatagtgaagtattataatcaatgattgaaagacatgtatctcaccatttttgagaggcctctccacagccaaccaaacatttcttttcatgataggttccactgtatctacacttgttattacagctaccagttgctttatatgaagcccaatatcgtccaatactttgtccatttatccatatctgaccttttcccatgctactcatatccaatgctagtggatctctgccttctggtgaatcaaatgttgtctggaaaaagatatatacatattttctttaaagaaaaggtgtttaaagatttcttatacaacttggaaaaatgcatgatcttgagtaaagatggagaatttcgattggtgtttcaattgttctaaccttgtaccatgttaaggatttctttctaggtacagatgatccttgagcccatttgactgaggagcttcctttgaatgagtagagccttaaagtttccccttctacaccaatctgcttagagaggtcacttgggtattagttgtttctttagttcttcatttttgtaatgctaaataaacaattatgtcttaacaatatttcaacagttatatataaataggacagaaattgtgtactacaaactaaatagtgtactgctgaaattgtgtactacaaactagatttcttatatggtcaaggtgtggcaattggcaaaccttataagaccatttccattgtgacagatcattccatagtctcccatttagtaaatccaacttcactggcccaagaataccagcatcccatgtctcaaaatgcaggcccacattctaaaattggaaaatttatgagaattgacttgagaagacaataccaaaaaaagaaagaaaaagagatgggaaaactgaccgggagaccaacagtaatgcttaacaaggagattttgttgataccagctatgagcttcacttggccaatgaaactcaactttggattttcaaaacctccataagcagtacctgcaatagaataagaaactagagactaagaagaagaggaagaaaaatgcttgcataacatggtccttgaaagttataaaaacaagaatgtagtcatgtacttgtatagtaccagataattgaccattgatgaaaacttgcaaagcatggccagctgacaaaacatggagtagtacaggaagatttccattctttaacaaggcatcatctgctcttatattgaccctgtcacagcaagagaatatgtaattattaccaccaacagttgatggatcataatgtttcaagaaaattgctctttgatgctgacaaatgagtacttactcggttgtgtaccacaaataatctgaggcatctctagtgacatttagttgatcaagtaatcgagttgatataaatgaacttttgtcatttgtagagggaactttttcagtatatgaatgccaagagaatttctttgcaggttccatctttacagtgaaatttggtgcaacaacctgtacataaaagaaaaaaatgttggttggccaaaaacatgtctttataataagtgtactggtagtggttttctcaccattgcagtgttgaaacttggttcttgacagtcaggaagaatggtgatggaccaaggaagaaggccatattgcctattcctaaaggtcacattcacaaaatagttggggtcgtagtttgataggaatgcagcacaagtcccggattgagtatcaaaaacatgagccttaagaaaataaattgaattacttgatgctttttttaggttaattaggattttgccctcctaaactttaacatgtactaagtcatgccccttgaacttttttagccgttaaaaaatatttcccgtgaactattgagattattagatttaagaacttttgtctaatttcattcaatttttactatttcagtgattgtttatgt

SEQ ID NO: 294860 - DNA, 8828 bp, Cannabis indica
taagtaaatatagtttaataaaaaataaaaaaaaaaattaagtatagtctttcaatattttctaaaaattaggttggaacagttctagttttgtaatttctcaaaaaaattttgaaaaactattacttaccaaacacatttttattacagctttttaaaaagtaatttttagcttgttcaaaagctgtattaaacggaccttaaaaataattgaaatgttattagtcattgccaaaataaattataaatcatactcatttattatgaatttggtaaatttatcattgaaaagtatatttaatttttaagaaattccaaagatggtttgaaaaactaatagataattagaatggaatctaattcagtgtaattataaaatttggggtatgtatttaaggataaatagcggcataagtacctaaagttttatgtttttaagcgtcataaacccaatgtttatttttagcagcataagtactcaatatttgtattcctatctagacctaatgatcaagaatttaggccttatatgtgcccagcttaaaacaataatagagtctgtactgacaaaattagagaaaaattacagtttataaacattgggtacttatgccgctaaaaataaatattgggtttatgccacttacaaacataaaactttgggtacttatgtcgctaattaccctttatttaactacgagaagccaactcacatgccctaacaaaatgattatataaatatatagattggagatttgacatatattactatcttggataattaatgttattttttatgcacaatttaaaaatagtaacttacaattggttatcgatattttataaaaataattacattgagaaatgttaaaaagtacccataatgtctagcaagtgtaatctcgctattgatataatttaatatcgaatctcacttattttagtttaattaaaactataaagaactgttaagttgctaactaattataagacgtcacctcataaaagtgttaagtactttggtgtcccataccaactcttaattatattgaattatatgagatctaatacttaattactttgataggaatataataccttaagaagtattaaagactattgatatcttttaatattttttaatttttttcttcttttctatgtaattattaattactcatttatagaacacgaaaataaaaattatatgtaattattacttgacttcaaaattcaatataatcaataggatgtgtaattaatataacattttcttttactttattcagcagcaaaaaaaaaaaaaaaaaaaaacactttcttttatcatgtattttggttgtgattttgttacgaatggccaataattttatttatatttacttatactaaacaaaattttaaaaataagatcattcatgaaataagatattacttaccgtaacaagtggtgtaaattttaccgattacattgagtaagaattacaggatccattagattttgaacatttctttattcttatgaatttggactattttaacataaacaataaataatatcatcataaaaaaaaaaaaacatatagatagacccgggccagttttctagtaaagtaactcaatatagcatacatatatttaatattttttcaagttttcaataataactacggccatccatattgaagaaaaagaaatttggtaatatatccacaaaattttagattgtaggctaagaataagatataataaatgccaaaaagaagatatatcgtacataatgaattaaattcctgactcacatcctctgccattacatactgcacagcctcaaaggagaataacaaaaatctttggaaacagctttccatctcgatctgatttgacaaggccaagcaactaaaggctttctttgcctcctcttctaaaagagttcattatcccaaacttaccatataacccccccactctacattatacaccaaagcctctcccaggctcaagaaattgatgtcagcactctgcaccctgctgcatataaataaacaaatgtcatcatgtcattcgcctcggcattccacttaagataatcatggtttacagcatactaaattcagagttaaacaaaaaacctacctacctctgcctactagtcatttttcttggctaaacaattggaggcgtttgatgagatcttctttcaaagactctggtatttgtgaaagaaacttggatttcgcatccacaatcaacagcttcctgagttatgacagtgcacaaatggattagactttgttgatcaatacaaagaatagatcgaaaactaaatccaacctcagtgacagatttcacagttcaaatctgagacatttgctgaaaattataactagatgtcaaagtacttgaatacttttgagctaagtatccaatgatgaaaattattaattattggcatacaacgtgattttgcagcatatatttgcaatttgtaaatagaacgactgattcagcttcttcttctctattttctctctcccatatatagcaagtaaaatctatgacggacaaaatgtactgtcacattgggctatatgcagcctctagaccaaatcaaaaactaaaacaaataaaatttaagaaaggagcaataaaaggtgcattacgacacacaagcttgaccttaaatccccaaattctatgaatctgttatgatacacaaaggggtcaagtacaaatatctctaccaactgtgtcaaaatagcacagcgagttatttctttcacgggaaattttctgtaatacaaagtttttcatcctcccaaaacagtttctaatgtaatgtgcctcccaaaacagttagaagcgcaataaatataaatttctaagaaacgtttaaaaaacaaaaaattgtattacctttcacattttgagcaattatagaataaaaatggatatttacaactaataagaaataccacaacaaaattcatgacctgtatcaatgttacatgagtatttatcaaacagcccacaccgcataaaccgctcgcattgtaccataccacataaaatatgcggtttgaaatactttgcggtacagttgtgttttgcatttttgccaaaccgggcggtgcgatgtggtttgcaattttgaattgaattgcggcttaaaccacacaacactgcactaatataaaaaataccaaaattttaaatctatgtgcaactactacataattgataaacactaaccaagtttgtatgtaaataggaaacaacaagaagctaaactataccttaactcattgtcagttaatgaagttgttccagcttcttttgtacgtaacctcttctctgaactcatgaaactataaactttctcggaccaaccgcatgatcgcaaaactgaagaagcttctttcgcaaggctgatgaaattgatggggtaaaaggtgttaaataagcaaacgaacacaagtaaaccaattgtttaaaatgctttagacagaaaaaagggagtaaaaaagccaattgttttcaatgctacagaacagaaaaggtccacacgcattcatcaaagggatttactcaatagacatagtaatcatcatgaaactgcatcttgactcttctcagaacatgtcacaagacatgatgtattaccaaaaaccaacgtaaacgaatcacaaattctgcagaaaatactacatacatataacagaaagaaccactaaaacacacacaacaaaaaagatttccagaatgaagcagcaacagcaatggactaagcaccttaaccaaattactttgaattgataaataattatggcatgaatgggaccaatagttctccattaactagaaattattcaatctataatgttattccctccttttacaaacatcagcaacgtctcaagtttagaagacaaacatgataaaatcatgatccaagaaaataagagcaaaacgacttatattttgatagcaaactcgtctaactcatacttgcctaaaaatcatcaattagcaaagttagattttattcacagatttaatgtagtttatgtctaaaaatagaaaatgacataataatttttttaaaagataatattaatgaaggaaagatgccttataaattgtttttttacccctcaaggatgatcagtgaaatgattgatgcttgatcttttaagtgacgtgagtataaattagaaagaaaagcatctttcacagtagtatttagtgtgagtatttgagcaagaaaaaaccagttaaggaagccagttcaagagtcagaaacacttcaaagggagtgaaggggtgtatacttacagtactttcaaatcttcaactttcttccgagattgagcatcctttgctaataaaatgcaagaatcctccccatattttcttttggaactaggcaccttagcaccaccattaaccaaaccctggtgatctggtcttgtttttaactcgtctcttgtaacattctcactaatctccagctctttagtatgaggattaccacatacttctgtgcaaacagatgctaagccatccttactggcaatgccattagctttcccattgctgtttaaaccatttttatttaatgatattgacttagccttctctactttctccaaacaaatggtcttttttgcatccccattacttcccatagacccattcttggaaattttcccattactgattaaagagggtcctttggaaatagaacttccattaatgttgaacttaatatgtgggctggaacccactttatcagccttagaaacagctaacatatccattcgagaagattcttcacatgtctttgcatgcattcccttgagaggaatagctgacttcagacttttagatgcttcgtgaccattgcagtcttgggattttaccccattcaaaacagtgtcagcaagggaagagctaacagattctgatctttggctggtacgagaaaagaagagaacataaaccttttctgacagcacctcttgaacagtggaaagtgatacatatgaatcattgcaacaataccaccgacccattgcatcctacaaaagttaggagaacaagggacaaagtatggtgagctgacatgctttctccatacatatttacaaattcaaaagagcattatataccttaatatatgcataataatgtccagactcaggtgagaagcctgaatgaacaatagtaccgaaaagcttatactcaggtcgtggatcctgcacatgagaagagaaaaaataattcagttcaagtagacaaaacaaatctacaaaaattactgactaaaacaaaacaaaacaaaacaccaatgtcacagaactatagtccaaatacagagatttgaaaaacaaaatgttcttacaacaatacagacaaataaaatgaagtctgaaatttaaaacgacaaatgctattcatacatccaatacgtattttttttattataaaatagggattgaaagcccttaccccttccaaacacactcacacacccaaccatttgagctagcttcaagcagcctattcctacatccaactgatacacaatccttccttaaataaacttttttatctcattacttgcaaagaatctcatcatacagaaaaacattttataatgttatttgttaggagatatgctatcctgttagcctggtgtacttcagatgtttttgtgctaattgattcctcccacaacattatgacactattagtagagcagagagttccaacacaagatccataagattcggtatcagtcatattttgctgtgaaatttaactttattatgtaaattgctgtggagattttccttggagtaacaatccctaggacataaagttcataagttgtagcagtttgcattctaaggaagttgtgtatgggtcactctcacttataaaatctatgcttacacatctcttctttctatggtagctttgatggcctaggttgcttgaaagtatataaagagtctgatttttagaaggattactgaataaggggaggagcttttgaagaatcaatgtgataatttccagaatttcagaagctcatatcataatagacctattgctttattcaagctcatgagcacagaaaggtttgcagcagcaggggcagcggtggaagtttcttttccattgtcaggatatagatgactgagaaatagggtatcggattgaagtactctacttgaatcagcaagaaactgcagtatgcataatagaggagttctgttgcaggtcttttgtgcatttcttaaccacaaatggtaattagcatagcttccagctatgttatttactttgaaaacaaaagcacccaggtttagcctttaagtgttcaactggatgcggggtttggaagattacaaacataaagtaatgcaggaaaggaaaaaaaaggccatccgacgaactgcttccaagtaagattattttaagtggctggttgcctccatctaatattaactaagcgtagagcggctgctgccttagtaatatcaaaggattatggtatgataaacaattcagtaatatgtcatattatattcccgataacttttctactttcaattcacaattacgaaacttatatcctgacagacttgcatggagttactgacctagttcaatgtgatattataaatcacataaccacaattctaaaataaaaacccaggttcattgaatctacaacttaacatacctggcttgctttacacatgaagcttgaaagcaccaaaacatcttcaaatgcaatggacttatcaatcttcccaccaaaaatgccctcaaatctctaaaaacgaaaaacaaaatgtgaaaccaatgaggtaaatttacaaaccgcaacaataaaaatagcatcattaagaaaaacataatagtccaagaaaccatatgtccaccttgagttggatgacaagaatatttggggcttgacgaattgacatttgcttccttgctggtaccaatttcttgcaactatacatacaagcataacatcctcgatcagaaaataagccccacaaaagtataaatggaagaatgtaaatatacataagtgcgtatatatatatgcatagtaatacaggtacaaaccgtacctctcgcatctgtatttattgttaccatccaaaatctcaggctgaaagaacctttgcaaggcatctttgagagaattactatgcagaacatcaaggctaatatccattatctcatcaaccttattggactcagtgccacaggaaatgcacttcacctggctctgcaaggcacccccaaatatctccttcacaaccgaagaaccaccgctgccactaccaccgatccgccgcagctttttgaggcggaggcatgtattgtgacaggcgtcaatgacatagcggagaaactcatgagcgtcttcctggcggccgccgcggaagtgctccgaaaaaatccgaagacagttctgaatcttcatgggcgcatcgagggagagatcgacgctcaaagacctaactatccgcttctctataatgcaaaaagggcagtcgcgtttccggtcggcgtcctttgagtcacctgagtaaaaattacaccaacaaatcaagcatcagcaatggaagaaattaaaattaaacctagggcacccaaaaaaaaaaaacttacagagagaagaatgctgtttgcggaggcagaaattggcaagaggaggcgtataggtgagacactggagaacgctattgaggtagcaagaattaccgaggttctttaaccctaatggaggaccggtcttgcgtttctgactcagtaaactcggctgccaactcatttgcaattgcaggcccatcaacgatgacctcccgttgatagcgatgccgcatcgcacgccgtcgttttgatgcttccactccctgaccgccacgacagccaccgccgccaccacctcaatcgcatgacgcgcccccacttcccctcttttcctttccctttctcttttttcttccctctctgcttctcttactcttactattatttagcgccttctttcttcgtacccacggccaaaaaatacaaatttgttaaaaataataataaaaagaaaaatagatgattgagaaataagtttgcctctctctatttctctcttcaggcttccaggaattgggattatttagatttttaataacccttttaataatattgatattattattacacaatttgcagagggtttaggtttattattgaagatgaagcctacactgtaaaaatatataatataaaaaatagggtacaaaatttatttatattttttttttttgagaaaggtacaaaatttattttagatgcatataaaataaaatattattttaattttattttcaatgtgtttaatttttttaaaattgagaatattttaaataacaataatatgaacgtgagaatttaaaaagtagagttcaaatagtctatttcacacacatataaaataaaatgatcatgtatttttgtaaaaattttaaaattttataaaaaatcttaaataattatattcatgagaaaaaatttatataaaaattattttaaataccaaaattaataaaaatgtattggtgcatgttaataagatgagatgaaagaagaaaagaaataataccaaatcccaagtgcatgtttggcatcataactaaaaaactgttttttgtttttaaaaacagaaaattgtttttaaaaacaatttggcttgtttggtcttgttttttaaaaactaagttttcagaaaacaaagttac

SEQ ID NO: 294861 - DNA, 2120 bp, Cannabis indica
aatagagtattcttaaatagaggttctactgtatgtataagttacccatgaaattaccttactagataccttgctcaaaaaatttataccaatatatgattaaaaatattactattaggcattgtagtgcctagttagtactactacgaaataacaccttaagaatgattaacgatattttataaaaaagttcatattaaattatatagaactcgatacttaattataccaagaacatcataacatcttgactatgtactaatcacaacttgtgccttttaatattttttatatgaatagacacaaaaagttaggcattaggagcttaattagtattaataatccatgtacttaatgataaatattagctaggttaattaaacaataaaagttcaactttgtaagcaagagaatagaagagaagagaatattcatttttattttttagactcaaaaaagagtttcattcatagacgtaatcaaagagagagttaggttgggttgatgtctcattcatatcatagccattagccatagccactattcaattttacaataaactttgactcattaagaatttatgacatcaacacaccaatggcggtgccacatagagtccctactaagatttctttttactttttttttttttaaatttccatttaaccccctacataattgataatttatactactaccccatatgttcttttgtactaaacacaatttaaaaaatgttaattaatagttttggtgcatttacaacctaccaaacttgaggtccttgataaggacaaatagggtaaattggtaaaattataacccctaaataatgaatatgataagtgaaaagaggataattttgatacacaacacaaaaaattaaaaacaaatccatcaaaagaaaacgaaaaaaaaagttggtttctacatctttcgatgattgagagaaagtaacatcaaatctttggataaaaattaaacaaaaaaaaaatggccaaattaaaaaaaaaaaaactcctaataattatagtcctttgttttttcctcctctaactttatatctctgtcccctttcgtaatatttctttgtcctttacaataatgaaaaaagatttaaaacaaaatgttttcctaagaaaaaaaaaattacatgagaaagaaactaaacaaaagggtattttcgtaatttgctctttttgaaaataaaaaatagttaaaaaaaatgaggaaatgattttaagaaggacgtggattgttgtagccgggaggattaggccacggcggtcccggaaaactggagccactcgccggattttgattctccggagccgattggaaatacccatgcggctgttgtacttggccggagaaaaacagaggatgtgaaacagaggaggaagaagaagaagaagatgaagggaacacaggtgaagaagatgaagaaggaatcattaatggcggagattgaagatgagaacccaattgagaattgtatatcatcatctgttcaagcaagcttgatggctgattaagctgctgttgttgttgctgtaattgctgaccatgaaagtctcctgagctttggagtagctgagagtattgcaaatagtcacgtaaagcgtcagaattcgaagcctgatgatacggcggcggtgtcgtcgttgcctgataaaaattaggctgcgccgccaaaagagtcgcgggagaatgagaaacagttaggtgggtaggcagagccgccgccgctgccgggtagctctgatgaggcggaacaattgatcggacattttcggggaaattgagtttcgctctgtttcctcggaacctcaaggcggcgtcgtcgtaagctcgggcggcggcttccgccgtatcgaatgttccgagccagactcgcgccgccttgtgcgggtcccgaatttcggccgcccattttccccacggcctctgtctcactcctctgtatcttcttcttctctcgccggtatcttccgccggcgccgcctcgctagacggcggcgccggagctacattgccggcgggaaccgacatagttgttataatttcttctgtaataattaataaagaagataaataaattcaattgaattataacattg

SEQ ID NO: 294862 - DNA, 2448 bp, Cannabis indica
ctaattcatgccataagtagtagtgtggcttctccttttgtcttgactattaaggactgtaaagagctttacaagcttaaagaaggtttctttttgtttgtaaaacggtctgcaaataaggcggtgtatcatatagcgacatcatcttattttcttccagattgtgtcaatggagtgagttctgcccctctaaattataatctccttgtttgattgatcttttgaattagtgaagtttcacattttattcaaaaataaaatactacataatcaatctgaacaaactaagctataaaatttggcatgccttgactaatctgctaataatgattagaagcatgaatgctatagcaaggcatagtcaattttaaaagtacaaatgcaaatttggattgctgtcaagatagataaacttacaaagtggacaagctggggaaaatcatactcttataaaggttttactttttctagagcaataatatataaaggtctcaagtgggattttaattctcttggccatcttaaacttcaggtgaagaagaagaagaataataactcaatcagcaaatgatgtttacttcttagctccacgtatcatgttgttgtaacttgtattgtatctatcatctaatattagtactgactaaattcacaatcacattttatatatgggatcatattcagaagagaaagcatgtgaagaagccacaaattctataaagattgaaaacaatccatgctgatgcaataaaactagcaaaagaaacataaccacatgtctcaacttggtggtgggagagagtggaaacatgtaatttgggaagagtagatttctattcatgttaatgacctaattgaatttaatatgtacagcattacatatgattaaatgcttaaaataaagacttctttgctcatacaatcacaaataaaggctcaattgttcatgaatactccatggcacattagtcacattccattccccaaacattatgtatatttctagtcatgcagtaaccatatataaataaagatgcaaatggaagaacaaactacaggtcaattctaattttcccattgagctgtacagaatgaaattggttcatccataagaatagcaacactatacaatgactattgttccacttagcagtaagtaaagcatcatgtaaatgcaatcatcaagacaatatctattctaaattctctggctatgagtctatcatcatataatggaagaaccatattcacagaccaaaaaatcagagaaattaatcacattcttttccaatcaaaaaaagaaacttaccacacaacctttctcaccagtcacataacaagccatcaaaaacatcatcttctacttcagtaaacactaccccagaatgagcatcttcatgccatgcattaacctcattttcatcttctccatttacaatccctttccccttatctacattgacatctgaacctgccactcccatagcaatgtcaccatcatcacccaccaactcggtagtttgagctctctttatcggattccctgccatcttattcgatttcaaggcaacagatttaatattcttcctcctccttgcccgagctttgactatcctcttcggcaagttttgaccaacacccacctctgttgtcccaatctcactttcatgcttacccaaattctcagtttccaaaacctcttcccaaaagtcatcaacgaaatcttggtcatcaccattttttgaatccacggaagaatcgttactctttccgttgtttccactgtgactagaatcatcatttaaagaagccaaaccttcatcatcatcagaaatgtccaccaccccatgatcatccaaaccacactttcttttcttgacgtcgtttacgttagcattgttttcttcctccgaatactttactgagaaaaccccataacagaaatagtatcgactctcacccggaaccattatctccggcgacggagggctgatcgccaccccatgaaaccctctcttgcaattctgacacctgaggcagcaaccttcgtacaccttctcgtactcgaacatgcagtaacaaaaaggacacacagtccagaaagtctcactactctctccagacccatttccatggtccgaaactccaacctcttctgctacttccggcaagtcccctatctcaatgtcgtactgggccttcttcttagggtccgataacaacctccaggcttcgagaagaagaccgtaggcctgcgtagaaaatgcgaacttgttattcttggggttcacgagagacacgagcttcgaaaactgatcccaaatgagtctgcgatcattagacacggtacgactgatttggagtatggagtagtagtcgagacggttgttcttgaggcgacgctccgacgcgtggagaacatcagcgacggcaaggacttggctagcg

SEQ ID NO: 294863 - DNA, 7551 bp, Cannabis indica
ctttaaattttagattcaaaatagaaatagaattagaacacattttacctaattcttctttaattacattacaagaaaatacatattggtgttcaataaattcaattaagtgttaatcttgcaaacttattcacaaagttatcaacaacatcaatatttgagaagacgacaaactagatcgaaattcgccgattagaagatctccacgaatgcctaaatgagagggagctagtttatgtactctttttcttttgaccaagtttttcagtaaggtttttattaatgcaattattatggacatccaagggggagtattatgaaatattatttatagatgtctaaatcaccaaattaattatcaccattaatgcttgattgtattttcctttattacatattaatttagtttcctattcctttaatcaatatttttgtataaataaggattcatccctgaaataaataactgagaaattctcattcactttttatttcttctttcttttcatctattttatatttttataataataattttttttttctttcaaatcacccaaataacctaattgattgctttagttgttgtacccggtgtctaaaaataaaaaggaaaagtaaatagaagactgaaacgacgtcgcggcttctaaaaccctttcgttagtgaacaaaggaaaacatcagtaggggtactcactctctaaagcggaagttgttgctgctgctgctgctgctgttgttttatgttgtattgtatgttgttgtgaagtttcaagaggcagttcgcaggaatcgccgtctgctacttcttctttttccttccttatagatctgatttaggatttcttttcatttactccgaaaccctaaaaatgtctatctcagcacaaacccccgatattatgggcgaccgccaatccggtcaggacgttcgtacccaaaatggtactctccttcgctctatttatccatatatgctgtcatatgctttgtatttttctacattttttaggtttacattgatgttatttgtgtgtctttctggggagtatagtgatggcttgtcaatctgttgccaacattgtcaaaacctcgctcggtcctgttggtcttgacaaggtacccttccattttctcgagccttattttgacattttacttgtggaaattttagtccaatctgctttgttcgacctaaggacccttaaatatgttacttttgcctttttgttacttcagatgttagttgatgatattggtgatgtgactattactaatgatggagctaccattctcaagatgttagaagttgagcaccctgctgccaaggtggaacaagctttccatttgtttgtttgtagtttttttttccacacattttcatgtttgtgtatattatatttttgtatattctctatgtatgtgatttgacttccatttgtggtgtataggtgcttgtggaattggcggagcttcaagaccgagaagttggagatggcactacctccgtggtcatagtagctgcagagttgcttaaggtgaggaacctttctgattcagctgatttcatgaaggttgttggcatagtaatctgtgatgtttatttaataattgcagagagcaaatgatctcgtgaggaacaagattcacccgacttccattatcagtggttatagagtgagtatcttcatatgcctaagttttttaacatggaaattcgtgtgttgaattccttaggtattattacctaacatctatgtatttgccttgatgtgaacagcttgctatgagggaagcctgtaaatacgttgaggagaaattggctgtgaaggtaaggcgtctgtgatgaatttgtttaggggaaggtgtttaaagtttgacatgtatcttttatacttgaaagtgaggttaaacaacactatgacactcacggagcagtacatgtgtctgtggtgtttttattgccacttagtcttactttatttgttcttatgtatttgtagaaatgtatatctacagtgaaaaatattattcttgcattagattatgcacgtttatgatgtttatttagcataagatgttcataattcctttgtttcttgttctttcaaggttgagaagcttggaaaagattctttggtaaactgtgccaagacaagcatgtcatcaaagttaatagctggtgatagtgacttctttgcaaatttggtatgctatttctcacaaccaactaattggagcaatacctttcaaagtaacattcatttcaaatttcctatatcattaataagtttgtgttcttagatccgtggtttaatttgttttccgtagtccaactcttactttttttacctatgtgggtagtttatggttgggttttgactttttaatatttttgttgctgtatgatttatcttgcacttatgatatctgctgtatatacttcttggaatttcttatgtatttgtacaagttcttctttgcaggttgtagattctgtacaagctgtaaagatgaccaatgcacgaggggaaattagatatcccatcaaggtttgttgctatccattctgtggtgatctgttgatggaggttatatagtttatacatatggtttaaaggatgcagataaacagttaaaatgtttttttttacattttcagatactgaactatgttgcattttactgttccagggaatcaatattttgaaagctcatgggaaaagtgcaagagaaagttatcttttgaatggttatgctttaaatacaggacgtgctgctcaaggaatgcctactagagtttcccctgcaagaattgcatgtattgactttaatcttcagaaaacaaaaatgcaaatgggtgttcaagtcttagtaactgatcctagggaacttgaaaaaattcgtcaaaggtgactagcaaaatgacctaaagctcttttcagattaatgtgttagagaatttactgatgacacccaaatcttaacagggaagctgatatgacgaaagagcgtattgagaaacttctcaaagcaggagcaaatgttgttctgactactaaggggattgatgacatggcactcaaggcaagcttttgttcttctttctaattgtcttcgtcatgtccattttctgtttagaggatgtttgtttcttgtacacagttacatattcatgttctgctaacttctgtttgaattcaggtaacaattaagtttaatttttttcaaggtattttatacatcaacgggtacataaatgttttatagctccagggttacataaatgttttatagctcaaagatttcaccatgtttattgaagaagttaaagaagtatctatataatttttatttaacattgtggaagaacgtataaataatggttttgaccaatggatatatggtttactaagcattttgttttaattaatttctgttactacagtattttgttgaagctggggctattgctgttagacgtgttaggaaagaggatatgcgtcatgtcgccaaggctactggtgcaactttggtaattttctcatttatatactctcaacagatccttagtcgatgtgatgatgactaaagtagcctacacactaaatcattgtttgataattattttacagcaatcatgttagtgtggggtattaaaccctgttatgttattaagatttgcaattggtgcttttgtagattttcattatgataatgtgtcttcaggtctcaacatttgctgatatggaaggggaggaaacatttgagccatcatttcttggatctgcggatgaagttgtagaggagcgcatttcagatgatgatgtgataatgataaaagggaccaaaaatactagtgcagtgagtacttgagttaattacctcaatttatatttggtctggaggtttaattgcattacatactcttatgaagtagctacagtattaacttggcctcactatctaatcaaaactatatcatatacatgtaatgtaacaagtgaaacattttagggttataaagaatttacatgaaacaaattttttattaataagagataagccgtataggagttgcttcattctaaagcattgaataagacaaaaattgaaaagctattagagttttattaatgttatgtgtcaactaaaatgaaaagatttctagtataactatttgatgtagaacaaggtagaaaagaagtgaggaggtgagaaatagaaaaacttagaatgagaagattcttgagaaagaaatgtttagtaattcttatcatgtctaagaatttaatgaacacagctaatcctatttatagataaatcataaaaccacatctaagaaaccaaatggaaaattaaattcataaggagtctaatttcaagaatccaaatcaaatttaataccaataacataaaaatcttattacttgcttctatatttatatcaatggtagttctgttactttaaactactcttgtgatcttaatcactattttatcctaaaagttatttgtacatggtgaattatttacaagatgagtgtcatgcatgaggcatttaactttaacaccttgttaaaccttgctatgtaaaatgaattatctaattattgtgtaattgtctaggtttcattgatcctgcgaggtgctaatgattatatgcttgatgagatggagagagctttgcatgatgctttgtcaattgtgaagagaacccttgagtcaaacacggtaaacattatgaacttttctccagatatgtgatacatgtatctgaatccaaattttactgtaaatgaaaatgaaaataaagtagttttcaacctgttgactccttcatctttgtcttcgtttatatttcaagcctattctgttcatttcaatgattagagtcattcttagttaagtactgtcatggatgcccaactaaatgggctccttgatagagggggccaattttttatttttttcctttattaaaactaacaattctcccttagcccatagtatttggggaccaagaaactataccaattgctacatgggggtacccaaaagaggaaaggacttaaaccccatacctcgtgggagcaaaccgcatgcctcactgtttgagctactcctcgagttgtttctacgtttcttattgatttgtgcacactgtgaccccctcatgtctctgtatttttttgtacaattctgacatcaccttgtgtcctttaaagattttctaccctttgtggcagaaatgcgaacaaagtaaactcattgtgtttttacttcaaaaaatgtttgttactcttactattgatctggagagatggctagtgaacgaactctgattgtttgtgctcatttttatgttggccgagtatgcaggtggtagcaggtggaggtgcagtcgagtctgcattatctgtgtatttggaataccttgctacaactttaggatctcgtgagcagttggctattgcagagtttgctgaatctttgctgatcataccaaaggtttagttttgtacatgttatgggtccattatgtatccccatgggtctgatctgaaattgaaatgtttgacgacctctctttctgtaggttctctctgtcaacgctgccaaggatgcaactgagttagtggcaaaattgcgggcataccatcatactgctcagactaaggctgataagaagcatctatctaggtactttgctggtccttacgtccgtctaaattttaattttgttatcattgtcagagaggaccgaacttggattttgttccaaactaagctggactattagatgccatcttattgctctcagcatccttttgtactatttcatttcttttttatgtcatatgcactttagcgcaagtgacttgacagtttgcaattgtgtcaagtgcacaactatttgactttacatatgtttatttaatactttaactgttatccggtgtttgtaatgagcaatgatattaggcaaaaactcattttttggacaattataaaatcatgggtataccctagaccgaaaactctgaaaatatatatttttcttggaatggaaattgtcctttgttctagagctaaatttttggctttcttttcaacttttgcagcatgggattggatctgttaaagggtactgttcgcaacaacttggaagcaggagtcattgagcctgcaatgagcaaagtgaagataattcaggtaaaattcaggccctaaggataatgaatgtaatccattttgtttttctatttcattgtctgactgcagtctaaagcaatagaaaattaaatagcctttccattatttaggcgggaagacaatttctttcaaaaataaattagggaaggctattccaatagacaattaatttatacatatagatatctcttttacttaaatttaattttactatatttaattcttatcccccttttcattacactcaaccaaacatttccctaaatgtccttgtacagtttgcaacggaggctgctataacgattcttagaattgatgacatgatcaggcttgtcaaagacgaaagtcagaatgaggattagattgtgttgaatgctatgattcgtagatgagcattgaaggagagctcaagggttttgatgtgggtttatgtactaattgaaaatgagaatgttttgatttatttgctaaagcgattctggttttgattttagctttgagtttttggcactagcaattaggatacagtgaaatgggtacgagattgaagaaaactgtatggttttgtggtagttttcttattaaaactcgaaattcatattttatttttgcttaggaacgctgtactgtttagcatttttgatgcgtacaagattttaattttctttcgttctcattgactccaccaagtttgttgaagaactaaaaaaaagtaaaaactcagaatgtagtagttgacattgaaggttgtgattcatgtttctttgggaacacttaactcagttaactgtgatgggttatcaatggttccctaaggttgatctggctgagaatgaattctcgtataagataatgcagacaagattaagaaagtcatataatatataggatattgggtttttttttgataattatatataggatattggttgatgttatctttatcggcactcatccatgtgacctttacgtcttagtacacgtgcaacgaccatcattagtgtacggactcacgttgcattttatctactccactcgacattattataattgtacatattgacactgctaccattgcaggcggaaagcaaaaagcaaatatatatatatatatatataatatacatatacaatattcccgaaagataaaaccatggacgcttgaagaggtcttaggctagctcactggtgagtagagatagaaaaaaagggagactcaaagaaaaaagggtttttatactatatacattgaaatttgtaatttttttaattacgacagttagtttttttttttttttaaaattattgtgtaagttttataccgtgtaatat

SEQ ID NO: 294864 - DNA, 7852 bp, Cannabis indica
ttttagcctaaatcaaaataatattcaaattttattttcgaaaacactcaactaataaaaaatccttaaaatgactcccaacattttaatttttaaaaacataaaacagttttcaaatcctaaattggtgccgtttagtaacacttttattttctaattttttaatcacaaaatgaaagtaaaatttttattttgtttttgaaaaataaaaatgcgttctgcaaccacttttgtttttcaattttaaaagcagaaaacaaaagtgtgttctgtaaagcttatttttattttcattttttgattttatttaaatcaggtctaagtcttgggtcggatttggattcagaattagagcccggttcagcgccagggccgtggggggaggatttggcttcgagtctcgtcggagtctaacatattaattaagaaaaaaattatttaagaaaatattgaaagtgattttttttatttttaaaattttgattctcaattaaaaaattaaaaattgaaaacagttttataaaaaatgttcttacaaaatattttaacttttccaattttaaaaacagaaaactaattaaaaaattagtaccaaacatcacctaaatttaatactttgtcactagtggtagctaaacaaagcccgacatttttattcatccattaaaaaaaaaaaaaaaagaaaaagaaaaagaattaattatttatttaatgaagttaataatatatagataagtgggacccagaaaacagtgttttgttcggccgatcactttgtccgctctatcgtcctttgtttgttcatccccttcgcactttagccttttgtcctctctcctctgcttaccgtacgctctcttctcttatcattcactctctctctctctctcttacacacacgcaccttcttcttctctcttctcttctactctattcttttctctcatagcttcctctctctctgctttatttactgggatttttctttgcccttctattgcatacatatatttcaggggctcagctaaaagctacgtgaaagggatcagacctgttttcatgcttttgggatgatgggttttcccccattgatcttcggttgaaacttgagctgcttccttgttttatacatggagagtttttcggaactgggttttctttaaaagagggatctttagagttggggttgagttgattttataagggtttgtttcgttttgtttcggcttttgattttcgaggtccagttctaatggctgggagtaatgaagtcaacctcaatgagtccaaggtaccagcttttgtatatatgtatatatatattttcaatctgttgatgcgttattgttcctataattggaagtttcgattttcgttggtggttttggtttgtgggaagttttatttgcgcgtttatattgtgttgtttgtcgtttattttaggttataatctgtgttcgggtattgggattgagtagttaaaagtcggaatttatttattatttattttatgggatttagagactgcttttttggattctgatttctactgtatgctatcaagttcagtttattttcttgttttgttaattgacacagcttttgattaatgctgttcaatgatcaaatctacggtcctgatttggattcaatttcaagtactgtgtttgatttttaataaaaaattagggggttttgactttttgttggtagttttaactcgttgagctcgtatttaagccgactctgaacaccctgctctcttgtcagagttctcatttgccgagtgagtgtgttctagtgattctattttcatttgtttattctctttatatgccgtgcagtcttacgtttctgcaaaacttggcaatgtggataggaatattatggtgtcactttcaattttggttgatactttttgtaatcctactttgttatgctgaaagaagaattttgatctgtgtagatggtggttccgctgaatacatgggtcttgatctccaacttcaagttggcttacaatcttcttcgtcgccctgatggaactttcaaccggcacttggcagaatatcttgatcgtaaagtgattgccaatgctcactcagttgatggagtttactcttttgacaccatcattgaccgtgaaactagtctcctttgcagagtatatcgtccaactaataatcccgaggagcctcgtctgaacttccttgatcttgagaagcctgtggcttcagctgatggtcaggttgtacctgtaataattttctttcatggtggaagtttcgctcattcctctgcaaatagtgccatttatgattctctatgccgtcgattagtgggaatctgtaaggctgttgttgtctcagtagattatcgtcgtgcaccagagaatcgttttccttgtgcatatgatgatggatggactactcttaattgggtaaactcgagaacatggcttcgaagcaaggactcgaaggtgcatatatacatggctggtgatagttcaggcggaaacattgcacacaatgttgctttgaaagcagtggaatctggaattgaagtaataggtaacattctgctcaatccaatgtttggtgggcaggacagaactgagtctgagacacgcttagatgggaaatattttgttaccctaaaagatcgagactggtactggagagcatttctgcctgaaggggaagatagggaccatccggcatgcaacccatttggtccaaggggtaagagcctggaaggactaacgtttcccaaaagcttagttgtggtggctggtttagatcttattcaggactggcaattggcttacgctaaggggcttgagaaggctaaccaagtggtgaaacttttatatttggagaaggcaacaatcgggttttacttgttaccgaacaacgaccacttctatacggttatggatgagataagtaactttgtgagttctgactgtgaataaattgacataccaacaggcagccatatataatagaagcttgacattttctcccgcgttattaagggattgttttttacagtttgtaaggttgtgtagtaatactgcttactgttgtattgattgctgtggtattaaagatcattaactgccggaatccggtccttggtttactactaaaacaaggcatgtgcttgaatgataggattcagaaggtattggtctgcatgtagctggatttgtactttgtattacggaaatcaaatgtttctggtttgtttatccttgaggaggcaagcatcagctgtgaccaaggttagcagtcctacgaaacttcaaagattcacccacaaagatagaggatcattgtttttgggggtgcctggctaatgatgttatataatattaatatatagctaattttcgatacatggatagaaaaacatccatggtattgtaatcttgtaatgtttataagatataagccgtagagactatattaaaaacgtttgcttgttattgagttttattttgtgctctttatatttttcaagttttcacaactcttctcaacaactgtaaattaagatattttatttactcccactaaatatggaatcgtagttgcttttcctctttgctattattattctttggatgtatctatggtcagcaagaaagttgtctgcttcttgtaccctcttaaaaagggatgtgatttcttgacaccgaaaaaggtggaaagtcgctcaatccatttaatttttagctcttgcgtggcgtggctcattcctcgagtttgcattgtggggtctctagtctaggattagttcatgtaagtctatgctgaaaccattatttgaattgtttaatggagcctcaacttcttagcttctctaatagggcattcaaggcaccaatatatatataggaaaaaagcctcgctcattaaggaaaaggaaccaatacccaaaaagtgagaagggatgaacaagagtttaataggcttaagcctaaaacttttagtgggatgtgataaagaaagctttatagatatctttagcaagaaaacgggttccataatgcaattgatgactagcagcaagtaaaaccggtccatatctgttgttgatcgagattgaactagattattctctgtcagttcaatgcctattttggacataggcatgacgagaaacactacataaaaaattaatttgtttatagacaaaaaaaatgaatatcaataacaatattggtggttgaaatttggttgtttttgtggaatcacatgaggattacatacccattgtaggctaggcaagttgctatcacaatcatttaaacatttcactacgatagcaaggaaccgctaaggctcggaaaagggcatataaactttagtattcttcattcctgtttaggtaaaaaaataataataaaaaatcacaccacccaaaaaaaaaatctagcttgtatgtgcaacccaatcctcatcttcgtgcatttatgacattatgattgctctcttttgtattcaaatttaagtgaacaggaagagatgtactctttttccatttctagaacttatttcgaaagtacatatttccttattaggaaccaactgtcactgcctgtacaatttcacttgcttttcatagcaacagcctgtgtcttttaaatgaggaaaaactagtccagacccacaagtcaacaagcccaaaatgtgaaatttaaagagtaagaaaatcagcttcatcagaactcagacatgtgacatctacacatatagaataagtatgaacacattcaagaagttcaaaaaacttatattcatacttgtaaaaagtaacaaagaagccaagaggtagcagctaatagggatcataatccggtaaagaaacattattgtcaaaataggaaattctgaaaggagaaatagcatagcattatgccatgacatcaagcagatcttgattagattgttcctagtaattctaccaaaagcaactaatgtcatattgtagtaacaaaacttgattaagggaatcaaaagagttactcagcgccctttggcagcgtatgcaaaagaagctgcagcaaaaatagttgctgaagtgatcaaagtccaaatgcttttctgcttacgcgcctctgcagttgagcgcttcagatgctccacctgttgcttcatatcttctaccatcttctccttgttcctgaaagcattttggatggcttccaactctgtaacatacggttgagcttctccttcgagcttcctctgccggatgaccacatctttcttaccatctttactgccctcttcggattgagtaaccgaaaccatggctgcagttttcttcaacaaggtcagtgccctttcggagttgatgccagcaaattctactttagtctttccattcctccattttggttctgcacctcaagaaggctattctgtgctgcatctctttcctttaccaacgatcccaattgtttctctgtttctttagttttctttcagtagcttttcatgctcatcactcagagcctgggattctttagttgacttcttcaatcctcttctcccttcctgaaatgaccaacttcaagttttcaacaatcttctttgcaccatcaaaagcgttttgagcctcattcttctgaagggtgaggtggtgaagagcatctttgttattacttacttcagaaagcagttgtttgttcctttcttcacgatccttgcaagaagttcgaatttcaagtagagcatctttaagtttacccatttctttgtgcagcttaacaatttcattcccttgattagcaaactcctcctcaatctggtatttctgttcagctagttcatcaatgtttcgttgcttatccttcacttccattgtggtcatattcaaagccacctctgcctcatgcaattgcgactgtaacttccttatatttgattccttctcctccttcaatgacttgagctccatctccacatggccaatagcatccttgctgttacttaattcagaaagcagttggttattctcttcctcttgatcactgtaagaagttcgaagtgaaaatagagcatcccttagttcacccacttccttattcagcttaacaatttcatcctcttgattgcgaaactcatcctcaatctgggttttcttttcagccagttcttcaatcattcgttgcttatcatccacttcaattgtggccatctttagagtcaactctacttcatacaactgtgactgcaacttctttatatcttgttccttcaccttcgtctcttccttcaatgatttaatctccgcctccataccattcacgctctccctattgaacctctccgactccaaaatactggcttccattgccgcaacctctcttttcaaattcgatacagtatcatttctttgttccacttccttctctaactcaccaatttgtctttctaatccatttttctccctctcaatgtcgttcttctcactcaaaatccgctcattcacgctcctgaattccacaattaacttctgcgacacgcctagtttcctctcagccaaatctttctccttcttcagcacctcaagtgcagtttccttctcaaccctttcctccattagcccttcacattgtattttcagcttctcaacttcctccttcatcaatctctctctcatctccgtatccaccgctttcttctttaacagagtcgcttcctgaaccagaacatcaaaatcctttctcagatcatccctctctaggcaaaccctcttcacctcacttctctcactttgaagactatccacaagcttgttcacttcactcttcagtgaccttatctcaacctcgttctcactcttaaccctatcaacctcaactatcttctctctcaccaacccatcaaacacaatccccatttgggccacctgagcgttcaagaaaacacgaaacacacccttctccaactccaaaccaagactctcctcgctgactcgagtcagctcagactccaatgcattcttttcctgaccagaccgagccagctcagactcgagagcctctttatcttggaccagcgactccatctgttgcctccgctcaaaggtctccttgagaagtcttgagttgagggacttcaagctctggagcttgtctggaaagtcatcgacggcggccatgggggggataggtgtggcgtcactcatttgctctgctctgtggtctgactgtacaagggcttcttgccttgggactttgggttgctggcttgctttctttttggccattttcttgtttttgtatttttttttaaagcttgtggtgctcagtgaatgtggggattcgatgagggttagggttttggaaaaatcttgatgatgatgaggatagggacttgagagagcaaaattagttttggggggatgggcctccttttttaggattcaaattttggggcccagtcagacttgtatttaggttcattagtcatttttcgggaaatttgaaactttgtttttcttgagcccgaaaatctgcgattagtatacgtgtcagtcatagaactattatctgtttacaacggacggtcatcatcatacgtagatatttgtaaccgtctttgaagatcgtcgtttgtaaacaaagtcatcgtttaatgtacacatttgtcaccgtctttaaatatcgtcgtattgaaaacagctgtcgtttattatgtggtgttgtcggctttaacttatcgtcgttttcacatgcacatatatttatttaggcttatttgtgtggcagatcctcaaactatgtaagttttggcaaattgatccccaaattttttttcttggcaaattggtccct

SEQ ID NO: 294865 - DNA, 1847 bp, Cannabis indica
aaaaaattaaactaaaaaaatatctaaacaccgaaacattttaagagtctaccaaacaagatctactgcataaatttcctataatattaaagtacaatcatagtgtaacatttagggtatatatttgtaagaaataaattaataataatatatgtatttttttttttaaaaaattagtgtgttagtatatatttatataaaaacaaatatagtgaaaaataaacagtagaaacaactatacgcgtttacagtactacaaatccaactatctcacactatatagagacagatcatttctacagttcagttcatccgtaaaacaacactttaattaattaattaattaattaatttaatcagttaattaataatagctacttacaaaagcaaaacctatatatgtatatatatagtagcttttgcttattaattattagttactaattgcctaattatggcagttaatcatcgatcactactaatccaatccacacacacggttaatataataataattaattaattattaagctgccctgccctgccctttacgggctgcccaacttgcccggttactccacccataatcactactataccccacaccatctctctctatatataaatctaataaaccccaaaaataaaaagaaaaaacacacaataaagctttttatatataaattatattaatgggttcaattcctgaatatttatactcttctctagataatcatcgctctacattctttcctattattacaaccaccaccaccgccacgactactgatctttcggggctgccgcctaccatgacggaagacggcggcctgtggtgtaatgatgatagagaattattattagtttccttcggtagcggtggttgtggcggtggtagtggtattaatagtactactgctacgagttgtagcagtagtactattaataattataataataataataatgctttgtcttcttcctcaactgattctcttctttcatcgacatcgtccttatccccggcgtttatggtgtctgctgcggcgttcccggagcagaatatcgtcggcggtggtgggtttgttccctcagttggtggagcattgtactctcatgattatctaagcaattttaatgatatgattagtaataataatgatgatcagttaaataatggattcaattatggggggtataatggtaatattagtaataataatgggtttgttgagtttggggatcaggattattcttcttgtaatacgacgtcgttttttcctgagtttaaacctgtggtgggtcttctcgcttccggagatcaaaattgggtacgtgtataattaattaattaactaattttgttatattttctggtaataattattaattataatataattaattagttatattagatgtttaattaattatattattgcaggtaggaatgcaaagttgtaatcaaatgcatggaattgaagattcgaatataatgaaagtgagtcgatattcggaagaagaaaggaaagaaaggattgttagatatttaaagaagagaaaccaaaggaatttcaacaagaccattaaggtatataattataatataatataatacattctttcaaattacaaattataataataaactatgtaacattataattaattgtaatttaattattaattattattattattattattatttatagtatgcttgtaggaaaaccctagctgacaggagagttcgagtacgtgggagatttgcaaggaacaatgaattgtgtcatgatcatgatgatcaatttcaacccaaaaataataataatgaattattattatca

SEQ ID NO: 294866 - DNA, 4100 bp, Cannabis indica
ttttgatatttttttttaattattatttttaattaatattttgaattccgcccaaactcgaactcaaatccccttacggccttggcattgaaaccgatttttgatccaaactcgaatctgtcctcgaatttaaattaaacttaaataaaattaaaaataaaaataaactttatagaatatacttttattttttatttttaaaattgaaaaataaaaataattagaaaacacatttttattttatgattaaaaaattaagaaataaaggtgttacaccttaatttattaaaaaatatgttctgacaattttcactcatctctttcttctctaaaatcaaggtccaaagcagaaaagagtgtggatttttgttgcccatccattcgtttcccaaaatccaaatctgattccttctgtctatgattttttttttttccattctttaatggtattttcaacattaaatttttattttgaattaatttcataaatcttgatctaatctttgcttgatcataattgaaaattcttgtttttgcagacgtgagaggaggtactttgatctcttgctcttgatgacgacaatggaagaagtaacttttcacgttttaggtctgagatttctcagaatcagtagccatggcactcaactaatcaccattcaactctttggatttggactgttttcccccattttacagtaatgtagctgttaatatataatctccattgtcaaagtttcgagaagggatttagctttgattctgaagaagatacgacgatgattgatgagtatggcgttcttcaactgaacactggttcttctggggagcgaagtcatggagattttgcatgccgtaaacccaggtggtggtgatgaatgatgatggctagctatgttagagaagacgataaagggattaaacccagagaaggtggtgatgaagaattagacaaggccaggaagaggaaagaggttgagaattcaattaaaagtgatggaatgaagcaacgctatattgaatcgagcttcgataataataagacatcagacttggaattcttcacatatcccgatccagatttcaatgacttcgataaggacaggaatgcagagcgttttgtagcagggcaggtgtgggctgcttatgattatcataatgtcatgcctagattctatgcatggatcaatagggtttcttctcctggtttcaatgtttgcataacctggttagaacctcagccaaacgatgagaatgaatttaaatggcttttggcagacttgccattttcctgtggtgagttcaagtatggagattctgagcaaacactaaatcgttttatgttctctcatgaagtttcttgggggaaaggtagcggtggtacttttctgatacatccaagaaagggagagatctgggctctttttagaaactgggattttagctggagtagtgatccggatgcacatggtcagaagattgaatatgaatatgttgaaattttgtctgactatgttacagatgttggaatacatgttgctctattgagccaagtaaacggattcgtgagtattttctgtcggatggaaatggtgggtaagaagacatttcttgttccaccaggtgagctattgaggttttcccatatgattccatcctataagattgaaggtaatgaaagaggagttccagttgagtctttcgaacttgatcctgctgctttgcctctaatcaattccatggtggagggtgatagtgacatgccaatggcaatgatgattgatgagaatggcaatcttgggaatgaaccaagattggattttctggagaacaaatatctggagattttcatgccttaaacgacaggtctcttgcaaggaaaacttaactggtgattgtgactatgtgaaagtgagtcctttaaagagtgaaaaggaaaagatatccaaagatatcttatgtaatgaagatggtgtacctaatggtaatggagacaatgccagtaagtggaaagagcttaaagagccagtcaaaacagacaatgccagtaagaggaaagagcttaaagagccagtcaaaataggctatgccagtattgattcacccttggaggaggccctgagggccagggagattgctgagaagaagatgcaaagtaaggagtttgtggtggctcgtaagattgctttggatgcccaacaactttatcctgatgttgagaatatttctcagttgcttatcgtttgtgatgtacattgctcagctgcacagaaattatcagggaatgaaatggactggtatggaattcttcaactcggggagaacgcagatgaggctacaattaagaagcaatatttgaagtttgtccaccaacttcatcatgataaaaataagtttgctggtgctaaagctgcgtttcaactgattacagaagctcgaacaatacttttggacaaaaataaacgtctcttacataacatgagacgcaagtattcaaagagcgaaaagccttccacttttcgcactgtctgcccttattgtgcagtatggtgccattactataaagaagtggagaatagatttgttcgatgtcatagttgcaggaagtgctatatagcaaatgcaggaagcctagaaagaattgaaattccagatcctgagttttacaactttgatgttgaaaaattcaaagataagtttaagcctggtcagatctgggcattttattgtgatgaggatggcttgccaaaagactatggtatgatcaagaaaattgaattttggccatctttcaaactgcatatttcacggcttgtttctgggtaccttttttcttacattattagatggtctgataagaagatgcctgtttcttgtggtagatttgaggttgaagaaggtgatggtaaggcctacgacagtgtcactaatttttcccatcttgtaaaagcagagccaacaacacgtgatagtaaaaatgagtatgacattctccctaagaaaggtgaaatttgggccttgtacaggaactggaattcctacatcaaatgtattgatttggcaaactgtgaatacgacatagtggaagttgtttcagctaatgttttactaataaacgtttcggctttggaacctgtggatggttttaactcggtatttaaggctcgagtgcagggaggaggatcaaccttaacatggagtattccccagattgattttttcaaattctcacaccagattcccgcttttcgcctgactggagaaagaggtggcaagcttagaggcttctttgaacttgaccctgctgccttaccttctcattatttttgctcaaactaggtccacagctttcctataaaaggtgcattttctaatttgaaatgattatctgcgttgtgaaacttctcattttgatccaagttaggatcttttctctgctttttgttgcagtgaatggtttgtttataaaaagttaaaaactctgcttttaggtactaatgtgttgtagctgatattaacatagttgttgttgtgattttaatctctcattgtgacctattgagaagtactgaccaaatcattcatgctgattaaccatgctatttattcactaatataaacacaatcacatatatccataatccatgtatatatgtcttatgttttggtaaaaaagaagtttttattatctacaattcgcagacacgattgttctcagatgttcctattggccatgccaatctttatgaagcaaaatttactactatgatctttttttaactgtattatggtggacagatctttttcactatgcttcattatcaaaattaggataatgtttgattgaatgtcaaaagaagtagagactctaaaaggtcagaaactgtgatatttcaacaattgcttgaagacttaaaaataagtgaataaaatatcattgacacttgcggcttataaaatgagaaaatacagtttggagaacatatattaggagaaagtgttgtccaacattatatcatacgaagtgattttgtagagcttttttatttttacacctcaaaatagttttttttttttttatgcatttttacgaaattcta

SEQ ID NO: 294867 - DNA, 3313 bp, Cannabis indica
aatattttcacttttctaatttaaaaaactaaaaactgattaaaaaaaaatgttaccaaacgcattagagcaagatttggtacatgttgaaaataggaaggcaaaagtcttaattaacctaatatttaattaattgatctcatttgaacttaataagaaaattgtgatgggcgttaggtcgttgaagagttgtcgaattgaaacaaacattgtttttatttgtacaaaattttttccttataagttccattaaagagctagccctaggcgtggctttggtcaggcattttaaaagtatattaatcttgctgatgtggttatgtcctttccttcgtgttttgttcttcttctatggtgagtttctagtttggtgttgaaacaacccaacattttgaaaccctaatatacagaaattttcaattttcttaaattacttgagaaatcctaaaaattcttaaaaattaaattttcaaagttcgtgtgcgcacacttatagtttcataatttgtactcaaaataacattcaaattataacatccaattgtatgtagtccttaaacagtcttatcccaaaaagacctacctttgaaattattagaggtgtatattagctgtaaaatcaactaaaaattagactaattagtttcttagtacaacttttctaagttgtgtataaatacatactatcttttctcaatgaaatacaagtgaattattctcttcgcctttgttaacatggtatcagagcgtcaattcgaaatttgaaattatggtttattaaaaaaattgcaattaaggttcttcctttttggggttccattttttagaaaccatacttagagggcaagtaacacattactaccgtcaccataagattgcccagccgctaatcaaagtaacccaatagtttggtggtcggaccccttacatgtgagcctcacgtgccgcctgaagatctggcgacttctcccatgtgccaatgcatgtaggcatgtggccatatgttttccaactgtttttctaccggtttctatccatggtatttttgacttagttttgtatttattttttccatcaaattattttttgtgactgttgaggtttgtttgtcgtactttcttgtggttcttcccttttctattgtccttgtttgttggttcaaaattatggctgaaaataactcttcaattatgacggatgtggtgtcaataatgtctaaaattactaatcataaactcaatagtttaaactatttggattggagcaagactaatcgcctctatttacaaagtattgacaaagatgatcacttgactcgagatcctccaaagtcaaatttcaaggagatggctgatttaacatggcttagggagaatgctcacttatttctttagattcaaaattcaaattaaaatgaggtgattggtttgatcaatcacgatgaatttgttaaagaactaatagattatttagaaattttgtactctggaaaaggaaatctctcctgcatgtatgacgtgtgcaaggcatcttatcgtgtggaaaataagatcaatccctcataaaccattttatagatgtcaagaagacatatgagtaacataatttgatgttgccctttagtcttgatgtgaaggttcaacaacgtcaacgagagcagatggctatcatgagctttctagcaaggctctcccctgaatttgattatgcaaaaaatataagttctttatgctctgatgagtatcttgttcattcgcctgcctcggtcatagctcccccaattcttacacctcgaccacctcctaaacctcttgtagtgtactctaggcatccacctcctccacctctcatttcatgtcatgaatttgcatcttcgtcatcagatctgccactcaatgatgatcttcccattgcactatataaaggtaaacaccaatgtacatattattcaacactcgggtatgtttcttttctattctgcaagatttttttttgttaattgagtaaaaattctattttaaaagttaaattagttatttgtgactggttttgtgacgcattgcgatttcattcgcgatttattgagtataacacatttttaaaaacttgacttttgtttcgtgacttgttttgctatattatgtgatttcatttgcgataattttatgtatatttctcgtaaatgcttgcttttcaattaacaacttgtatcacgacagtttgtgatgtcattcgcgatttggatatatatatttcttttaaaatgctgcccctattttgacgacatgttcttgacgatttacgacattttatgatttgtttgcaattaaattatgatatattttacgacattttttggcagtttttaatttatgattgtttttttgttttgtagttggtcgtaaataagtacctagcccacggaagaggaatatttcaagtccattaataagggtaaatcccttctttgttttgagatggacatcgatcagacggtagagggcgatggtacacaagagtctgtatttcaaagccaagcaaagactattaatgaggtcataacaaaggcaaagttagttccaccaccacctgctccaaaagcaaacgagttgtctacttcagccactctgtccgctccaacctacacatatgtggacaatgacctggcaaagaggttggatagacttgttaggctatttttaacctatattttggatcgattttatgtgcgtttttcactgtgttgggacggaattacgcttgttttctatgttttcgggttctttggaataatagaggtcacgggatgcagaaatccagtaaaagacgagctgagccaaaaaaaaaaacaccattttgaggaaatatgcatatctagccgcggctagatcaccaaggcagaagcaggatttttgaagccccagtcgccgcgacgagatataccctcgtcgcggccatatgaaagttacagaaccactattttaagcatcgatctggccgcggtgagatcccgtacggcccaggggtatttttgtccaacgaaccctaaaaattagatataaatagaaatttgcgattggaagtcaggggaagcgatttggagacctaaaacacagcaaaaagcggcaggaagaggagaataattcaaagtgaagatccagaattcatccaccaacagtttctttctctattcctctttaatttatttatgttgaatattgtcataggaatggttatggacttatttctgaactaaatttcccatttagggaagatgatgattgttgtttaatgttttgcctagttaatgttt

SEQ ID NO: 294868 - DNA, 7763 bp, Cannabis indica
ttttttttttttttgtgttttgtatttgtcttcctagttttcttttatatgcagcagggtttaatgatttttcttgaagttcacaatgatcatagtcttattttgttggtgaggaagtgtcttcattaattgcatatttaatttaagtgaagtggtttggaatgtagattaattggcgtaatggcggatatcataagagttttcagcttaggtcaacctgatcttgacgttgtagatattatgtcccagttatatgatctaatcagttggactggtggttttactggtttcacttgggtcacttttagtttattaggtttcaaatcctaagtccgagtttgttattatctgatcaattatgtggtggtctcattacccatgcctttgtgtttttgtacaatgtgcatttggtctgtgtggctgtatcttcttgaacgtactgcagagttttatttgtttttttgttctcattaaattgtgctttgttggtgcagtttggagtggacctgttacactttctggactaagagagtactgaaatttttgtaactgtaatggaagtccgatcaagcattcggcgtattacatactcacaagagcttgtagatggaaaatcaattcaagtttcttcaaattgtcttcctattcaggcttccaagtacgacccagcggggcatgccttccatcaagcagctctgaaacttcgtggtcatgtggagaaagttgtggacgatggggataagaaagtggctgatgaaaaggaacaaacttccctgccatctgattcttacagcagtaaaggtaaaaagaaatctggtgctgatgacagtcaacaagatcattatgcattgttgggtttggccaatttaagatatcttgccaccgaggaccagattaaaaaaagctatcgtgagactgccttgaagtatcatcctgacaagcaggctgctcttcttcttgctgaggaaactgaagctgccaaacaagcaaagaaggatgagattgagagccatttcaagtccatccaagaagcatatgaaattttgattgatcccgtgaaaagaagaatttatgattccacagatgagtttgatgatgagattccaacagactgtgccccacaggacttcttcaaggtgtttggtccagctttcatgaggaatgggcggtggtctgttaatcagccaattccatcttttggtgatgacaagaccccaataggcgaagtggataatttctataacttttggtacagctttaaaagttggagagagtttccacattctgatgagtttgatcttgagcaagctgagtctcgtgaccacaagagatggatggagaggcagaatgcaaaactgtcagaaaaggctagaaaggaagaaattacaaggattcgtactcttgtcgacaatgcttataaaagagacccgaggatccagaggaggaaggaagaggagaaagctgagaaacagaggaaaaaggaggccaaatatctagcaaagaaattgcaggaggaagaagcagtgagggctgctgaagaagagaaacgtcgaaaagaagaggaagataaacgagctgctgaagcagctttacagcagaggaaggtgaaagaaaaagagaagaaactcttgcgcaaagaacgtgcccgtctccgtacactctcagcatctgttgtaacacagaaatcgttcggtatatctgcagatgatgtagaaagtctttgtacgtcacttaacacagagcagctgaggaatttgtgtgacaagatgggtgggaaaggggaactggagattggcaatattcttagagatgcacttggatatagtagcaatttggaggagactagaaaagaagaccagaagaaagctgaatcacagaatggctctgtggatactaatggagccactccagcaactattccttttagcagctctgagaagaaggaaaaaccttggggcagagaagagatcgagctcttgagaaaaggagtgcagaaattccccaaaggaacatctcgaaggtgggaggttatttcagactacattggtaccgggagaactgtagaagagattctgaaggcaaccaaaacagtgctcctacagaagcctgattccgccaaagcttttgattcatttcttgaaaagaggaagcctgcaccatcaatcgcttctccactctcaacaagggaggaagcaggagtatcaatcccgcaggcaacagaaaatggtgctgcacagacagaaactccacaagaattaccaaacggcggtgcaaacacccagagtcctaatgattcgagttctgttaatggtgtaacatctagttcagagcaagatgtgtggtctgcagtacaagaaagagctctggttcaagctctgaaaaccttcccaaaggacgttaatcagcgatgggagagagttgctgcttcagttcccggaaagactgtgaatcaatgcaagaagaagttttccgtaatgaaggagagcttcagaagcaagaagactactgcttagttatttagtttttcggctgcaagacaaggctcgagtaattttgtcattgggtattctaatattatttcaaattctttcaagctaggggattgttcagaggccacaatttgttccccctagctctgagggttcttcttgactccggttactactgccgtccggattttgtcgtaaagccttgaccggttttacagctaatttggaagagggagatttttatttatttggtatttgtttcttcactatgttttatacttttacagtaatattagattaattaattgcattgtactgagagagatgatggccactattcattattatgaaaatgagagagaccatattgaaatcaaacaaattgatgttagttactctttcctttagttatccatgtctgattttattgatgagcattatctcacatatacataaaacgatttacttgaaacagtgttatgcagtaatgactttccataatagtaaaattctcaatacatttaactaagatatccgagagagagaaattaacgtttacttcttaaattgatcagaattaaaaatggtaagataagtaaagcaatctttcttagtcttctgctctccttaaattattatcatgttggggaactccatgaatcttttatagtttctgtccagccaagaaacgactgtacagatccaatgcttctcgtggcttgtattcaggaacagtgtgtccagatccctgaaacccattgaacaatcaaacaaaattgtaaaaagttaaacactgttaaaaagataagatactaaaaaatgtcatcatagtgttgtggtttcaagtatggacctttacggttgcaaaggtgagattatgtgcatagccctgtgtgtacctgtaaccaaagagaaagataaatcactttagattcatggggtttccattcttgttcataaaaatctttttccattttggtaaagaaagaaagatgtacccggcgatttgttcactggagagccaaggtctccattcatccacaacctcataacccattgatcttgtccaagcttcgctcccggtgtatggaacacacatgtcgtgatcgccactgttacacgaattggatcagtttatttttttttttcagagcttcttgtttagatggcattaggcttcagaaaagtacctgaagataagcgctcggtatccccgagacgtgaggtttttgtggtaaggaatcatgcttccagcatcatggtaaaataagattttgtttgtacacaattcccagctgcccaccaagctctcctgcttgtacaacaatggttaatactactgatttcaatgcctgaattttattttttttgagattctggataatcaaactacctcagctacatgaagtgcttttctgactgtttcattgttcaaccacgcggtagcaacctcatcactctgtaggaatcaaaggaaaaaaactagagaatgaacacaaatgaaagaagtaaactcattattttttgcaggagcataacaagaataagactctttctcttagcctattcagagacctaagtaacttacagtgcatggaacattgccactattaagaagctcaggccaagttgggactcttccttctctaacaggagctctaaagggccatgcacgaccgaaaatcctcattctaacagcagaaggcctttcggtctcacctaactgtctgaagctggatggcagtttagaattagtagtagctgtaacctctcttaattctggttggtgataacatggttcgagtatgtcgtatatgttcagtccatctatgtcctgaaattaattgaatcttcaaacaaaatttctaagaaaattttctctacacttacaataggagtagttttatgttacctcatcaacttttgaaagcttgctctgacaactatcattgagaggattataaaagtttcccttacactcagttgtcacctcctgcaattagcacaagattttgggcaaaaatttcccaagaaagtgagcaagattcttaatgtacttatttcatgtattgttattgttattgttatgtgatcaatatcaaatgaggaactcacctgaaaaagctcatctgatatgagtcccattccatgggcaaatggaaccaaagcattaccatcaaacacatcatcagttactccatttcccaccagataaccctgtgcataagtgaatttaagttaaaaaaacaatgtatgtgaatgagcttaaactaagtcaatctgaagataccttaaagttaagcttgggtgttgcaccagcatcaagtcctgtaacaaatccaaatacaaagttggagcttttagccttaatgtcaaaacaaagaaagaaaaaaactaccccttttgttgttagtacttttaacttaaaaatacctttaactacttcataagcaagagttggcacataaactccagcatatgattctccagcaatgaagaaagggtttttaaggtactccggatagagttcaaaccactgtttgcaacataagaattagtatttttggggctattcattcatcccattagccaatttttcctttaaagtaaatattgtaccttgagaagaaatatatggctatccaatgcagttttcttatcaccagttctatagtcactactattttttgagtaagataacccaacaccagcaggagaatccaaatatataatattggaaacctgagaaagtgaccaaagaagtgtaaatagtgtaatgatttgaaactatatattaaacttgttctttcttgatacataataataaaagtcaaaaagtttcaacctttgaccagctgtatggatttaagtggagttggggaaagcttccatcagattttggtaattcaaaattaaatgggcctgcaaaatatgtagtaaccaattgtaaaacaagcaaatctgagtcaaagactgcatttttaagtctttgcagcataacccagttggtaaaaaaaataaaaaatcaaaacttgatataaaaaaaaggtcaactagtctatgaattatctaccatgttcataaacaaagccatcaaagcttgaacaccctggcccaccattaagccaaagaaccacaggatcctcagatggttttctctctgattcaacaaaatagtagaacagattcttctcatggtcttggtcaatggtcacataccttcaacagatcccaacacccaaaaagttatagcataaaaactgaagaaaacccagtaattaaaaagctaaaaattttcaaaaattgaaagaaacaatgaatgcaacagaaacaatacccagaatagtgtttagaaggaagagtgcctgaaaagccaggaacttgactgattagagcattttcaggagctgaatatgttaatccaagtctcatacttagtaaagctaaagataataacagcacgagactgatccttgtaatagccatggctgcttcaatttcaatttcaatttcgtggggactccaatattttaggaaaataaaaatctaatactagatgaaactgttacataatataaccaaagtgttaagtatttatagtgaaaaagaaaataaactcatttttatatatgttttttactttcaaggcaagataacctggccctgaaatagtggaaggagctctcataataaaaagcaaaggagtaatgaacgctgcctcatcttgaagagtggtaatgagtaacaggctcgtcattcaaggtgttagaaggtccaatagttacatgacacgtgcacagtcatgagaaatgtttttagggagttattgttgcagtatgggttcacataaatttttatttttgagaaatttgggaataaataattaagtttaatttttagcggtaataatacttaagttataattttggaacttatgtaggtatttagttaagtaaattgccacgtgaaaaatttacagagtttcaaaaatataacttagttattattaccgcaaaaaattaaacttaggtatttatttgcaactgaaagttaaacttaagtatttatgccgcaaattactcttttttttttttttaataaatcaaacaaatttattaatggtaatgagttaaaataatagtctgccatctaatcggaatattttttttttttggtagatacgactagattaaaattaaaaaaacaagtcaaataattagtcgtctaatttctcgtttgataaaaaactaataagaaaatcatattaaaaagattgaagcatcacagttaattttaagaatacttatattcagttttatctatcgtttaaaagacacaatagtagaaactgtagcagcatgttcatgcaacctcgtagcttgaacactcaattattgtacaaggtctgcactatctaaaaacttcttcagtcgcagagaacttgttattctcatccactaacaatgatttgatggcgagccatcaaaaaataaagaaccaacaacaaataaaataaaattatgtcacacaaataagactaaaacactcaaaattatgtcactgaaacaaaactaattaaaatacttaaaatcttgtcacagagacaaaactaattgcaatatctataattgaatagtaatagcaaaacacaaacccgatcaagtcatacctatgctcaaagaaggccaaagggccttgctaaaaaaaaaaaattaacctcctataattataaatttaagaacgaaaaacactgtcactgtatcactggtgtccaatggtaactaattgaaattttagcaagtgaatatatttttgggattttattaatgatggtttgtagagatagaattgatgatatgccatttctaccattctagaataaataacctttgcgtgacagaagaaataaaaaaaaaacaagaatgagaattatgtgactactatactgtgctgttttgtgtataacagtttcttatttttttaatagaaaaagagtcaatatagtaactgttgtaagctatgagtttttttttaagtagtaacagtctttatttatgatttatgttatcttttatccaaatttgactttttgctgaagaaaaaaagggtatgaaatgaagttagctttaagccaaagcatgaatagaaatttgcaccaaattataaaagagacataaacttaaatatacaatgtagatagaaatttgcggcaaaatccccttatgttttggtttttatacacttaacccccttatctttatttttggtggcaaa

SEQ ID NO: 294869 - DNA, 8399 bp, Cannabis indica
ttttttttattttatttaagtcaggtttggatttgggtctgggtctgggtctggggtcgaggtcggggttcgagtccagggctagatctgggttcgggtctagggtcggggtttgggtttgggctcatatcccagggttgggtctaggtctggggtttgggttggggtttggatcggaggccaggtctaggtccaggtcggggttggggtccgagttcgagtttaggtcaggggtcgagggccaggtccggggtttgggtcttggtccaaggccgaggctagaattcgggtccaggtcaggggctaggtccaagtctaggtccagggtcggggtctaggtctgggtttcgggtttggggtccagttttgggtcccaaagtccgacaaggttgaagtccaaaatattgattaagaaaaaaactctttaaacaaattgaaagtgactattttttccaaaattttaattcttaattaataattgaaaagtaaaaacagttttataaaacatgtttttagaaaatattttcacttttctaattagaaaaaataacttattaaaaaagtgttaccaaacgcacctccagttaacctcaattaattaacaaatatggaaagtgtaagtgctatgttttccctgacaaattatgcttgttattagtttatctgttggttgtctagttgcatctgtgttgttcttattagtgttgattttttattgttgttaattgtatctattttatctgctcactttgtttttgccaagtcaacgtttcatctatttatacgttgttttgtttcttgccagcatgacaaaggtattgagggttgttgtgtttagtcgttatttagctttgttagtataaaaagctaagctatctttttctaaccaactctcatctttgatagaatcgttcttagattcttgctctagtaggataaaattcttatgtgtatattatgtggttttgaggttgtaaatcattggatcttcaagtttgaaaaaggaatgttgatctgcgatgtttgatgggagttcaacttgttggaagaaagaggatcttgtcttcctagatttgagtggtcttagatctttgttcttgaagtgtattcaagttcttttagtatcttctgtatgaaatcatttaagtttacattgtttgatgtgtatataaaaattggagaatgtatgtttgaatgatttcttagaggaggttatcttcttacccagttcttggggatccaggctctacaaatgagtttccaatgcaggggaagcttgtaatttcagtgtgtaattgctttactattttttatacttgtgacagaatacctaattgtgatttagtagcctttgacacataaagaaattgtgatcatgtagctaagtaattctagttaggttttttttggttatctggttaggtttaggagtaacttttttgtcttccttcttgatcagttatttttttgaaatttaatcctccctaagattcatatcgaagtttaaaatagttttttgttgtgatttgtgtaggttgagcaaattttaattctaaagctttacatgctctttttaatgttgtctctacaaatcagttgaaggtgtttttgaattgtgagattgctaagaatgctggggagaagttgaagaaaaagaatgaaggaactgaggcagttaaaaaggctaggttaagagtgttggccaagtcttttgaaaacctgtccatggatgaaaatgaatcagtctctgaatttcatgctaaaatttgtgatatatcgaatgaatcttatgccattggaaaggtttattccaataaaaaattggtcagaaaagtttcttggagtcctacctacaagattcatgtctaaagtaactttgattgaggaaagtcgagatattgaggctcttgatttagatgagttaattggttccctatagaattatgagctggccttacagagatgggacaagggtaagaagataaaaaattttgaaaaggaaaaagttgagataggagtagcttttattcacaaggaagaaattcataaagattcaaacttatctaaaggcttttctgatgccaactttaccctcttggctaaaaattatgctcgatttctcaaaaagaatttcaagaaaaacattccatgcagaaaaagagaactcttccaataaaaacttctctaatgcaaacaagcatccttagcaaaatgagatgaatagcagacctgctatcaaattttgtgaatgtgaacgttatggccacattcaggtcgaatgtgctaacacgctgaagaagaaatagaaggcttttgcagcaacttagagtgatagtgaagaagatgatgtgggtgatgagtctacacaagataagtcagtcatagcatttatggctaaagaaactatgtctgaggcatctaatggtgatgagtctttttctaattcagatttcgttgttgtaaaaaaaaaataaggcctatgaagagatgtttgcttagtggagctacatggccaagagagttaaagaactacaagatctaaacaaggctcttgatgatagtaagattgaacttgaggagaaactgaagtgcatgacaataaagctatgttctaaagatagtgaaatatataagttgactactgaacttgtgagagccaagcagcctttgtccttcatatctcttgggatagatgctttgaatcaaacccttcaaaatcagaagccctttggtgtttagacttaaattggatataagatgctttacaaacaaggtcaagatttgtcgattgatagacctagttcatcttcttcagatggaaaggtgaagtttgtgtctgttgcagtaaataaggaaggtgaatctgataataacttagttgaatatgagaagattgctaaaaaggaattacctttaaaaggggagcatactaccagacaaccagaacacttcattcccatttgtcatttttgcaacaaaagaggtcatacaaaacctaggtgcaataaactcagaacatatctaaccaacatcataaataatcaatcaacttctagtaagttccctcgtacttttcaacaagattcatctaagacatggaaatccaagtttgcaaatcttgctttggtggcacacacttctctatctactatgaaggagaatcactggaactttgatagtggttactcgtggcatttgagaggctctagagaaaccttacaaaattttcaagattctaaagaaggtttggtgacttttggtgatggtaataaagggaaaattttgggacaaagagataaaaatctcttaagtacatttcaattaattagtcctatttgttaaaggattcaaaggaaatttgatcagtatcaatcagttatgtgatgttaattatgatgttgaattcactaagtcttaatgtttagtttcattagatgggaattcagttcttacaggtgacagaacctcaaatcattgttatgttatgtccagccaagtgaaatattacacggtctttctagacaaacctgatttgtggcattataggttgggtcacttgaattatcgagacttgagaaggattgtcactgtaaaagtagttcatggtgttcttgagtttaaattaggaggagatcgaatgtgtggtccatgtcaacaaggaaagcaaattaaggcctctcattctccaatagatgctctgcttacatgaggagtattggaacttctccatattgatttgacgagacctatgcaaactactagtattgctggcaaacgttatatcatggtgtgtgtggatgacttctcaagatttacttaggtaaattttcttaaggacaagtctgacttttggtgctttctctgctctttgtttgaaatttcaaactgaaaaagatgtcacgattggaaaagtgtaccgggtcaaaagtgaccatggaaaagagtttgagaatgctatatttgctcaattctgtgaacatatggggatttttcatgagtttttttctcccaaaacccctcaagaaaatggggttgtggaaaggaaaaatagaactcttcatgagatggatagagtcatgttgtgtgccaaaggtgttgaaactcgtttttgggctaaagcagttaatactgcttgctacatatgtaatcatgttcatttaaggattagtactactcaaacaacctatgaactttggaaaggaaagacttctaacttaagtcatttgcatatttttggctgcatttactataaactaaatgatcatgatcaccttggaaaatttaatgcacgaagtgatgaagggatatttctaggttactcctcaaatagtcatgcatatcgagtttataacaaaagaacttccatggtgatggagtccatgaatgtgaaatttgatgacttagaagtgtcaaatgatgtcactattgatgatgaaactcttagttccacgttgaaatatatccttttatgccaaatcctttagaagcttctgaattctcaaatgctaaatcatttggacatcaccctgtcttatctgactgtgttccaagtccttctgcagatgttgtagatattgtaaatgttacaaatgttgtagatcttgcaggtggtcaatctacaaatagatcatttgatgattcaactcatgctcgactgtataagaaagggtcttcattgtggatacaaagggcctccaatactacaatggtaactcattgcaaagtactgaatgtcatagatttcgcttgttatgtgtctcgttgaatcacgaaacgtcattgaagctcttctaaatgaattttggaacaatgctatgcaagatgagatgggtcaattcaagaaacaaggtgtggattttggttcctaagctagatggactaaacattattgggactgagtggctttttaagaacaagtccgatgagtttggaactatggtcaggaataaggctcggcttatggcccatggatacaatcaagttgagagagtggattttgaggaaacttttgtacctgttgctcagcttgaatcaattcgataactgctgcccgtgtctttttttttaaaaattcaagttacaccaaatggatgtaaaaagtgtttcttaatgggtttcttcaaaaagaagtctatgtgaaacaaccccaaggattcgaggactcaaagtatcctaatcatgtttacaaactcaaaaaaacattgtatggactcaatcaagttccacgaggtatgacaagttaacatcttttctcatttctcataaatttgtgtgaggtactgctgataacacattgtttattaagcatttgaatcctggtattttcgttgtccaaatttatgttgatgacattatctttgggtccacatgtgataaagaagttacctaatttgttgatttcatgaccagtgagtttgaaatgagtcttataagcgatcttaccttatttctaggattataagtttgacaaaatgaccatggaatttttatttcatagtctaaatatattaaaaacatgcttgaaaattttggtttatatcaatctaaacatgctcctacacctttaagcaccactactaaattttatagagacgagtctggtgagtcagttgatcaaaccatgtatcgggccatgatagggagtcttttgtaccttacagctagtcaacctgatatttgttttagtgccagtttatgtgctcggtaccaagccaatcccaaacaattccatttgtctgatgtgaaatgtatatttaaatatccggctggtacctttgagtatggcttatggtactcgagggataccaacatgtctattattggttttagtgactcggaccgagttgggagtatagatgatagaaaaagtaccattggagggtgtttttatcttagcaataatcttgtttcatgggtgagtaagaaacaaaattccatctctctttccgctgttgaagctgagtatattgcgactggaagttgttatactcaactcatctagttgaacaaaatggtaactgataatggattttcacgggcttccttggctctattttgtgatagcacaagtgctattaacatttcaaaaaatctagtccaacattctcgaaccaaacacattgacatacaatattattttattagagagcttatggaatctaaaattttaactatttcacatgtatccacaagtgctcaacttgctgatttattcaccaaagcacttgatgcccacacttttgctcatctcaaaaattttattggtgtgtgcaccatctaacctcgatagagttgcatctggctgacatcttaacgttgtatgtggttgtattctatctttcaattttagtttgtttatctttgagtcagatcacttatgtcttacttggtttagtagtgaacattgagttgtctcagctgaaaaggctaccctctatggatgcaatgggaagagctacccttgtaccaatatatgatttgagtagtctgctcaacatctctgtgggggcataaaagctacatttggttggaaaaagtcattgagtgtagttttcatcaaaagatatttttttacaacatataaaacaaaaatcttcattggcttttctcttggcctttgctctagagagatgagtgtgttgtcttaattaattttttggtggctcacatgaggacacttcatacactaatgacgatctcaatgtttattttttttattttggttgattacatgtgatcttgacaaagtgttaaataaattacaattttttgatatgttattgtctatctctagttgtgtcgtcttccttgtgtgtccttgttttggtctagctgagcttcagtgtctggtattccttgttgcttattttctgttgtgcaagttgctctctgtgtacttcttttcaaatagtgaaatcatttgatttcattatcattttttactcgtatgtttggggaaattttccttatttttaggttaggttattgtggattttttttgtcaatgggcttggtcttttattaattaggttggaggttaatttgctaattttcttttttcttgggaacataatctgatcaacagttaccatttatactttcatctttcattttctcacccacttttggtattattcatctttttcctctcgtgattgttttgtgtgtctctattgcttagttatggggaagaaagcatgtcacaagatcaaaggatcttcagctggtgtgggatcatcctcattacccaaggagatcagttctagcttctaccctattgtctctggctttattccaccatcgtcggacctaggtttgtctttgttgtcttctggtttagctaggcattttactcactcaatgtctatacattttgctgaaccagtatctcaaccaatgtcccctcctgaccttttttcgttgccatccaagaccagttgtcctaagtcttcgtctaaatgtaagacagtcccttctgaatctccgaaccttcttgctcttaagaaagccaaatctattgaactaggttcatcctcaaaccctagcttgtctaagacacctcctttggttcctcctttttactcaaatgataagttgctgcgtttgaaagataatatttgtatccatcctttgtggcttgagtatcgagtcaagcttaaatttttttccaaaaattcgtgagttaatacagtctagggatggtcagtgtctgttacacatcttcaacaacctaatgataacctggctggggaattttatgccaatcttgatggtagcattcttaataagaatagtaagttcaaatacatggcctacattagaggtaacagattttggtttgctccctcaaccattagttgtattttgaaaatcaaaatgattgatatgcatgtatttgatgacaactataagccctcatttcaaaaattaggtctgagatcactagtaacacagattttgtgtggaatggaaaagagttacctattactgtgctcacagagttttatcaagttcttcacaagattgctctttcaaattggtggactaattcccatatttccaccatcaactataatattgggaggttcttgtatgccttggggactatagtgagtaatgatcttccatcgctcatgtatgatcaaattataataactgccacaactaagggagtgaaacacactctaccctatttgagtttgatcaactgagttgtgcaaaggggatttcctgtgatacttgataaagataaaattttatctgtgccttccatcggtaaaacttcctacatttggcaagcgaattcccttatctgcaatggatatttgctactacaaccgttttagctactaatgtcccatcttcctctagtgcttctattggttttatgccctaaataa

SEQ ID NO: 294870 - DNA, 4837 bp, Cannabis indica
gcaagaataaaggtaaaggcaaggtgggtgagcccccacaaaaattcattcctaaacctcctcaaaaagatacgaatctagctggccaatcctcaaggacatagaaggccatcgatgctttcgggcctggacgcccttttgatcctagaggaaaaactacaccaaggggacaaaatgcaaggatgcaaagccaaaaaggcgaaggaatcaccccattgattctatcaatcagggcgaaaggatagttgtgggacattttgaggccaactggtccaccgcagacctctgacgattagacgccaagtacgagaagtacatgagtgagaaagtaaggccacgtggggtgaccttagaaaccacttgagcgataagatgaggggacgtgatcttcccgagagtgacacaaagagattggaggagtagatagttgccctgaccaagttggtcgagaaacaaagtagagccctttcagactcgaaagatgaaggcccggaaccctgtgtcaggaggacctcaaagaccgtacttctagagaacttttcaaaatgccccacattgagttgtatgaaggaaggactgatctgcgagtgcattttgtgaagtataacaaaatgatgcaagtcatctgggtgagttacggtgccaagtgcttatgcttttccctaacattgaccaagtttgtagaagattggtggaagcgactagctccaagattgattgatagctcgaaagatttacagtcggccttccgtgagcagtttattactgcgcgagacaaggatatggaagttggttctcttaccaatgtcaaaaaaaatcataatgaaagcttgaaagcctttattcaaagaatgatggaggcaacaaccaagactaaggttagcgatgacatgaagtcgatggccctccaaactagattagtcgttgggaatctgttatggggagaaatgcagaggaagaaagctgaaaccttgagtgagtttatggtaaaggcccaaggcattatcaaccttgaagatgcttacatacaagcttttggagtccctccagctcaaactccttccacgacaactcctaacttcacacaccaagtttcggctccagctttgactctcctaggagcttagttttctttgaccatttacgaactttcggtctcgccctacgcagacccttttttctgggtacgggcagcacatacctaatgtagtacaggtctaggacaagctaaagtcgagtcttagattctaatgccagctattcctgctttcttttgtatatgaaccttggcaataactggggagttaactaccagatagataacgatttactccatcttcttcacgagaaccagtccagactctatgcaacttcattttcatcgagtgaaaactcatcgactttgagctttaaggcgtgggaggttacaagtgactctttagagtccccagagcctgtggtgcaacaccatcattaccctggtcgaattaatggagaaggatacggtcaattcatttaggaactgaacaaaggttgaaggcattatatgcatgctacatggacgtacaaggttaggcaaacgccctagatacgcttccagaaggtcatttaggtcttttaaagaaaaactctacactagcagaattgctctctctgtcacaaagcataacactaaacccaactccacgctaagcatagggtgatggctgaaactaaacaaacttacagaaaagacttggctaaggaccaacatttttcctggctttttgcgatggtcggtgtagaacatgttgagcctcccatggaggatgttgaaatagccattggggacatagaaatccaagaagtcgagaactagggcaaggtccgtgcagctactcctcctaatggtgaaggagaagaagtagtggaagaggagaggaaaaggctcctcaagttctttcgttcagagggtacaatgaggtcagagagcccatctcggattttggagatgtcttggttctggaccaagactacgtaaaagtagagtacgaggaggcctgtcctatgaggactagggaaagaaaattttatcagtggctttcacctctttccaccctcacttataagaggttgaataacctttatgagaagggtctcctaggtggagttgaagccttcctgcctactcacagacagcttgccactaactctgggaggggctctgtacatggttcggtccccacgctaagcaagggggcaaattttcctctccatccgtacattaagaaaattgtgaattattgtaagattttcccgatccagttcactctaaagggcattaagtacttggccgcactattcgtgctacacgtcaaataaggttagggtcagtcgtctgctcatgatacgaactagctctttgacttgaagtgtagctcgaaacaaatctggtcaggttacttatatttctcgcagagtatcaatggatgagtggcatgacgcacaaggatgtctcgaagattggcgggttcatccaggattactatatcgtaaaggacatggatgctgaccacctttcattctaattagctctgagttattgtcatctcccttttacattgggttgaggttaaaggcacaaacaattcctcaacttctagcttcttctcaaaacatctctctttggctaccactagaaattttcttgagtacggactttatccatctaaagcggtacaagaaaatgactaagtagtcaaggagtggaaagttctgaagaagaatgagaagaataaaccaaagaaacaaagtcgaaaccaagtagagcagcctattcaagttagagatgacattgaagaagcgattcaaattgctgcccaggcaacagctggaaaagggaaggtggtagttgaggtgccagatgaagaagactccttagatgaggatgctccatattttcttatttgggagggtgctcctccagaaatttagggtagctactttagtatttaggtttattttcttttttacttgcacaaattttaattaagtgtattcttctgtgcatctatgtcgaccaagttaaagaacatgctaaagagtaaggctggtgatagtttcggacacaaatatcctgttaaatagtaaaaagtgggagataaccttctagtcagcatagcctcaagctctaaaacttctcgacctgatgttgaaaagacttctatggctgtaaaacctaggacagaggaagttgtctccatagacatcctagacactccctttctgtccaagaagtcttccaaggcttgcccccaatcaccctacccaaacacccaaaatctactaagaaatcagttggtgctgatgttgtcgacgttgagtggtataattttttcaaaccaagtaccaccacagttttcgtgtagcctcaaattaagaaggccaaagagatgctcggtttctaccaagaccgtgtaatggttgaagtgaatgagttgctggctggtgccgaggcactatctgtggaacttttagtcgagtcattctaaaggaaattaccagtgtatgtgtataactagtctttagggattttgcatggattactactaaaatcttctaacttattttattatttatttttctaggctaatttgaatcttgcatatgcttattcctgggctaagtctcgggctcttaaaactagtattacaaccaatgacctgacaaagtctttataggatgtcaagagtaatgtcgagcagaagggcactaggcttagagaagtgaataaacagctcgtgctgcaaacaacactattagggagttgaagcagcaaccggctgacatgtcctccactgcccagctagaagcagacttggagcaagaatcaaagagtgtttgggaactcaatgatgagagggaaggactctaaacacttctttcaagccaagaaactaaggtcaataagctaaccaaagctcttaggcaaaaagaagaatcctctttgaaggtgaagtctaaccttgaggaagcacttgcttctgggtgggaggctcatgccaaagatgttaagtaccataaaactagtgccatggaggttttatctgaattctgaaagtccaatcccaatgccaactttggttaccttgaggcagacacacacgattccatgatcagatattgcgagatgaggaaggttgaggatgagctgaaaggatccaaccagactactgatgagaagattaagaatactgttcttgcctctgttgtcaagaattcaaaaaatttgtctagtgaatatcatgagcctgtaaggtccatgagatgagaattttgaaaatctccttcttttgtatcagtttggactatgggcctttcatttaagacgattagccgaccaattgacttttaaacttggtttatttttatttctttcgttaaaagaaatggctgactgggaaacatttaagtccggactttaatctccttctttgcctaaatataaatacacttctttttaatttgttttgaattttgctgtgttaagaatttttcttactaatattgtgtagtgtaggtgccccccaagtgaccgagtagactttagactcttggtaacttgcaattgacttaagtatttcttatttgtctattcgacccttgcgcctgggcggacctatttgcacgcatgttagatagtttcatgtttatgaaaataaatcattatagtttgtaagtaagaatataaaattgacacaatttgaacggtaaaaattactttattcatttattgctcggcatgtgtttttgttggaatttattttaccaggatcttagatctactcacaagtatgtt

SEQ ID NO: 294871 - DNA, 7189 bp, Cannabis indica
ctcttccataactcatgtacataggatgctacctctgatattatggttttggtttcatatgggtttaagaaggaagtttctcacagattttattggcattctgtccacctcctttcctaatttctttcattttcttttctgtatataacatatatacatattgctattactatatgatctatggaggaggtgggcatactgccaactgagttctgttggtttctctttgtaaaaccctcgtgatgataatatatacatataatatatatgtagaccagtgaaacttcttcttgttccttttattaaattatctaatatatatatatgctattaatattatttatttcttatttgatctatgataattttaatgaatttgaaagttttatctgcttttcattccttgaaagtttttatttttggcaggtgtaaccacctaaatcatctttcatcacacactatacatgtatgtgggtggttagatctttattgcttccacttgggaaccctaattttctttcttttctttccttttctgatcttcttcagttatatatatactacttctgagagaaatcaggaaaatatatatatatatattaaactgttttcttcaattttcatacaatattagggtttcaaattgccaaaaacttttcgacatgaagttctttcacatctactaggtctcagcgaggatgaagaagctattgataaggtatatatatttatataaaatatatattatttttggttttattattaatatctaatatgcaacctatcttattatgagttatgaacacaaaatgataaatgactggcttgttggctcaatttaagaccttgaatttgaacttgatttccctttaaaaatataaaaagattcttttttctttcttacactaataagaaccaaccaggttatacaaaattttagtatattcatgcatgcctgccatttttatggttcatattttgtcagcttgtcagctcttgatcgtaattcgtaattttatatatatatatattataattacttttgcttaagtaataaaacctctaattaattatcatcattattagcttcttgtttgtgtgcttaattctctctctaatttaagtttatggcagctcagcaggctctatctactccagaatttagaataatacgtttctgtactactagtctactactactactactctcctcaaacccatatatatacgtaggctcatgattgactgacactgccaataaataaataattttaataattccacattttgttaatttatttttattaaccacacgctttttgtagcgcgtgtgtgcttttgattaatttgtgttattacaattaatcaaatcccatcattattatttacttcattttattttgcaagttaaatgaatatcaacattaagaaatgttaaaatgtagtaaatacatcttaaaaaaaagtgtactggtttcaaataactttcccatatgcccatattatttctaatctctattgaaaggtatgttgtatatatatttgaaatgagtgttgggtgagactggtgagagtagttttttcgttaaatgaatataaatattatatggaagtctattacagtaagcctcatataattattttttcaaggattgagcctctttattattattattattattattattattattagtttacttttttaattttttttactatcttcagtcaaaatgtacattatcagatgtgaataaaacaatattttttaggtgtacctttttttttttagcaatatatttttgagtattgcactgcactgcaccaccaccctatcaatctattgctttgcttaatttaacttatttttaatgcgtgtacgtacttagtatcaaataattaatatattgattgtaactgttaattaataattattaaatattagacgcattgtaactgttagtcaattagtcatggatagataagcaaccgtaggtgttaactgatttaagggaaaaaataaataaatgtttcttgacctgaaaggtttgaagatgatatataatatatttaaacctcattttgaaaggatgttattgttaactattggttttgtttatgtaatataataaatacgtttttttttctcttttttttttattggaagggaatatatatgttgtgaattaacacactttaagaatatgttagtttcaaaattaatgcggaataaattaaataatggtaattgaaaaaaaactagaaaaataactaagataacatgcaatgcttttgataaaatgctatatagcaccataaatagaagaaaaccaatttatcgaggttcgatctcaagtaattatattgcttggatctaatttttgagagtgatcaatctcgatcaagaacagcaaatggtgtcattcacctatacaatgctcacttgaggaagttgtgatcaaacaccacataactcctgtacatccctcaatcttttcatctcaatttatctcttcaaagctctccttatatagacaggcaataaataataaataaagagttggttgttccatcaaagaacaaagtctacaaagacaactatatatatttcttcaactgaacttaggcatatagcgtaaacttttttcttagaaatggtttggtaaacatgttagctggattgacatgtgtactaatcatcttcactccaactgtcttggtagtaataacatctataataaagtgcaattttaatctacatgttttaatcttttttcatggaacatgaattttttcatcaaatagggtgcactaggagtgcataatgggtggttttgacagggttcggtttttcaagtgcggatttcgggtttcaggttattgaaaagtgcaaattgaatcacccgtttgggaatacaggtttttgggtgcaggttgggttggctgcgggtttgggtggggtaggatcgggtttcgggttaggcttggccaattttttttacccaaattaatttataaatacaataatacaattaatattatcgcctaataataatcacatttacatttctcacacacatatataaacacaaatcaatttacttatacacaaaaaatttacttatatatatcaacacaaaaaaattacacaacaatacaatattatcatataataataattatattcacatttcttatacacacatacacaatcatattcacaatattatcatatacattttttgaaatttctagaacccaaacctgcattgtagtttttgaaacccaattttttcgagttcgtgtgggtcaagtttgccaagtgggtgaatttttttgggtacaaatgttccgccttacaatgcactgggatgttgtttgaatgaatcccatttattttgtttaacctttgatccatttagcctttataatggcttcagttgcagtcatgtattctgcttcaattgatgagagttaccactttttgcaagttggatttccaaattacacaatctcctagagttgtaaacacataaccagttagtaactttcttgtgtctaaatttgcagcatagttagaggcaacaaatccaatcactttctcttcattttgttatgtttcacctccatatactagacctgtgctcattgttcctttaacatgtctcaagatccacttagtgcagtccaatgatgatctcttagatttgaattgtatctactcactacactcatacagtgagcaaggtttggccttgtacagactatgacatacatgagactatcaacataactaccatagggaagcttttccatttcgaccatttcaacttctattttgggagattgttcttgtgacagtttgaagtgaggtgctagtggtgtagaatcatgtttgacatctttcatgctgaacttctcatttactttctcaagatagccttcctgagttagagtgattgtgtatggcctgttccttataatcaatgccaagaattcttttggctgcacttagatctttcatctcaactcactacggaattgttgttttaactagtttatggaagatttatccttgccaattatgagcatatcatcaatatacagtaataggtaaatttgattcagatagtaaacacataaatcatgtttactcttgataaaaccaattttcctaataaattcatgaaactttaagttctactgtctaggtgcttgctttaatccatataaggacttgttcaagggacatacctgattgggatctccattgtcatatccctcttgttgttgcatgtggatcttctcttccaaattaccatgtagggaagcagttccaacatcaatttgctccaccttaaggtcaaattttgcagcctttgacataatgagcctgatcgatgtttgcttgacattaagtgaagatatgccattgaactccttggtaaccaatctagcgtttaatcttgacccttccattcctggaataccatccttcatcttgaaaatctatttgcctcccataaatctctagtttttaggcctaggaaccactatccaggtcttattctccgcgagagaatccatttcctcatctgtagcttttgaccgagctttactattcttccttgtgatggcttcttcatagctagtaggttcatcactcttaatttcttctacaacaattaatgcatatgctataattaattcaacataaccatacttgtcaagtgctctaatgtcccttcttgtgtagtctcaagccaacttgtaagtgcttaattcatcttgagttgcattggtttgtgtggtagtttcaactttagttgcatcatctgatagaacttctataatttgatcagattagataccttgctccacctcaagctacagattatcaccttgtgtttgtgatgtaccaaatgaagtatcctcctttaatttcatggccatttcatcctctaaacatcacatctatgcttatgagacatttcttatgtcctggttcaaggcactacaatttttagcctttaacgccatttggataccctagaacatgcattttattgtccttggttgccacttatcttgtctaatgtaagcatatgcagtgcaaccaaaaactttgctcaaaacttggtggcttccctgtccacatttcttgaggagtcttgaaatttagtgcaacaaatggacatttgttgataagatagctagttgttttcttagcttctccccaacacccagcacccagcaccttgcaacatgcatctgactctttcaataagagttttgtttattctctcagcaagttctttttttgagggttacccttattataggttagttttaggtgcattttatgaagtattttagatgtgtattttagttgattatattcgtttgtgcaaaattagacttattttctacttgtttcatgtttaaatggtaaaattcataatatgaattgaaaataagaataaacatgttaaataagatgaatatgatggatttatcatagattacagagttctaagatataatgagtgaaatattctaagttttggatgatcaacacgctccgtttgtgattgaaaagcaagtgctttaagctaatttttgactatgatgtgttcactataagctaatttaagctaattatcatctcatatcaaaaaattattttaaaataggtgtaatcatgtattgtttgagagaattgtttagtgttatcgttcagccccaaaacataaattcattgtgtgacaggccttgtactttcatctcttactagggacaatctcattaaaaagcatattcctattgaatctcctccttcctcaatgcgtgaaatagacttggagtcatttgcacttgtttttctcttgtccctattcatggcgagtcatgcaacatattgagggatggttgggtagcaacctttggtcgagttcttatgatgagtgagttcaatggctgaatagtagggttttctatgcaactatagctggagctacctatggttctggatgaactgaaacttatatgtttttgaacataaatgtataactcttcagttagattctatagttaaagagagtatcaaagcacatgtgtcatttattaatgagaggaaattgtctaagagagacaaaatgacttaaatttgtaaagcatttgtaattttggtgtgtagaaaggggtatgccccgattaaagttgtaaatttgtgagttcaattaatgatttcttgataaaaaaaataaataagaaatcactttattcttttaagagcagcttcagtgggagtagttcaagggttgctcactgataaagtgattctttgtttgacttgaggataacaattatacttgtgagtttgggtactcgttcctgatgggcgatggcaggggtcgaatttcgggggcagaggcgggtatagtttaaatgttcttacccgaatcgggttcgaggcgggagaataaatactcgccttgaatctgtcctgatatgatatgtgtatatatttaagttttaaactattaattattataattaaaataacttcatgttttaagttttttattgatcactttagtgagacatttcaatttttgtgaaaatacctgcaatgatgcatattaatacactgattgctttaaaaaaataacacttaactacttattttcgattgccattgttttatttactaacgcaatttattatgcacactattccttatgtttgttttttaatgagtttttatgatttttttttaattttatttgagacatcatatatatgtaatggatactcgatgagaatcttttccccgccgagtaattctcatcccattcccgctttaatttaaacaagtattgagacaagtatggaggtaaatttaagaagtgggtatgggagtgggggagcaattcctagcccctaggcatggcaaaaagatccattcattcggatcggatcagtgatccgatccgacggatcagtgatccgatccgacagatcagtgatccgatccgacggatcattactgatccgaaacattcgaatagttattggatcctggatcagatccgacccgccccgcttaatttttttacggatcggtcagatccgatccgttttaaatatatattttttaatttttttttttactttttaattatatttt

SEQ ID NO: 294872 - DNA, 3955 bp, Cannabis indica
  modified_base (3294)..(3294): a, c, t, g, unknown or other
tttgtcgtgcaggtgaaaacgacaagttccattgtcgtgtgaaaagaaacgactgaagtttcttggtcgtttgaatccagtgttttaatttgaattttgggacaagtttgtccctgtcgtttttgaccatatgcttgagttggtgtagggaattcttggaatttcaccaagaaaattcctacataaaataatacatgaacaaatattttttttaaaaaaaatcattcaattttactaacaaaattataatttttacttttatttttgttataaatctcgaacaaaaattgaagttgttataaatatattttatttctaaatttaagactatttttgcaggtatttttcatcaactaataaatagaaagaatattcttaggctatacaacattattacatatataattattttttataaacttttaatttaaaattcttttttttaattgtgttgggtgataagagtatccaatgacaaaatagtagaatatactgagagagtaacaattaataaattaaaaaaaaacattaatcttaactaataatattaaaacaattattcaaaagcaaattctctcttatcacagaaaataatcaatataatgtgacaaaaataaaaacaaaaaattatttgtgttattataaaataagccggcattaaaataaatcatatattatgaatttcaaaagataaaaaaaaaatgtattatgaaaattggtgtacttcccaaaatctactgactactaccaaagatgttataatgaactcctaggttgaacatggatttctaacacagttcatccttccatacccccaaaaatttttcactgataccagtatgttattcttaatataacaaacattaccccaaataaacttttttactaaaaaaaaaaatgttccaaagaaagagatcaggaaaaaaagtaaataatccaggatactcatcacaaacttacaagtggaggtgtcccttgagcaattcgctggacagcagaagaccattgtgtattccacatgtatggacccccaacagcttgaagagcaattgtccccgtacccacactgttcaatgaagtggatgttgacttcgttgttggtggttgtgttttttgtatgggaggtgctaaaccaaacaaagtaacatagaaccacaggttacgaaataacttcaaaagtgaaggttccacgtctatggtcggatcaaaatcagaacatatttcagcaacagcaggaagtagaggcccgaggaaatctgctccatttctgcaatattagaacataatttaagaaaaagattaaaagaagaaagaaactagataaatccacatcattgaagccttgcagaacactgcatgcattgtaaaatcaaagccagaaagacaagtacagcaacataattgtttcctaagagttctaccttccactttttgatgcggcaaagcctacatcagagcacaaagatagcaaacggtgacgataatctgaacgcaactttatattttttagaccactagcaatgagaaggaaccctgcagggagcgtctggaatgtgattgaatcagtgagaatctattggacaatatacttcaccaagtaacttgtaagtatcatggtggttcatatttctgatgaaacactgacctcaaccagctctgttgtagcttcaggcaccaatgttctactttcagcagatcctacactcaaaagtttatgtaagaaacttcttgtcatcaaaataaccgtttcccgataggacttttcaaaacctaaacttgccatgcgtgatacagcatcaagaagctgcaaaaaattattagaacagattttagaaactgccatcaaattgaatgaagcaataagcaatttgattacaatcaagtaacattaaatcacgagttgaaagatagttataagaaataacataaaatacatgttttaaagactgaggttccatactcggggtcgcaataaactaggagccgaatcattaccctcttccagtccatcaataaaggaaggtaaaatcttgtccactacttcagacttgttaacagcaacacttaaatctgctagcagaagaataacattaagctgcacaattggtactgctggtttgtttctctcaacctgaaataagaaacaacataaaatgaaatcatcaataaatatgaatttactcctcttaaaacactttgtttagaggtagctatctgttttttatttttttttagttgattagagcatctttatcctctcttcttatttgtttagagaattttacttcatcttcagctatctgatcattataaaagttaatgttttccgatgccaaggtagatctgtcatttatatagtgtttgcaaatatattaagattatagtgctatttataattaaatctatataattcaatcacaagtatttggttacataagaagtgcaagtccaaaagcatatatgctaaataaaagcataaaccaacctgttcatcatttcgttccctaatacttttaaccaaaccaaaaatgaatgtatcgacaaaatgtggctcattgctcctccagcaacattcaattatttcacagctcgtcttcatgacgctctcaaacattgctccctggttaactacccaagtatcagcatgttgctattacatagagggaaaaattaaacagatatttttcttcaacacattatatactgttttacctgaggacatagatctattacaacatgcttgagccaggagaacaaataacaaaatgattggccccctcgagttgttattgcaatttgtgaaagcccaccaagcaaggaacaaaagagttcttcacacattctcaacttacgccatgctgaaaataaacatgcttcagcagcattcgtaaacaatgttagagtctgatgtgtcaacttctcatcagaatcaaagcaagcaagaacctttatagccaacgtaacagcagctttataaactaacagctttgcctttagaagtgagccatgctcagtccaatcacgcttccttatctataaaattttcacattactaattatccttccattccaggtcatctgaattaaatatttcttttttttttgtcttcaataagtccaaagattctcaaatgatacatctaattctaaagtagtaaacatgtatatatatatatatatatatatataagagatttaccttcaaaaaatactatcatcgactggagatgcttctttactactagcctaatatgcttcgatacccttttgtacgtcagtacttacagactttanctctaaaatgtgagtaatcaatttgaaagcaatctcttgcttctccaaactctccacagtctcttccttttcctcaaaggaagaggcactagtagtagacgaacacgaaatttggttcgtttcatttggtgagctttgtgacgaacaaatctccgagttggcttgaatttgttcccacggagtaaccggagaccgaacctgatgaccaggcgcgggtagctgatcaaggagaagattaatcaatttttcagcgtcggaatccgaaattggagggaagctctcagacaaggccataagaaaagccctagatatactcaaattttctcctcctccaatactgatggccgacaccacaacctcgcctgtgaactccactatctcagctgtgaaatccggtgacaattcagcggctttgcatacatatctaaaaaactctgcaaagaacgacgccatcgcatcagtgccgaatgcttgcggaccaaaatgatggactgaatgaagccagaatagaataaaaaaactccaagaccagttgttttaggacggagattggcggaatctgggcatttggagagtaaccgagccacggcaaggagggcattgatttgaggacgcgaaacgctagcagaaccagcgacaagatcctcaggcgaagggcatt

SEQ ID NO: 294873 - DNA, 6820 bp, Cannabis indica
aaaaccctgtgttcatatttttatttctatagcttttatttttctgtgtgaaattactactgtgagtctcaaatttagttaacaaaaatctgcgaaaacaattaatatatatactaatgtatatttataaaaaaaaatccttaaaaattaagtattgatatgtttaaaatagttattatgaagttttgaataggaaattatcgacctataattggtaatatgagtgaaaattgtgggatttgtgttagtcccacatggaaacttgaatacccttaaaaacggtatatataaaattttaaaataagtaaagaagctcctacttatccacactatggaatgccaaatcattgtaagtgaaacaattcgtgtccccggacccctgtttgcgctcgcgtcttgcaagtgtagttattcttttgtgcactagaaactcatttttgagtagtttgttcaatctttcttgtttgattatcaatgcagagcttccacaactgacaacaacctctggtgttgacaatgttctttcttattatgcacgcagtgggatgcaaattatcgtgggtggagaaaaatcgtatgggctttgtgtgcactcgcacgtcctcctgcacgcgttgtgctttttttgcaacgcatacattattttaactaaattatttcagcaatactccaataatattccctcaaactgtgaaaattgtgtgacaaccaaacaattcgcaattacccgaaattaatttgagtggttgttttatttttctagcttgattgttcatggagagcttctagcactgatatagacttatggtgttaataaggctcttcttatgcacgcagtggaatgcaaattatcgtggatgcaacgaatatgcatgcaccttctgtgtgtccacacatgcttctgcaagcgttgtgcttctttggcaaaccgaatattattttctctctaaaatatgccctcacactgtgttaattgtgacaatcaaacaattcatgtagatagttacccgaaataaatttttgaggagctatttaattttttctaaagttctaccacggacattgacgtatagtattgacattatgttagatttattacttgtttgggtataggtttagcttattctaggttggtgtaccattctatccatgtgtagggatatcctatacttagtatataaagaatatgttgtattgagctgaaccctaatgtactctatttttcatatcagaataaagcaatttctttttcctctgtaaaacctaatatggtatcagatatttctctccagccctaagcttccgccattttcgctggtctccttgcagcaagctttttctcgccgaaatcaatggcacgcactcgcagcagccatcttcctcacgcacgaccactggcaccacctactgttggctcccatgtcacctccggttcaagatcgtctcccgatcttcttgcaacagatatctcgggttccatcctcgatttttctcatccaccatctctcaacgatggcgccactgttcccgtggctcattctgccgttcctatctccaccggcaccactgatcccgtggtgcatccggttcctcaagatccttctcctccgattcaacaagatccacctcctccgcccgctgttcatgtaaatccggtcgcagcacctccttctcgacctccgatccgtcaagattcaccatctgtcaccattggtgatttctctgttggtgatcttcatcacggatccgagccccacattcctgctgctgctcctccgatccatgcgtctcaaccactggatcgacaaaatcattctcccaacgaagataacccttacttcgtcggatctggagaccatcctggtctcattcttgttacacctccactttcagatcacaactttcagcaatggcgacgagatttcaatcttgctctcggagccaaaaataaaactggtttcattgacggtactcttccccaaccggcacctacaagtcctctgtaccattcttggatccggtgtaatcaaatggtaatgtcctggatcattcactgtgtttcgcttgacatcaagagtagcatcatgtttcttgataccgctgccgacatgtggactgagctcactaatcgcttcagtcaaggtaatggacctcggctctttgaactcaatgaatcgcttactgatctacgccaaggagatgactctatcacagcttattttaccaaacttcgggccatttgggatgaaatcaacgagctgcgacctcggcttccatgtacttgtcaagcttcagccgacaatatcaaatttcaaaaccaagaaaaggttctgcgattcttgacgggactcaatgagtcataccatgctgttcgggcccaagtcctcattctcgagccttttccgtctctttcgaagggtttttctaccatcatccaacacgaaaggcagcgaaagattcggactctccccaacttggtggttgcagcgtcctcaaacacttctcgcaacaaacggcagcgtcccttttgcactcattgtgagaaacctggccacttaaaggagaaatgctacatccttcatggctttcctcccggttatggcgataaacgcaaaactgatcctccacaccgttccacctctgatcgaagtcagtcctctaagggtccttctaaggaacccgtggccaatgctgctaccaccagcacttctccttcggtctccgataagttggcctctctccatgacatgattgcccaactcactcaacagatccaccaaactcagtccaccatcaatactcctatggcgtcaaatattactggtaaaactgtatcatggatagttgatagtggggctacccaccatgtttgttttgatataacatgtttttcatcctttcctaaagttccagttgcatcttatattacactgcctaatggacttaaaatacctgtgcataaatctggtactgtacacataaatgataaattacaactttctgatgtactgtttgttccagattttcattataatctgctctctgtttcagctgttatagatcaccctaaatacaatgttttgtttactcataatgcttgtttttttcaggacatagttcagaacactcggattgggactgctaatcgagttggacatctttttctcatccaacaagtctcggcctctgctatgtctgtgttaaatactcatgcttgtaattcgaaagtcatttctaattcttgtaccgatgtccaaaaatggcatttacgcctaggacacccctctgttcgaattacaaaatcaatgaataaaacattacatttttcagattcagattcctttatttctccttgtcatgtttgccacttagctaagcaaaagaaacttccctttaattcagctaacaatatggcacatgctccatttgatttaatacatttagacatatggggaccctttcacactattagcattgagggttataaatattttctcactattgtggatgatcatacaaggtttacttgggtgtatatgctcaaaagcaaggtcgatgctcaaaccattatcccacaattttttaccttgatattgaatcaattttctacctccatcaaaggtattcgatgtgataatgccaaggagctccacctccaatcttttttggctcttaaaggtatattaccttatcactcatgtgttgaaagacctcaacaaaactctgtagttgagcgtaagcaccaacacattttaaacattgcaagagcccttgcttttcaatctcgtttgtcactcacttattggagttactttgtcaataccgcagtatatctaatgaaccgcacaccttcggttttacttacatttaaaatcttcttttgagttgttatatcacaggtttccctcttatgaccatctacgggtcttcgattgtcttgcctatgcttccaccttggatagcactcgacataagttaagcccccgatctcgggcttgtgtgttcattggataccccgcaggtatgaaagcttacacattactagatcttgagtcccacaagatttttcaatctcgtgatgttattttttatgaacatatctttccaatcaagaacacttgttctaatgcgaccattgatgctttttttcactacactaatgtttcttctagtgactatcatcaggtacctagtgtcgccccacctccacccaaggaaagcaatgtcgcgattccagctaggacgagtatccctcctccttcaacatctaaagttggccgccccattgttcgcctgaaccatttacaagactacatatgtgagtattccactgctcatcctatatcttcttttttgtcatatgacaaattttctccaagttttcgggctgccattcttagcgcccactcagtttctgaaccaactacttttctccaagcctctaaaatgcctcaatggctaaaggctatggatgatgaaattgaggctctccttgccaataaaacttggattgtcgtatctcttccccctggtcaacacttcattggttgtaaatgggtttacaagataaaatacaatgccaagggtgaaattgtgcggcttaaagcccgtttagtagccaaaggctacaatcaacaacttggtattgattacctagaaacttttgcccctgttgcaaagttcaatactttaaaagtcctccttgctcttgctgccatctataattggcaattatatcaaatggacattagcaacgcctttcttcatggcgatttagaggaggaagtttatatgtctctcccgcaaggatacaaacataacggagagctccctcccaatgcagtttgtaaactcaacaaaagtctctatggccttaaacaagcctcgagacaatggtatgccaagctcagctcaactttactccacgatgggttcacacaatcaccttctgatcactctttattcattcgatcatctaatgatatttttcttgcagtgttgatttacgtagatgacattatcatcgccagcaacaatgtcgctgatgccgatgcctttaagaggtagcttgactccaaattcaaatcaaaagatcttggtcctctacgatttttccttggcctagaaattggccggtccactaatggtatttctgtttctcaaagaccatttacacttcaactcttaacagatacaggttacctaggtacaaaggccgtctctactccaatggaatccagcactcatcttagcaaggacactggctccctccttgccgaccccactccttataggagtttgattggtaagctcatttatctcaccattactcgacctgacatctcttttgctgcaacaggcttagtcaatttctctcagcacctcggcaacctcacctccaagctgcccaacgcattctccaatacctgaaaggcacacctggccaaggcctctttttttacagcagctcctcacctcaactcaaggcctatgctgaaactaaccttgttgctaatgatcttcaacttaaagttttttctgatgcagattggggcacttgtcccgacacttgaaggtacgtgacaggctattgcatttttttggaacattctctcatctcctggaagtcaaagaaacaaaacacagtttctcgctcctccgctgaagcagaatatcgtgccatggccaacacaacttgtgagctcatttggctcctcgccctcctcaaagacttcggcctcaactcatgtattgtgacaacaaggcagggatacatatatccgagaacccggtgttccatgaacgcactaaacatgttgatattgactgtcacatcgttcgagaacgagttcaaagtggtcagctcaaacttctacacatcaacaccaagcacaaccttgccgatctcctaaccaagcctctttttccctcccaattcaaggagttactgtccaagatgaatgttaccaatatgtaccttccatcttgagggggcgtgttagatttattacttatttgggtataggtttagcttattctaggttggtgtaccattctatccatgtgtagggatatcatatacttagtatataaagaatatgttgtattgagctgaaccctaatgtactttatttttcatatcagaaataaaacaatttttttcctctgtaaaacctaatacattaccatgtgtcttttgcctagataacggcgtaacaaatgcatcaaatttttggtgcgttgttattttacactttaaggacgttggtttagcgccaaccaacgtatagtgcttttcatcatacgactagatggaatgtcaattgaatatctatacgtcattgaaaaagtgatgtcccatacagtttttgtagtcggtctttactgaaatccttggctcgtcaccctcaatcataatgctagaatttgattaaaaggagtcaaggagttaaaaagttaaatgttaattatccaaaaagaagtgtgcatacggcaaattacatacacatgccgtaattaattgttacactgttgactccatatattaataatgtactacttatttcctatttacttttcaaaaacggtcatagccgtagctactcgaaatggctgtatttagttggcgtaaaggattggagaaaagattttaagtgcatcattgttgttgttattctctttactttcccaagtcaataaataataataatgggttagtttgaaagtaatcctaacacaagtgtaattatactatattttaaaggttaattggtaattttttttcctgaactttgacatgtactaaatcgtgctccttgaa

SEQ ID NO: 294874 - DNA, 5946 bp, Cannabis indica
gttttgagaaatctatataccaaaaataatgataagaaagaattaatattgtgttagccacactaaatacaaattaatatttatatatgttattacgtgttattatataatacgcttgatgatttgaggtcggccggcagcgtctcacagcgtctccaatgttcaaaaaatataatttcagaagataagcgccaatccaaaacgaacatttcaaaaccttcaatattttaaattatttaaaatttcccaatatcttctatagctacaataatacagtcaataataaaaaatgaatttaaaactatttataaaccaaaaacacaatgaagtgtacgtgccacaaaatttatatacttttcggacctactcgtacctatttatatataaattatattgaagtcaattatatatgtaaatatatatagagagtagataggttagttaaatgtttggtgaaagaagttcgaacgaagtacgatgattcgtgggtttcgctaacccaaagtagagtttctttatcttatttcggttttttttttttttttcgtacagtacacacatttatataaagattaatttgcggtataaatacttaatgttaacttttggttataaaaaaatacttacgtttaatttttgcggtataaatacttaatgttaacttttagttgtaaaaaaatacttacgtttaatttttgacgccaataatagttaagttatatttttaaaattctgtaggtacttaattattaaaaattataggaacttatcaatacaagcaatatttggtcaatgaatacaaagaactcaaaagcttgtaaaagttactgagcttatgagttaggcctttatttataggtatagcagtataagagagtagaaagacaagaacagagtgtacaatttgaacagaaaagaaaacagttatagcaaaattaactgaaagaaactaactaagactacttgactgtatcatcccccctcaagcgaaagggtgtgttacaaactttgagcttggatttcaagtaggcaaatttgtccttggataaggcctttgtaagtatatcagcaatctgatccgaggaaggaacgtatcgcacttccaattctttggcaagaatttgatctctaacgaagtgtaaatcgatctctatgtgtttagagcgtgcatgaaacacgagattggcagcaagagatgcagctccttgattgtcaacccagattattggagttgctgaaacattcgatctctatgtgtttatatcgtgcatgaaacacgagattagcagcaagagatgcagctccttgattgtcaacccagattattggagctgctgaaacattcgatctctatgtgtttagagtgtggatgaaacacgggattggcagcaagagatgcagctccttgattatcaacccagattattggagctgctgaaacagagatgtgtaactcagaaagaatgtaggacagccattttatctcagtagcagtgttggcaagtgatcgaaattcacttgcagttatcctcctagcaacatcttgttgcttttttgctgaccatgagatgaggttttcgccaaagaacacagcatatcctcccgtagaacgtctgtcatcagggcaactagcccagtcagcgttggagtaggcttgaagacaaagtcgaagacaaggcttgatgtgtaagccttcatgaatagtccctttcaaatatctgaataggctcttacaagcctcccaatgaatagttgttggggcatgaataaactggctcaacttgttgacaataaatacgatgtctagtcttattaaggtcaggaaatgtaatgcccctaatgtactcctgtagagtttatgatccaaaaatggttcatcagtagacaaagataatgtgtgagtagaactagtaggactaggacttggtttagcaccttccatgtgtattttgacaaaaagatcagagatatacttcgattgggacaagtagatactagttgaatcgcttataacctctactcgaaggaaatagtgaagaggacctagatctttcagggaaaattctctgttgatatcagaaattagttgagaaattaaccctttatttggacctgtcactaaaatgtcatctacatatacaagtaggatgaccaagtttgcactagcaccatgaacaaacagtgaggtatctgacctcgagacagtaaaaccttttgtgattaatgtgttcttgagtttgtcattccatgcacgtggtgcctgcttaagaccataaattgctttgtgtaatttacacacatgtgtaggtcgagtggggtcttcaaacccaagtggttgaggcatatacacagtttcttgtaaggtgccatgaagaatggtatttgagacatcaagttgagtaacaggccaactaaaagagacagctaatgtgaggataatacgaacagttgctggcttgacaactagactaaatgtctatgaaaaatcaattccaggagtttgatgaaaccctttagcaacaagcctcgatctgcatctatcaagtgtaccatctgcttttagtttcactctatgaatccatttatttccaactaagtgcatgtctagatgataagggaccaatgtccaagtattattttttatgagagcttgatttttcatagtcatggctgcattccacttaggatcatctaatacttgctttaaggaggttggttcataattggtaataatgactcagggagagagtgatttgtagctaggtatgcttttggtttatgaatgccacacttagaccttgttttcatagggtgacgatttgtgggtggtggttgggatagagagggtgctggtggctgggggaattggttggatattgttgagggcttgaaatattggcagggattactgtctgagatggatttgtggtttctgaagtgagtgtggtgggtaaaggcatgttggtgactagttctgtggcagggaaaccagatggggaatcagatggtgcagcagatggtaaatttgacatttgctgcgatgttgctacagtaatgtgttcctcagtagcaaatggataagatgcattagtggtctgaggaattggtgatgtaaagaagctcaatgaagaattagtgttgagagtaggggttgttacctgagttggtgactggacagcaagagcaggaaactcctcttcattgaattggacatttctagtgacataaattatgcatgttgagctttcgcacaagtaacctttgtgttgcatagagtaaccaataaaaatgtatttttaagactttatagacattttatggggctgataaggcctgagtagtgggaagcaagcacacccaaatggtttgagaaaaccatagtcatgttctttgtgaaacaggcacttgtatggagtatcattagcaataattggtgatgggagcctgtttataacatatgtagcatgctgaaaagcatgccaccaataggataggtgtaaaccagattgagctagtagtgtcatgcctgtttcattgatatgtagatgtttgcgttcgactctcccattttgctcatgatcatgaggacaggaatgatgaatatgtatgccatttgtagctaagaatgatgcaaaggttctatactcaccctctaatccgattgaacttttttaatggggaaattaaattgtttttcaaccaattttttgaattggagaaatatagaggaggcttgagacttaagggacattggaaagatccaagtgaaacgactgaagtcatccacaaagtgaatatagtatctaaatccttctttggatggttgatgagatagcccccacacatctgtgtgaaccaactctaagggcacaaaggcccttgtggtggacaaaggatggggtaatttatgtgttattaccaagtttacatgcatcacaaaatttaagatttttcaatgagctatgaatgttcagtttatttaaagttgtggcaagagtttttgaggcaaggtgtcctaacttagagtgccaaatattgatatccttatgaaaatcaacatgaaaagcctcagacaaaggtgctgaaatatcgaaatctttattgctgacagaattgttacaagaggaggaaactgtagaaatagtctcattattacatgtagttgtacagaaagtgttatgacaagtattagaggctttggtagctaattgacactcgatctgaactggagcaggggaaccaaaggacttggtcagcacttataagccatttttaaccctccttttgagaaagattttccctgttatcttgtccttaacaaaacaacaagtggagtgaaattctaggaaaacattgttatcttttgtaagttgagatcacactaacaatatttttggttatttgaggaactttaagaatggaatgcaactgaataggagtggaagaagagggtaaagaatgattacctatgtgagagatgtggagtttcttgccatcaccaacagcaagagtgtcctgaccatggtagggaatttcataattgagattttccattccagtggctacatgtttgttagcccctgtatcagaataccactaaggatcatgggcaaagtcttgaacgatgggagagctataagaagacagatcttcttccttaatttctatgatataggcatgggagtcaccagatttgggaggaatgaaggctttatcaaatctgtaatgacatacagcagctgtatgcccagttttgaagcaaacttaacaaagaagttgtgagggagccattcctcgtccaagataccttcctgaggggcgactagactggctatacccatagccacatgtattaactccagtagatcctgagttgggcaaactagaagcaaatcttggagaactggtggtgagattggccatcattttgggcgaagagtcatggaccatatagtgtcgttcaagccgactttcatgaggaaagagaagagattggatcaactcaaaggagagattgtcaaccaagttggtgacatgaacaaccactgggtcatattcagggcctaacccattgagaagatacatgatcaaatttctttcatccatgggatgtccacaatggataaagaatctacaagaaccttgaccttgtcatagtaatctcaaatggaaaggttacgtttctaaattgtggacaattgtgatttgatctgcaacagtcttgctttagattgagaggcgaagtgttgctctagagctttccatgctgtgaatgaggtgttatactgagccaaagagccaagaatggtttcagacatggaagaacgaagccagctaagtagtaattggtcctttcttcgccaggccaaaaattcttggttgacattgccattaacgagttaagctggtggaggaataccagtgagaagaaaatcatcaagtccatggccaataaaagtgggaatgacttgcaatttccatgccaagaaattagatatgttcagtttgacagtgagagatgaattcagagagatctagaaaggattctaagattagtgaggaggagcaatcggaggtggtggtggcccttaaggctgggcagaggtgcgcggtgggttgtcgatgattgaaggattcattgtcgacatttgtcaatggcttcctaataccatataagaacttatcaatacaagcaatatttggtcaatgaatacaaagaaatcaaaagcttgtaaaagttactgagcttatgagtttggcctttatttataggtatagtagtacaagagagtagaaagacaagaacagagtgtacagtttgaacagaaaagaaaacagttataacagaattaactgaaagaaactaactaaaactacttgattgtatcaaatattaagtaaatttccacgtgacaatccttaattggtccaatagtcatgaatttt

SEQ ID NO: 294875 - DNA, 1311 bp, Cannabis indica
ttttacgttcgatctggtttcattatggttgcgtggccgactgcatcgatggagcttcattcatcctctccgtttgtgacgtgcggctgaaggtaagggcaagtggtatttttgtaatattttccttttgggctgtacaaatgttcattgggccggcccacagtattgttgtaatatttttccctttttagaatattcctgtttttttcccaaattaatttgataaattgaacttttaataattaaattattaatactacacgatgcgagttggaagaggtaataaagaagaattgttatatgaacagctcatatatttattttttcgaatttaactaatttaattaaagtcgatcgtaattaattttaatccagctcatatatttatatatatataatacatatatgcacgtgataataattttgatatttaaataaagtgtcataaagttcggagacgacagtcatacatgctagaaaatgtgctctctaattgtcttttcattattaattatgtctgaaaattattaaaaatgtaacttaataatgctttaaataattgagaattcattgtttgcccatatacgtttcagaaaatttaattgaataattaataatcaacctatatatgtttgcccataatcaaacaataacaatctttttttttttcgattcattattaaagaatttatttagggcaatcaccaccacgtatattattagagttgatcgagatttcagtaacttaaaaataaggcaaaataagatagataaagtgataataacaaatctttaagttatttaatgagtacagtcaatgttcgaggcataatgttatggcaaagggatcgacatgcttatctccagaacgatgggttaagccgcctttgggagcgtataaactaaatgttgatgcgtcgttggatgttaattctaacactattggcattggggcaatagttcgagatactactgggaatgtgctgggatgtctatgtagatccttatttggtatagtgtatgactttaaaatattatgatattcctaagataggagggtgtggagtagttgtgttgggattttggttggaccggagggaaacttttccctccggtgtatggtttttgtttaccggatttgcaattttgtttcttttgttgttgttttcatttattaggatttaatttttttttttcacttattctctgtttgttaatttttgtaggaaattttacagtcatattagcagaagctgttgcattaatggttgcgctggattggtctctcactcttggtcttcctcttcatgt

SEQ ID NO: 294876 - DNA, 6740 bp, Cannabis indica
ccacggtttagcggtttttatgaaaatattcatgttcacacctgcatgaaaattcaacatgcctcttcttttcttttattatttatttaaacattttagtgcttgaattttctctttatacatttcatgcaacgagatacaaagtcatctccactaattacaaagattattgggtagtacattaacactaattattatttattattattgtaattaaagagttacttaacaccactcttatcaatatcaataacattgttcaagtccttgaagacccttttaaaagagctaaataaaagagtaaaaaccaagtgtgagaatgaagttataggacaagactaaagtacaatacaccgataaattggcataatttagggcaagtattcggaaaattccacattgtattcaaatcaattgactccttaataaatacgcgtgcaataaactatttaaaatttgtttatgatactaaaatattcgaaatttttgtgttgaattgtattgtaaaaaggctcttatagtatagtaggcatctaatgatgtaatcatgacaatacatgacattagaagttcaacaaatatttaattcaaacatttaagatttaatatttatattatatacataacactcaaacaagaatctgattctctttcgtccacatcaaattaaaagacattaatataattataatgttatattgtgtttttgttttcatagattggtgttactgtactattataaatttatagtacatttaagccgacagtctcacaaatttaggtggcacaatgactaagtttggtaattactaattaatatttatatatacatataatatataaatatatactatatggctagatttggaacacgtgtcctagctccttaaagagtgttgaaaatgaaaaataaataaataaataaaagttgaataattatcacaagtcagttagaaaatcaaaccaaaggatttcattaaagcccccccactataatatatttttataagatatgcaaaaaattcatattatacaagaaatgtattatgtgatttataattttatttcactaatgaaatgaaatcttacataaaagattatgtcttctaacaatgcatatcattattcatatcatatgcatgtgatttctttaattcttgacaaagtgactaattcaagtttattatcaaccaaatcaattaccaaattaagcttaaaatatacataagtgcttctacaacccacaccgaagcatctaagaaatttttttaattcaatattttccatgatcgtgtatgttataattttttaagaaaacaaactatttaaacccaattttcatcgtgataaatttttttaagtttttcaaaatatcttaaataattacaaagtacaaccataaaaaaaattagactaatgggcagtagatttttcctagatgttcagtactttttttgccctcaattcatctcatattgaattctctagagacaatgcacatggtaaaaaaggagcatgtgatttcaattaaatgcttcaagtcaaaaattgatgtaaaaaattcaataccaaccaaatcatggacccaaataaaaaagttagacttcactaaattactccagagacaaatgcacatggaaaagaggaacatatgtacaagtgaaataaatacatgtcatgaacagtgtcataaaacaaacaattaacaatgacatatgatgaaccagtcaaccaaaagggatggccttttctagtgtcaagtgtcgtgtgtgtgattcaccacatgggcaagcataaatatgcacctacaaacatggttgttgtgttaaaacgtaagcactacattttcagcaattgaattaggcatgcctaaaatgactctttaggtccttcataaaataagtacatggaataaactgttacaccgaagaaaaagcagtctgcttaagaaaagccttaaacacgaacagcttttcttaatgtttctgaatctggactaagtctagtctcgagcattgaacatttcgattaacatatccatagaacattagttaatattgtaataataataactcactattcacgtctgcgcttctttgctagattctcaaacacttggtggacatcgtcagaagtaattggcttcgaagaatcaaaagattcctgcaaaagaatcgacttaacattgaggcttttttgtgaagagcaactaataaaacagaatttcaactgcctcctaagctataacgacactaaagaaatataacagtgatccaaaaaaacataccaggaaagtgcgaatttcatccttcatatcagcaataccattcagaatttccattttttctacatgaccaagattttcaagtagacttaactcagctccctcttgtttctgcaacttctcttccctcttttgctttcccattttttcatattctgcaattgagtcctccttatcaagaagaaaaccaatgcccttttgtttacagtaatcattacatctttcacacctgcaaagagcatccctccagcttttcgaaagaaacattggcttcctctctgagtcaattgcagtaaccagtaaatcaacaccaagagcacaaactgcattcacagcaggctttaaatctatgtcttttccagaattttcccctttttgtaaaccctccccacaaggaacagattcagatatggcagaaaccagcttacaatccttgtcgggagatgtcttagtttccatctcttcagatttacagccagattgtgtatcttccacaacatttttgtccttgcttacactaacactgtcagtattctgcttctctactgcccatacggctcgaggatatagccttataaaagaacaaacaatggagcatgccccacatatgacatcctcatacaacggttcgccttcctcatctctaggcacctgttgaagaataaaatatcaaaagaacttaaagcttaacatgccaaacaccaacacttattaaaatgccaatctttgaaaatgacaaatgtacttaagagcaacataaagttctcgcaacatcttttgaataatttcatttatgttccttaacaattttctagttggatggaccccaaaggcaaatcttggagattataagaaatgagacgacatcacggatcaagtactaccgctgagtatagtggccgtaatggtaagactcgacaaaatgaaagcaaagacaagtaatggtatgtgcgaagtcattttaacctagtgagacatatcttcatacatgtgaattggttgaaaatcttgccacatacatgtgtgcaatgttttggtgtaaactacttgtgcagatcgttactcagcaagtaaaacatgagaaaattacttaagcctattaaaacatatcgagcaataacctcatcagaagattcaagaccaagatgctcctcatggaaccagtcttcacatatacaacactgtatcatctcaacttggtcttcagcttcaacctcaggatcaggataaggccggccacatgtacagtatgagcctttaaaattttgattgtaagaattctcaacattctcaacatctttatttgggtaaagcttgcaaaagaactctccaaattttgaatttccacagtcacacctaaagttcctttttgtccatagctccacaatctggtccaaacagcacccagaaaaaagaaataaacaaatggaaggacagattagatataagtgcataacttaaatttatgaatatatattacaagaacggtaggtaaagctaatgcatcaagatttctctgaatataactattgtgtaagaggtatggtaacagcatcttatcatgcagtggaataatggaaatcaaccccacccactactccagtgcacacaatttgaaatgtagatgagcatcctattaaagagaaatatcatgataaaatagttaaacatgtaaatcaaacagttaaacagtttccatataataacatcctagaaagaaatgaacactaaaagagtttccagagaataaaaaaatgcaagaaagaaccaaacagtaaaacagttcccaatgaataaaaacatgctagaaagaagcaaaccaattagtatatgttaagtttacggaagaaaaaaaaaaccttaatgctggatgataggaaaagtatccattttttttttttgtttcagaaagttgttttgctaggccaaaatactacactcataaacttagctttatcttgatatcattaagcaaataaaaagaaagtagaagtccacatcaaaacatgatgtttaccaaatgaatatgcaactcgtaattatgtggttatcaaaaaatactctatgatgaaaaggatattgactaaaacatacatcatggccatcgtggcaagataaactgcaagcagtgcaaactccagcattcccttctggggtgcatgtcaggcatgagaaaattgcttgcctcttcatgtaaccattattgtacgtacactccttcccttcatcacctcctaaaaccaaatccgcttcctatcaacaagatgaaggcaccaatgttaagatgaatgaaacaagcagcttaaacaaatataaatatcaaacaattatctgcaccgccctagctaagaaacaatgaaatggataattttgtcgacttgctttgtataatgcaatcatcaaggcattcaaatcttaaattttttttgtatcacgtccttccactaaaaccctacattatttgtgaagtatgacactcgagaaaattgttgccaagcagatctctatgagaaatcaaagcacattgctatagcataataatcaaagtaccatgcctgctaaactgtgtcattgttcaaatgagtcatcaaacattgcacaaagaaaccaataaactgatacagttcaaactccccaacataattactttcctccagcatcttttcaccaaaaatagaataaaaattgtcatataattcaacctcctcaacccattaaattcaccaagtaccaataaaaattaaacacaaactcaagcagtagctaacattaaaatgagaaggcatatgccctaactcctaattcaacatataatgctaattacctaaatacaaaataaaaaaaccaaagcaaagcaaaacagaacagaacaggacataccagctcccgttcttcaacgtccttaagatactcttgaatggaaactgtttgctctacctctacttcatcatcaaatgcatcacccatcttcaccgataaacaaaattcgtctcaaaaacccaataatcacttataccaaactttttctctccaaacctgcagctcaatcgaacaaaaattcagcaaattacaaaaaaaatcataacattgaaacaccaaaccctagaatccatggcaaggtggaatttgattcttaaaatccaaaacgaaaacatacgtacctaatttctcaacacagacatcatctgagggcgaaaggtggaagagatttcgacggagctgagtgtggaaatgaaccgaattgaagtgtttgtgaggagagagaaagaagggattagggtttttatatttatagtttggataagagaaaaagggaaggactttaaggacattttcccgccaaatgaaagcttcttatttcttaagaagatttatataacaaaaattctttccctccaaatctcaaatttctcatattccttttctttatctttatttgttgttttattttttattttttaataataaagaaatagttttgattagctaaaaacaattaaaaattctacaatgcaccatttaaaagggataaccgatacatttttatttgttttaatattcgaaataatttttagtcaaatttttttcatggtcatgtaaattaaagttatttaagacatcttgtaaaatttaagaaattcggaaaagtttaacacgctgaagattgcgtttaaacagtgtgttatacgcgtgattattttattttatacgcgtgtaaaataaattgtttgaatattgttttctgtattgtaaattatttgaaatttctcaaaattttgtaagatatcttaaattgctataacgtaaataaatgtgaaaaataattagactaaacaattcttttggatgctgatacaagtacagggtgcacgagtacataccttttaagggggtacattgtagaattacttaaaaaagattatttcaaaattacacaaaaatataattgttaggaatttcaaagagttttacgactttttaagattttatttataaaaaaaaaaaaagggtcttttatatattcatgttatttttatgttgttatatgtatattattttttatattttctgatattatcgggatcttattttcttgttagtttcatgtagctttttcttgctgtttttgaaaaatatttcaaaaacatatatttgaatgtaaaactataaaatagtttattcaaaatattattttggacaatttatttagtaaaataagattttttttttttaatagtacaaaataataccctaagctcaattttattaaaataaaactaaataataacttaacctagaagtataatgattaaacttattatattttctgcatttgattgtgttagacacgctttatgttggttatattaaaaaaatagtttaaaatattataaaataaaacgaaagttttagagtttgtttagcttcataacttgaaaacagtttttaaaaacta

SEQ ID NO: 294877 - DNA, 5885 bp, Cannabis indica
ttacataaaaaaattaatttcaaattggtggctatatatgttagtgaaaaataaagaaaagtgaattgtattgattgaattgaatgtatcagtacaagtggtagctgatttatatacactagtagaagactaactgaatcaactgaataactaattataactaaatttctataacagtatttaattaactctaataggtcccttcaaggtggagtgtaaagatttgtaacacccatcttgaatatgattgtgctgaattgagaagggaagagtgattttgtgaagatatctgctaagttagtctttgatgtaacgtgattcagtttgagtaatccacttgttatcttgtcccttacgatgtggcagttgattttgacatgctttgtacgttcaggtaaactagggttttcaaatatgtgaattgcttctttattatcacaaaagatggttgctggttttggtacttggatattgaagtctttgattattgtagtgagccattgtatttcgtaagtgacaatggcaagtgctctgtattcggcttcagcagagcagcgggatacaatctgttgctttttttttatttctaagaaatgagtgagtcaccaaggaaaatgcaatatccaaagatggatcttctagtgtcaggacatcaaccccaatcgacatcagcaaaagcagagagttgcagtggtgttggagctgtggcatggaaggaaagtccttggcttggtgatccctttaagtattgaagaattctgtaggcagcattgagatgtcgttgttgtggacattgtaagtattggctaagcttgttcactgcaaagttgatgtcaggtctggaaattgtaagatatgtgagttttcttatgaggcttcgatagatggtagaatcggggagaggttctccattgtctctactgagtcttgtatttggttccataggagtggatacaggcttggcgccaaggtaacctgtttcttgcacaagttgtagtgtaaatggtctgtggctcactgatattcctttgtcactacagtcaacttcaaggcctaggaaaaaacgcaagtctccaaggtccttgagtttgaattgagcatctagggaatctttgaattgttctaactcgtgcaagttatttgtggcaacaattatatccttgttgaatgagagttgtactgagctttgcataccattagcgagaagcccattttaaaccatagagacttttttgtaatttgcatactgcattggggggggggggagttgttccttttggagtgtatccaaggggagttccatatagacatcttcttttaaattaccatggagaaatgcgttgttaatatccatgtgatgtaagtaccaatttttaatgacagcaagtgctaaaagcaactttagtgtattgaattttgccactggagcatatgtgtcaaaataatctatgccatgttgttgattgtgccattggttatcatgatggacattacaagaaatatgaagactattggcaggagtaatctcttgtttgatgtagtaaagattgccaagcttttcagctgtcccaatcttcgatgtttgagaagttccttgtatataacaattttttgatgtgaacattatgccattagaacaagtttgtaaaatggcactaacagataaaagattaaatatgaattgagggataaataggacatttgttagtgtaatgttgtcatttattcgaacagtgcctactttgtttatattgacaatagtgccattaggtaatgttactgattgggcatgaggtttcaattgaaaattagtaaaacacctaatgtcatagcaaacgtggtgtgtggcaccattatctataatccaaaaattttagggaaatgaaaaaatgttaccagagaaattggttgcagcaactgcttcagtcgaagtggaagttgcaggttgaagttgctgagataacatcgagatcgattgttggcattgatcattggtgagttgagatgggttgatttccttacatggactagaaacttgagatgcctgagatgtggcatgattattgttctggtttgtaggttttctgcttgtggatgcagattgatcattggattttcgatttccataatcaggtggaaatccatgaagaaagtaacacttgtctttcaagtgacctagtttatgacagtaagaacaagtaggcctcattcttttatttctcgaggcaagattggtcgatggtgatggatcagaattagtttcagatgtgggaggggggtttgatgtacaatcgttgaaaaaactttattcaatggtggccaaggatcaagaaggaggatttgggcacaaacaacatgataagattcatttaagtcagtgagaaattgtagtacctggtcatgattcagctgttcttggaattgggcagaagctgcataggtgcaaggaatcttgggtcgaagctggttgattttatcccacatagctgttaattttgtgaaatacgtgctaatagaatcatcaccttgatttaagaagattatcgattcatttaactcgaagatgcgtggtccgttcccttggttgaagcgattgttcaattcagttcacatttgagatgcaatgtccatgtacatgatgctactcttgatatctagggaaacagaatgaagaatccaggacatgaccatttggttgcaccagatccaagaactgaagagaggatcatttggtgaaggttggggaaaagatccatcaagaaacaagattttatttctggtgccaatggaaagcttgaaatcacgcttccatggctgaagatttctatcagtgaggataggggtggcaagggcaaggctagggtgatcggcgtgctcagataatatggacttctcacatcttcgtatggaggacgataatttgaagaaggtcgaggttgttacaatggaggattttgagtgtgccctacattttgctctggttgtggtggtggtggagcttcctaattcgaggcatcgaccactggatcagtaacagtggttgtagtggaagaggtagctctggttcgcaccatggattcaagaatttgatgcgttggggagaaactcacaagtttacttctgataccatattagtgaaaagcagaagaaagcaaattgtattgattgaattgaatgtaccagtacaagtggtagctggtttatatacaccagtagaagactaactaaattaactaaataactaattataactaactttctataacagttaactctaataatatatatttacaaattaatgcatttttttttattttattttaatctaatgaatatagattatggtgttataagtttataacttatatatgcttaatttaatatatagaaaaaattatataaaatttgatttttttttaaaaaaaaattaacaaggtgatcgagtcaacccgaacccatagacctgcgaacctgcgagtccgaaactgcgaacccgaacaacttcacggattgggtccgactataattctttgaacctaaaacctgggaacctgaatgcggtcaacccacctaatatttagccctatcattagtcaaaaaaaaaaatagtcttcttttcactacatataatttttttttagaagttttgactacataattaatcatatctatttctttaaaaaagaaaaataaccatattaagtatattgttgatcaaaaagaaaaaaaaatatattaatacgatcatattgttacataaaaccatatcgccttcattataagattatcattgcaagtagtgatattctgctaccgttcaatatcataagtcatacttattacttagtccttcttatttgaccattttccctaaaataaatactttgattttctttttgcagggactttatgcgtgaaccatcaaaaggtaagtacaaaacaataactatgtgttacaatatgtatatcatgataatataaatgactcataaaatggaactgactttacatagatcctttcttctacccttttttcttttagaaagaaagaaagttgttttccatctataatttaaattaaaatcttgaaaaaagaaagttatttataaaaaaatttcaacatgaatatcgaaaccaaaattaaatacacataaggaaagtgcatgccatgcagtactgccgctgcagcagcagcagtgtccagcaactgcaaccgctcagcctaaagcattcacttaaatccacttcggcagcagcaatcaacaactgtgttttgcctacgtttaaagctgtctgtctttgtttcactttattttctcttctttttttgtactttttttaataaaaaaattatagttattaaataatttatttaagcttgtaatcaattggctatttttcagctgtgtttttttttttttatatatttattttgaggactatttgggtcccaatacaatctcattgggattgagacacattgcttctacttaacttttccaatatccaataatcaaccctagccgttggatcttattttgtcagttttcattttcctctcataaacatatcacaaaatatccctatgcttaatttgtttcgttaaaatattgttagtagtatactagtactagtctacatacaagtatagggatagaaaagatggaacatgaatgggcaaaccatattatttttgagtattgggtagtgcctagtaatatttttattagttaatatcttataaaaattattataataaattatgtgaaatttaatatttaatttcttcaataaaacatttttaattataatattctttgaaattgccaaaaaatttacattatttaagaataaaatattttttttgagtgctaattatagtatcctattacaatctcttgattaacttcttattacaatctcttagtcaattttcacgctcgaaatcactttccgaaataattttttaattttttataacatcattcatgtaaatttttacaaaaatttgaatagtttacagtattgacaacaaagtttcagatattctagtttaccatgcgtattcaaaaaactttaaatctatttttggtattataaactatttgaaaattttaaaaaatttatagggacgatattgtgagtataacgaacaccgctataaaaaaaattaaaaaatatatttcggcatatgttaatgagtatagagattgacggtagtactctttattttattttttctattacacgtcatttttgatacttctaaaaatactttaataataagtactcttcaagaatattattgtagttccttacattgttatttaatatattatttattttaattgtaaatattattacactaaattttaaaaatttatatataaatataaataaacatgaaatttcaaattttgaaacctatgaaaagtatagtagactttttcataattgaactataaatatttaaagctatctcggggtggggtggggcggggaaggtgtatgaaagccatatggtagtccaagtgtaaataatagagtatgttgaaaagtctagaagggttaaattttggcaagggaatgagtacatggaaaaaaaaaattaagaattagaaaaaatttgattgggttgagaatattgaaaatttagattatgggaattagtgtgtggagaatttgaaaaatagaaaaagaattagtgtgagaatattgtattatttccaagggagcacactaaatttagtatcacattatcactaaattcagtgtaaaaaattatttccactctaaccacaacaccaaaaattatattaaaacatattctatattattatattaatttttaataatattaaaaaattaatattatataatttaat

SEQ ID NO: 294878 - DNA, 3118 bp, Cannabis indica
tatatatatatataaatatgaaattaatgaaatgcattgcattgtttgtttttcttcttcattctttgttttttttttttcaagccaaatatatatttttttttatttttcgaaaatataattttcattgtaatgcagctgctctgtttttttttttggctatgattttattaaaataaatttaattagatattactggatctgtggttaagatatatgaacattaaactcccatttttattttctgattttttttttgttgtttgatgattttgcataattttctgtgtttttgttaatttttttaacgttatttattttctttattttattttattttttatcgaaaacatcgttgtttgttttggaactaccaacctgcgtgaatcattcaacacctttctttaaaacgacatttttttccttaaaaacgacacctttctagaatagcgacaatttcccttaaaacgacaatatttttaaaaaacgacaatatagtggaaaaacgacagaaagtgtataagttgtgtttttttttaagaagcgtaattacatagaaaaggaaaaccattccaaacgacatattttgagtaaaacgacaatttcttacgaaaaacgacatgttttttttctattttttttaagaaaataataataataaaaaaatgccgattcagcctaggctaagctttaacttcatacacctctgcatgagttaatatcaatgtctgtggtgggtatattattcatttatatacgtatatatatttattatttaatatgataaaatattacaatttttcaatagttaaaaaatatcattttgtatatatattcgattaatgcaataaatttttcttgttttttttccctgtagacaccagaactgacattattacctttatacaatttataacatacaatttataacctcttattttcaataatatatatatatatattttaatttatttttagctgtccactgtcacaatttttatttcagtgatttctgacattaaactgacatttcatttcaaccacaactcagttattgaaattattacactctcattgttatgatttgaaattttgtgattttttagaggtaacaatttttggtcccaaaatgcccaaattgtccctagttattgcattgtgtaacattttgctctgttttttccctcttcaataaggtaaattttagctcaatttgaagtagtgtaacattttttttttgttcatttttctcaattaggggcggaaaaatgggagccggtggccgaatgcccgaggcgaaatccgagttgaatggtagtaagaataagaatagcctaattgagagagtaccgcacaccaaaccaccattcacattaagcgaaatcaagaaagcaattccgccccattgctttaaacgctctctaattcgctcttttgcttgtgtctttcacgacctttttttcgcgtcattgttttactatgttgcaacctcttactttcaccttatcccgaaaccaatttcatacattgcttggccaatttattggattttccaaggttgtattttgaccggggtttgggtcatcgctcatgagtgtggtcaccatgcttttagtgaccaccagtgggtggatgacaccgttggtctcatcctccactctgctcttcttgtcccatacttttcatggaagtatagtcaccgtcgccaccactcaaacacggggtccattgatcgcgacgaagtgtttgtaccaaaaccaaaatcacaagtgtcaccattcgccaaatacttaaacaatccacccgggagagtcttaagcctttttgttaccctaacacttggttggcctttgtacttagctttcaatgtatcaggcagaccatatgaccgtttcgcttgtcattatgatccctatggcccaatctactcaaaccgcgaaaggttacaaatattcatctcggacatagggattttcattgccacattcgcgctataccaccttgtctcggccaaagggttaggttgggtgtgttagtgtatggggtgcctttgttaatagtaaatggcttccttgttttgatcacctacttgcaacacactcaccctgcattgcctcactatgactcgtccgaatgggattggttgagaggagcattgtcaacagttgatcgagactatggaattctcaatagggtttttcacaacattactgacactcatgttgtgcaccatttattctcaacaatgccacattacaatgcaatggaagcaaccaaagctgtgaagccgatattaggcgagtactaccgtttagatgacactccaattgttaaggctatgtggagagaagctaaagagtgtctctatgttgagcaagatgatgattctccatctaacaaaggtgttttttggtacaaaaacaagttttaggagaatttgttatgtaatgtccaactttgttgtgtactttgtttgtgtatgtgtgtgtatgtatttatgtagtagttaataatggggtatggcttaatgtggttaggggtgttgatttagtgtgtcttttttgggcatgtaatgaaccttgttttagtttaaatttgtgttgttatgtatgttttaatgtgtgattatatatatatatatatgtatattatattttattatattgtatggttactaattttggcaaattattaggataaggacccaattgtaattttattatatttttctgaaaggagtccattagaaattaatactagtaaattttttttttttataaatgacattataacttctctataaataaactaggaaacaaaagtttattttgttttgcaccactctaaataataacatacaattttaaattttatgtaagatatgaatgaacataataatctctttatcaatatgaaaaagaatgagttagtctactatctaatttttttgaggcatctttaatttatgtttgttggtctgccaataaaattgttcataatttaattgtgtatgaacttaaagtagatggtgggttagttatggaggtttaaatgaaatttagttcattgttcaaataaaaaataggggtaagttgaaaaatgcctcttttattcatca

SEQ ID NO: 294879 - DNA, 2532 bp, Cannabis indica
gtaatattgctatattagaatgcaaggaatatattgtcattattattgccaactactttatttattttttgaaggctatttgccaactacttgatataatcacatattgttatttaatacttctcccatttatttaaggaaacctgagctattaatctatatatatcatcatctgaacccagagatgattacaataatttatttatgaagtaccaaaccaacttccatttcagatcattacaattctctttacatcaataatatgaattaagtgccatcataaacattttgtccagagttagtcttaaaataattttttagagactactcacagaatagtttgatgcatacttaatcctagtggaaactgttccaaaaataataaaaaaaacaatcctagtgcatataaaactctttttctctgctttctctttgatattgaaggaaaaaaaatcaatacaatggatgggatatccttgtagatcaagctagtcaaaattaaacgcaattctgaaaaataaggataatataatttatttgatatagacttatagtctttactgttgtggatatatacacagagagaaaagcttgtataatgtgtattaacaatgatttattttctttaaataacaaaaaacaaaaaactactcactttataccaattactaaagaaaaccacaaaacaaacatatatttgtagaaacatactaacagaaatgaatttacaaatacaaaaaatctatgaaaatacgttgaatgcctgagccccacgagcaaccttgatgaagacgtcctccagtgtggtgtcggctaaaccccatgcgaaaactgtgaacttgctcttggcaatctgaacggcttggaagacgtctgcaattctcacctcgtgttttggcaactcgaatttctgtgtcccagataagtgatatatcttgttagcatttggggagagcttcctcaccaagctttccacctcttgttcatggttagaagatgttgtcattgtaaacacataagatcctccatatcttcctttcaactgccagacattattgttgttgttgatgagaaacagatatagagaaagattgaattgaacaggattagaaaaatcaacgaaaaatgaacaatttgaaatgtgatctgacatctagtaattttaaacaaccagtaagaggacagtggagatacgttataaaactaagttgggggagtggggaatcttaaatttactattgataatgcattgttaattatatgagtacaggtacctctttgggatttcctatgcactgcaagcttccatccacaaaaattcctaacctatcacacaaaacctctgcctcttccatagaatgtgctgcagacagtggaacgggatttccaagttagttaaaacaggaaaagggccattattatataatgtaaagaatgcatggttgacggtcctatgacactacagaaaactaaaacacatatacatataaagaagacagagaggagagagagagtacttgtgaggatgattgctcgctcttgctttgcacgcttcacaacgttccatagattgtttcttgaagcgggatcaagtccagtactaggctcatccatgtaaacaacctgcataaaaattatgagaaaatgacatttttagatatcttcaaagtacggaaaagagtattgtacactaatatccgagaaatacagatcgagccatactttgggatcccctatgagagatattgcaacactgagcctcctcttcatgcctccactatattttccagctgttttgtcagcaactcctccatggaatagattgacactctttagagaatcttccacagcctgtggcagcaaatttatacatcgtaacattactttaactttcttaccaacaaaaaagcatattatatttaatattgaaaaacatttaggcactcaaggtggcaagtgcagggagcatgaacacactattttcctatactcgttcttcagaataatcccaaatacttctactacatgtgcaaacttaagactattttaagactaccaaaacaatactcctagtttgttttatttaacaactaccaaaacaatactcctagatctataggtttctctcaaaatcatgaaataaacaaataacttactcgttttaaggaggaacctttgaggctctttagtctgccataaaacaatagatgttctcttcctgtaagggtttcccaaagcaagctgagaatttcataaaagggaaagagaaaaaagaaacaaagaaagaatttagttttcaatattagaaagaaacagcggcaacataaaaaaagatcaattttattaaagcagaggataagaagactatcttactcatgctgtgggcacacacccatgctggtatatatttcgtccatgtcagtttgtatgtccatcccctcaacaaatgctgtgccagaggttggctttgtaagccgatcatctgttaacagatgtaactattaaaaaaaaattgtgtgtgtgtgtgtgtgt

SEQ ID NO: 294880 - DNA, 2969 bp, Cannabis indica
aaaataaattatataaatgtaaaaataaatgtaattagtactacaagctaatagataaatgacaaagatagaatatattatatataatagaaagtaaaatgtagaaaaaaaaaaaaatgaaaaactactaatcgggttgggcagattatttcagtttaattggacaggttggacctatttttaacccgcacaattaacaaattgggcggtttatagttttgtcaagttttttcgatttgaattttttgtcgagtttttcgatttaatttgaacggtttactaagatttatattatgtacatccctactactattaatatatattgatagaactaatagacattatgtttagttctattcggtataaaaattaattaatttagaaaataattattattttagaattttttttaataagctgttttttttaattgacaaataaaataaaatagttcgaaaaattcaaaaaaacaaaaatgctaattattaatttttgccaaattgaaaaaaaataaaaatagaagccacttcttcttagagggtccgttccgtaggcggatattggttcctttcttctttctgtactcaccttcgttcccaacatcctcaaaacctcattgctctgctctcctcagctcagcttcaatctcaggctcaggtaacccaccaccacaaccttctctttcctattctttttcatttttttaattattttattttctgaaaccctaaaacttataactcaacctttatccgaaccatggatgaaacatcttggctgtggcatcaacactcgtcaatgcaaaacactagggtttgatcatttagccaaataaggaccaattcttcacaaaagtcccgtgtaattagatatttagcacgagtagcataaaatggttgatctttgtataattcaactcaatgtgctttttttttttcctttctcaattgggttagaggtgtttatgcaatattcttatgttctccttttgttttatgttgtgattcatatgtaaaccttttgtgtcgtgttggttcttgcactgtgaatgaattgctatgttttttttttctagaattttgtcaatttcaacaatattcatgctttacgtgtaaatgagtagatagtacttgggttactttcagtttattgctttatcagccaaattgttactgactccatgtgttatgcttgtttcttaccagccgttgggctggtttttagaccctttgaatgggaagcaagggtcgaatgccgccttcacatcatcggcgcccacttccaggccctgggatggggcatcctgagcaatttggccgtggtatgcatcctccaccaggtggatttccacattttgatatgatgcctccgccagaagttatggaacacaagctcgctgcacaacatattgagatgcagagacttgtgacagagaatcagaggcttgcttccacacatggaaccttgagacaagaactggctggtgcacaacatgagttgcaaatgttgcacggtcaaataggtgctgtgaaggccgagagagagcaacggatgagaaacatgatggagaagatttccaagatggaagctgaattgaaggctgcagagcctcttaaatcagaactgcagaaagctcgagcagaagcacagagcttggttgcagcaaggcaggaacttatttccaaagcacagcaattgtctcaagatcttcaaagagcacactcagatgtacagcagattcctgcactgatggctgaattagatagcctcaggcaagagtatcagcactgtaggtttgtgccatctaaatataccttgtgcggagctttaatttatttgccatagaatatcatttgtttagtgttcagccttttgtttaggtttgttgcgatttcaatatggattacttgttcttaagagttaacccatgtgctctagttcaagtatcttttctttttcctgcttcctttgaactaggacaaatgcagattgtagactctgactggatatactctatatatagattgtagaatgttatgctttctattttcattctatgtaaaattctgtgctatagatctttatttccccaaaatgaatcatctatcaaaatgccttaatatcgtctttgagtttcagttgattgtttaatttagttttagttatctaaagccataatcttctatgttttgatcttgcagggctacttatgactgtgaaaagaaattatacaacgatcatcttgaatcactccagttgatggaaactaactatatgacgatggcaagagaagtggaaaagcttcagggagagttgatgatgaaccccacttatgctgatagaagacctggtatgttctcctttaggctttatgggtcttactctatgttttcctcaagatcttttatagtgtagcaacagctcatcattagtggaattttccaccaaatgcaggtgcaccttacggtatcactcctggaaccaatgataatgaggcttctggtcatcctgtggggcaaaatgcgtatgaagacggctacggagcttcccaggttttttgtcttccgttttctctcccgcttacacatttctgtctttacaatttgctttgatatcttttgatggtggcattgtataactatggttttcttatttatttcatgatgacattaggcttagtgaaatctggtaagaatacttaattgcttgcatttgtctctaattctacagcaaagtcataatgtggtacaagttatgtaatcgaataatagtaaaaataaaaatgaaattgtattgtttgggtttgaacccaactgaaaatgctgcttgcacttaaaaataagtttttgtgtttctaacttccgagaaagaaaaacaacttttactctgtttgcaacaagaagaaacaaactcattgctctcacattttgtgtaacagggacgtgtcccaccccctgctggtagcagtg

SEQ ID NO: 294881 - DNA, 6960 bp, Cannabis indica
aagagaaaataaaagcaaaaatgaaaaccaagaaacacatatttgtatattaaaaaaaaaggaagaaaagttcaagaaacacatatatgtatatttttaatctcaaagtggatcttttaagctttgatcatcatcatcatcatcatcatcattatcaccacattgctcattaccatcactttcatgttcttcttcaacaatgggattaggacactgttcttgatcttcattattaacctgttcctcactctcatttgtggcttgtggaaaagcatgagaagccgaactcgtctgctgttgctgttgctgttcttgagtcaagctcgttagaccgttttgctttagatacgtgtcgagaggacggcttgcgttttgaagaaggctcatcatgctgacgcggcttgaccctgcttgcgaatcttcttcccgaatcccaggatgggagttcaagtccagtgcttccttggcggtatcagccagggtgcagtggttcttggattctgattcgttagctgatcttgtttcgttgtctgatggatcaagttgtgatgacaaatgtctagatgtagtgctgtctacttctgtttcgtctctcgggtcccataatgttttctgatgatttctattggctagctcagcttcgcgttctgattggcgtttcttcttgttcagcatgagggttttgaaccggcgtttaactgtcatgcatacgttacaagtacatgaaggtttgtgcttgcctttgccgctagggggctggatgcaaacaatgcacgagcagccgggtcggtgcctggggtgttttgttgtagtggcagcaactgttgtggtacctggttcggttgctgttgcattgtctccgagcattgctgcattggccaatgcatcaaggcctgaagattcgctttcatgggttggtggcctgttggctgatgatactactcttcgttttttgaactctgcacatcaaataagatgttttggtctcaatagcttctcatgaataagtgcacagaatgcaggagctttatctgcacaaaggatcatactattatgcagattggcttcttgacattgtcagaaaaattaagtatgcttgtaaagaatcaataacataatcttttactattcaataaggatatgtttgatgtttggtatggaaaaaaacttgattcaacaaaaatttttaatatttttttcttcaccaaaatcgaacttccaaacatagtgcgggctttaaagttagtttatgtaaagtagcatatgcataacttcctatacgatttagtagcccaagatataaatttatgtcaattctgaaacttctgttctagataaacaatgtctatcaatgttgctaatgttctagatagtttgcaccttgtccatacgagcaattatattgggttttcgaaaatggctcaaactactagtatttatgaacgagacaaagcagttattaaagaaggataaatcatctaacccttgttcattctaagaagactttccagttcccttgggctcagttcatctggcacagagcatgaacacctgaaaatacaaaaatcccgaaaacatgaaactttatttgggaactggttttctttatttcggaataaaaaaaacttaagagtgaagtgaaattcatatttaacctgatttgatcccaaacattgtcagcacatgtccacttatatggaagaaatacatcaactggtaaccttctccatttagagcaactatcacactgagtccattgctcttgttcccttaagatcaagttcagtagttcagaattagattgatttttacatttcatttttctttttaaccaaaaccaagtaaatatatttacacacttgtgcatatgcatggtaaacaataacattacatgctttaagacagaagaaaggaaacgttcgattgaatcagattatgataaattgtctgaagaaaagaatagcatgttatctgtaagatatcagaagtcgatataattacaaactaaactaaaattttagcagaaaagattatacttagtcttacccagttgaacggagtaggaaaatacttctcttccccaaaactggaggttcctggagaagaaacatacattcatattactacacaagtcaataacaaagtttattgacagccaggaaagttaagtttaatacatctcgaagcctaagtagaatcgaattcacagggaaagttgttggaaaggggttcttattactacacaagtcaataacaaagtttgttgacagccaggaaagttaagtttaatacatctcgaagcctaagtaggatcgaattcacagggaaaagtatgttggaaaggggttcttattacatacacgaagaaatatatcaacctctgcagagcagtatatgctatgcttgaaaaggaaaattgtgcaattaacaaacttttcccccaaaagtacatgaagccaagggcccaagagtgtttcgaaacaacgggaagtaagctaaggccgtgcaattttctcaaaaaacatcaagtggactaatattagaaaggcgataattaactcaactatatgtatcaaagaaagtagaacgatttggtgaatgctaatttcatccactttacatggaaaacatcaagtggactatgattagacagagagaaaacaccaacgaaaaagctagtcaaaatattgtgggctttagattattatctgtgaaaatttatcattgctaatgctgatgattgagtcaggttacagaacataaaggccaacatacttgaatcaaaataaagaatagctaataaaattcaattcagaagcaatgctttaaatgggcagctaagcgtacttacttcatattcttcaaattcgtgatcctcaatcatgacggtgcttggtttggcagaaggaggcggacgaagcaaatcttgagcctcttcccatgtaagttttaactccagagcttcctggctatcaatgtgcaacctcttattttttgaaccgagatttctagctctttttctttctggaaccatcaacgaaggcagcaacaagttctcccttgacctgccttcatgcttatcaattttattccagctaatatcagcactagctgaagacaattgtttggatagtgcatgtaagtgggtatccgcgcttcccttcagtgactgaagaagaccagagtaaccacttattataggtaggttctcgaaaacacccgaaatgaaaggttcacttgaatgaccaccattgtgaatggcagatggatgagtgtcctgtttattttaataatttatacacatcaatattatatgacccagggtactaacataatagctgacgattttttacctgcattgcaacagaatttgatgctttccgaaatcccataataagttttccctcaggatccatacgactgaaagtcactattataaaaggggaatatatcaaaaccaaacacaatccatgttaaagtatttaatggaaaagtaaagtcttctaataataagatcttcttttaaaaaaaaaaaaaacgttgcctaacacaatgatttgcagcagaagcattcaattagaaaataataattcatggctagaaacaggcaaaggctagtgcttgcaattcttctattcaacattgttaaaaatataatcagaaattggcgctagggtcttggaccgcagattgtagcctgtgagtcaatttggattctcagtataacaaaactcaaagtacatatattgccatatttcagtgccatgaaagcaaatcataacctcctcctttatttataacaaattacttcaattttcttttataagatacactatgaggacttaaactctgtacactcacacacactaatccattacgtaagcaaacatcaagtagcttctaccaaattattacatcatatttacgatacaaactaggtacaaggaattatataagctataaagccatgggaaaataccagtatctcctgcttgcaactgcatggactggatgcatggggtcacaccttctaaaacgtacatcctgctgttattattgggccaaaatctgaactggaacacccactctttcccttttacatcttgaatctttaagggaagaccttcaggttgagaaataggaggaaaatacgcctgcatgatattttttagtaaagtagattgactgcaataataagtatgacgatgacctacattgaataacagttgaaatgactgaatgaccaaaggacagtacttacttcagcacatgcttttggaagaaccaaccgaccaattcgaccagcgtcactagcactgagcatcttttcaaacagtggcacaatggtggaatttgagctttattaaaattatggttaaggaattccatttttaagtgcaagaataatgattaaactcaacaaaaacttgtcagtttatgattctagtgggattatatctttatgaaaagaaagaaaaggatactctccagatatttgttgcaactcctgatcagtaattctaggccaatagcgaggaagtaactggttccttcctcgtccttcagcaggtggccgtgcaacccgtacctgaggagccatattagtgtttccttccaaacttgtaccaacggttgaccttgggggttttggcaacagatgcctagacctagcaccttgtaagaacaaggaagatgttttactttgctccctttcatcaacaatagcactgggagatgaatttgaatttcctaaaggaccaccaagagtcatagtcaagtttgtttggggtagtgcgtcatatatatcatttgtgcctatacttgctttgcgaagttctgctttggcagcttcagatgatccattggatccctgattatgacttgagagatatgtatttccagcctctcctactggtgggacttcctcctgtttcattttccggaacaaaccattcgtttcctcatgttgagattgaagtaaatgcctaagcccaataccctctgtgtcattgctcaacttcatgaactttatgctatcattattatttccatctaattggtcattggaagaaatatgttgcagctcactgacttttgatgtgccgggttcattaggcttatcagcaattgtaatctgtataaaaacttgtttcataagaaaaaatgaactcataacacctaaattgtcaatagaactattttcactgtttgcaatgctctagttcaacaaaatataccaagagtgatgaaatcatagagagcaacacccctattagctaaaaacatacacaaatggttgcccccagtttaaatctttggaagctaagcaatcagtaacataagaacttatcaattataagtttgacaatagccatgtggagaactagtgcaaaagcacgagtggctaccaaagtagcagtctgaactaccgaaattcacattcacatatatatcccacattacaaaattaacaataaatgggagaaagtaagaacttaaatctttaaaaactcaatgaagaaaattccaaatatacatatggtgcatgaattattattgaaggttcttacaaggtgagaaccagatttctttgcacaatttgcacacttcacaccaccacaatcaagtagctcaagcagaaatcttgaagcaatgcatccacaatggagacgctggaagaaacagtaattaatttaacatctaaaaaagggaaaaaaaaataaaagaagaaagaagcaacttgttcaatcattgggcatgtcctcaccttgccacatgaaatgcactctctccaaccagattctgctgaatggtaaacgtcacaataaactaactgctcatatgcagacctaaaatttgcacatgtttccaggttaagacaagtattgcatgatgaagactagaaatttttccaagcaaaccagacagaacaattaacaacttgtaccccaaatggacttatcagagttatcatatgaattatttagctgctacaccaatataagattgtcaaatgattattataacagataaaacatatacataacaacactggtcactacactcacagagcacagctttgtatatgatcactttatgtttcagaaagaaagtgaatcagtccaaattcatatactaaatgggtctaataatttaatggcataaatttggtatgaatggcctacaccaaaagtcattctttccctaattagggagctaataatcgattggcttaactttgcaaaaatgaaaattgttcttaaaacacttttttaaacccaattatactaaaatccccaataaattttgcttttcatacaaaattttaatcaaatgagagcgttttaataccatagatcatattgtcatcgaagtattgctaaaacattttgatttattatttttctttttggtattagaaatcattatcattgagctaatattgttaaacaacatcgattattatatacgtcagattaatccaataaacttcattatatcaaacaacaacttcgtgaaaatattacctaattacatggtgtgtgttctataaatacacatacattttacacacaaatacacgtgtatatatatttttatacaaaaataggataaaagataaaaccaaataataaaaccaaaaagtaaatatattacttgaaaaaacgtataaaacagaaattaaaaattaaaaataatctagaaaaacaaaaggcctaaatcttcgtaaaaaatgcaaacatttctgataaaagaatcaaagagaaatcaaataatttacccgcacttatcacaaagattagcatatccaccagatcgcaaagcccaacctctcttccaatcaatcgaagtcgaagcaccacacgacacattcatacaagccatttcaaactctaaagaaaacctgaaacaacttccacacaaaaaaatcgaattcgtaaaacaaaaatccccaattca

SEQ ID NO: 294882 - DNA, 10471 bp, Cannabis indica
tgtattcaagcaaccaacatattagctaatgaaccttttatgcaatatgagatagatgaaagtactatatattctgaatatgttgcaaaatgatgcataattttataattattagatatctgcgtttctatttatgtttatgttacgtattaaaacgttatcataaggagattttatttatggtttagtcatatattatttaattgaataatatgaatataatttttttatgtaattatttatgaatttatttatgtttatataaattaatttatttaataaatagaagaaaaatataaattttatatgaaaggtaatatggtcaaattaatgtattttgattttctttcttattgataaaaagaaaataaaataattctaattccgtttccaatcagtatagtaaacatgttaaaataaaaattttgatttcagaacattttattctctttcatttctcctattaattcattctgataacgattacgattacgcttaactaaacgatagatttcaaaacccccaaaaaaaaccttgtctcataagtgagacatttaaaaaaagccataaaacatttagaaaaggttgattcttctacacatgataaactgaactattagaacttttaaaaaaaaacgacaaaacaaagtgaagaaagataatgcaaaagctcaaaagctgtgtaaatacaagtactgagccaaatctattaacgttaggtgattagaagttacttatttttgttttggatttacatacatatgacagacacagaaagcatcatgcatacataaaaatcccacacaaaaatataaaattacaaaacccaactgaagaaaaaaatgaaaaaaagagaaaagacagaaactttatggagccaaaatgtcattctctatcatcatcatcatcatctccatgaagaagcaacaatcaaacttttgtcttcccatccgaaaagaagtgctcccatctcatctttgatcttgtacctgtcacaatactgtctgataagttctctaatcgaatcgaccacgtttgagctcattggacatgaagtgaatcccgccattgtcatcctcgctcgccatttccctgcaacctcataccgctctatcctctcctctccttcgcaggcaatgatgttcactatatctcgtgcaaggcattgtctctcgacatttgtcctgtctggactctcccttggaagagttgcgtctagtgattcaaacacggccgagtagtatttgtaggcctcgataaatcttgggaaaaagggggaagtgttagtgttcacatcttgttctactaccgtcacgagtttagggttcaggctcttaaccatccgaaggagctgatctctctcgtttatagttgagacactttcatcaggcatatgatgtagctgaaacgcaaagtttacaacgagtgcttccccgggccgacagtccagcattgaaggcgtgacaagtgaagtccttgacgccactgcttgaaacttaaatggaacaccgagatcttctgctcgtttctcaagcatttgaccaatgattttgaggccaccaaccgaacgctgaactgactcggggtcatcaacaccagttaatctcaattggggaattttacctttcctactagcagcaattgtttgtattagagtcatgtattgactcccttggttaatgtcaaaatctacaatgtgaactgtcttttcatccttgaaagcttcgatgatagcgccattggcagccatgaatccaaatttaaaacaagggcacacctcgaataggatctgcattgctgcaagacggtcagaagtgggcggttctttacacttcaaggccttgtaaagaaactttcccgaggaagccacccgagcagcgagcccttccaccatgtaagcagcaatcctctgagatggctctccttcaactgacaccatctgccgaagctgattgatcatgaccgaagcttctcctatgtttccttccgaaagaagagcagcacaatcgataagtaactgcctaggagaccgatgagaaacttgcgatatttctttgttgctgctgctgatactgctcagataagaataatcagacgacgaagactccttgggcgaatcattaagcaatccactctgaacaggaccaacccaatcaacatcaacttccatgtcttcatctccatcattatcatcatcattatcattaaggagtactctctccaattcttgaagcttcaacctcattgtgcttttgtcaaagtcaccaagttcaggacttgaactttccaagtaatctgactcaaaatccccaatggacatgaaagaagcatcacaaggattattatgagtggtcaaatgagaaaccgatgatccagctcgaggctggtaacacgaggcatcttgagggttgtaagaattcccagaagcactagaacaagagggctgttgtatctcatcacttggggaatcaagaaagtacttctcatagctctcattgctgtaggaatcggttacatacaaggttttacgcttttcggaaccaaaggtttgggttgagaaagcagagctatcagtactacttcccttcaatgagtaaagcttggggtttctatatgaagtagcagatagctctgcaggcctaactaaagacattcttcttatgtttctttcttattttttgtttctatttcagagttttcggaagaccaattctaccataaaaaaccttcaattctgtgtcaccaacaaactataacacatgttaagaaaggaaattactctgcttaacttattacaagacaagtaaggaacaataataatgttgaagctagaaaaagaaacttactgaaactttgcttgagtcgttaagagaagagttcctgcagctaaaccagaaaaacaaaagaacacaaggattataacaagaaataaacatgcatgattattattataataacatcaatataaagtattttgttgaatcaaactagtttgttgttacgctaatatttaactaactgtgtaagatatgattagacaattatgctgaacataattataaataacaagctttgataaatctatagaaatatttacaaagaatttcattaatcacactttaattatgaataaagtgctgaaatttcaaaccccttcttatttctcacaaaaaccctttttttgcctagactgaaagcagagaaaatcattgacttttgacgataggaaaatcaacaaaatcagggaaaacaggacttgaaattaagaaggttgcccagaaaaatcatggaccaaccaacagagtacatacaccataacatgcagaacaacacagcatcaagagagagagacagagaagaaaagaaacaaaatattacctggtagaatagagaaaggttcaagcagaagcagaagaaaagctcaaaaacccagtaagaatctgaaattgagaagaaacccagatagagatcaacataccagaaagaaagagagttgttttcaagagaggaaaagaaagagagaaaaaggcttaggctttgacatcaatataggacaagaaagagaacccaaaagataaaacacatccttgttattttttatatatatatatatatatatatagtatattttataaagaaattgtggaggttaggtaatgttgaaaagaaagaaagcacttatcaaaccagaagatgatgaagtaagactacaacaacaaactaaaaaatattaaaagactgaactttaccaaaaaaaaaaaccaagaggacccaaattcttgaattattaaattccaagaaatcttgttactcttgcaatgttggttttattctttttctttttcttttgaggatttcgagctaactcctttctttaaagaatttgaagcaaatcaaatattcaaagacttttcatttaaatgcttaagaccccatttctcttctggaatctgactaagtatacaaaattaaataagaaaaagaaaaaacttgtacccaatgtttggtttcaaagaaacttcctaagctaaatcaaaatttcttcgttattttctctcttctcccatatgcccaatttgcttaagtttcaccttttattttttggcgtgttctttttataatggtctgcatgtttataccaacctggtctaactacaattaatagaaaaaaaaaaaaaacaaaaacaaaaacaaaaggaagtttgactggtactagaagagataatctatgtttatctcgaaattatatgtagagatatatttaattatttgtttatttattattacgtagctagtatgtcaagtgtccagttttacctgccaaacttaactgtaaatttttatttatctttaccgttgatagtgtttcaatgtagtgattcagggatcatggacctataattctaaactccaataaacgagattatttattgagccttattaaccaaataatcccttatttattaattctatgattactctactataaatatagaattgcactcttagtaattataaaattatatttattgagtttaactgcagtgttcattgatataatcaattcgagtggttagccctccatgtgttggttcattattagttttggtcaaaatactattttacctttctaattatttttttatcatttagttccattaattcactagcaaagtataattcaagatctcatctgaatttgtgcacaatattcaagtttcagaaataacacttaaaggaaaccaacatttgatctgttaggaaagttaggattccataattgtacatcacgtttccaattattaaatttccaaaacataagttgtaagaatcatcttctttgagaaactttaacgagtgaatcaaaaaaaactaatagcatgagtaagagttcatgataactcaggatttaggctgatctattattgatcattgttatgatatgaattaggtctttatgataaatggcatgttaataaagacagttttattcatatcggtccttgtctcactacattcgtaatctgaaccaagattacttacaccgaagaatgggcactagtgaaccttactagaaatcattaattaaaaatttcataactttaatatgttactgactgttttattcatagctaagtggtcttagttttttgtacagctacaaaccacaacatcatatatgaataaataatttttcgatatttaatataaattattcaataataaatattaataacttaacatttacacatatattaaatgtttaactctttatttaataatcagaaatatctttacagacttttcagggcatatcctaacaattatatcgtaaaatattgactttttgggttttctgttaggcccaatataggtctgatggtactatatgggtattttatcacttgtgaattttttaagttttcacgttaaagtttgatataggtctgatggttaatattgagtatttatgggttttgaataaataagacatcagaccaccatcggacccatataggatggcatcaaacctcctattttttccaaaaaaaaaaaaattgtgcagtaagttcaaaagttgctcatgccacaaaccatagtataatgtttaacaaagatcaacaaaaattaaacaagaatacataaaatacgaaatcaacaagaatttttaacctcagtacttgcaagaatttttgttttgccccttaccactacaattgctacaatttcgtcatatcacaatcttttcaccattacaaggagttcaatttgacttaattcttccaaccttttgcttcttcggtcgccctactagtttcttctcaacaagcactccaactgtcatgttctttatgtcatcaagtaattcccaatcattatcgtcaccaactggtataattgtgtcttcatatgtgctcctccaatattctgttgtgtaatatggcgagcatagtgcgtatacactaacacttcgttgctaagctccagcacatgcattaagacaagttaaactttttttatttataaatggtgaaccgtttggggatccaggtaaccagttggggtgatttttgagcaccccaatttttacgttttctcgatatttatggtattgccatattgttcactaataggaaaacttctgattttgagtttgtccttgaaagtattttagcgagacacttactaattttacgttattgtgatttagagccttcgtcgagcagtatagttttcactcaagttgactgacacacctaattatgaaagtatggtaagattaatataacaaatatatatatgtacatgcttagcatacgtgttttaagaaatacgaatcagttctaccaacactagtacttttaggatattgagtgcatgtagtattatggttggttgtgcttttagggagcacgaactggtgctaccaacactagtactttcggggtactgagtgcatgtggtattatggatagttatacatatagtatggattaatgctactaacactagtactttcgggtgctgagtacatgtggtattatggtcaatcgtactatagtcacgaacattcgtgactcgtacgcattggacgcaggtttaagactttgtaattaggtgtatgggtgcctagttacaaatatgtttatattttatacttttcttacagagtctgtcaactcacagatatgtttcccctgtgtaggtaagggcaaggtaaaatctaaacagcagtgagtctagatctcaatgaagattgtgcatatctagatggttagacctggagtgtctagatctttgggatagcatgggctcagtttgttagtcgttgggtaacacttttaatatactattttgtaaacctttgaaaaataaattcgggattcgaagtttgtaaacttcatatatttatataattattaatatttatgtttattgtagaagtttttgttaaacacgattttacacttaatcctttgattagtaaaggttaacactgtaatttagaaaatacagggacgtgcctaaactagtaaggcgttacaatagtattctcagtgacggtatcgtgaggttcaattggaggtcatttcctcttcctttttgtctcacttttcttggaacggccaggttgttgtttcatcggatgaaggcaattttcttgctcattgtctggttggtttttttgggttccttttctctatttctttggtggtctgcatgtccgtcgaagtcgtgccaagttagggatggctacttcaaatttgttgaatgccctagcttccgatttctttctaatctatacaatgggtgggagaccagttgattggtggatcttactccccttggatttgtagatctattacgagttcggtggggagtggtgtctgagtgtgttttgtgcggctgttgtggtggagttttgagatagagggttggtctaggtttattatcagtgttgagtgggtgggcgatgagttgggtttgctgggctcttttttgtgcggtggtgtttcactttttattgttttatttttcattatttggtttaattttgtggttactttattttttctaataagggtaaatattcaccaccctattagattaatagggtttgttattttcctggtgagagatgctagttttgtttcttattagtttgttggtgtatcattaatatggatccaaatcacttcggcaaggatgtcttgatctctatctttgagcgttagatctgggagatcttcagatttttattggccaactgtgcttcaatctttcttgatagagcatttcaatacggttggacatgttatttctcttatttataatttaaataacgagattattatgtcttaaattttgttagaaagatcattagctcataatcatatgtggattttgttatgggctcatttgatttgaaaatttagtatatttcatatttttttgatgcttgaccgtattttattgtaaatgatttagtatgcttattcttaataaatttgttctttgaactttacgtaatcgactttcttctatttacctattaatgcatattttcattttctaaaaaaaatcaacttaatcttgattaatacacactagttgatataatattttaatgataaataactatttgtttaatgataatattttaatttattagtcataataagggtaaataagatgtatttttcttttttctttcgacagatcggattatttctttcaatttaaacacacccttttataatatttgattgacatcaatagttcttagtcaagcattgtcatttggcactaataacctcagcatctctattctcttaagaaaaattaaattagtggtataaagttatattttagtatttttaaaaaaattagtttttaaaatagtgtgttaaatttgacacataataaatataaacttttttctctaaaaaataaatgtagttgttctttttaattatcatcatttatcattaatgaatcatggtatactaaacactttttaattacaatattatcaataattatttttcaaatatttaatttataaatgatcattaatattattttacttttttattttaatttgtattttaaaatgttattgtgcattagagtacaataacaaatattgtagtaaatatactattgattttatttttattgttaaatttagcataaattatataccatgcattagagaccgtcgtataaatgactaataatattctatagtattaaaataaattatgtataattggatatataatttcaccaataaaataaattagatggtgcaatcccaaataatatttttataatatatatttatatagggtgtagggtgggaagtgaggtggaagaggatgagtgaatagaatagaataatagaagagagtagtagtggattagtggggctgataattagatcatgaaatgaaatgaaatgagaagagagcatgggaattgtagctatatacatctcactctcatcactaaattatatatacacacaaagtcaaagcttcaatagttctcttttccattttcttcatttcattttgactatttcttttgctttgttaattttggatcgatagccgtgtttgttatagtttcattttttaaaagcgtgtacactttcatcaatagtggaaaatattggaccaattatttatgcatgaaaacaaaaaatcaattactaattatcatttaaatagttaaacaaaacaatattcatatcattacttggattagtcttttttaatcattacaccctacattacatggagaaaacaaaatacaacattttttttactttataattagttggcctaactgaaagaaaatttaccaacaatatgtaaatatatatttactaaaagaaatctttttttttttctttgtaattaatgggtctccagtagaattcaagtttactatagggtaaatattattttagattttatgttttgtcaaaagttaccaattagatcttctcactacaaaaaattgctacttttgatgacaattttttagtcacaatataaattttttgtgactaaatatgacttttagtctcaacaaaaaattatttgtgactaaaacatatcatttaaacacaagctgtcactaatttagttttagtcacaacaagtattgtgactaaaaatgagtaatttgtggcataacctccttaagtgatcagatttttgcaactaacccaaaattctaaaatttttgtggtaaaaccccataaattcgtgttctattagcagtttaatatttccattcatttttagctgttaactgtcatggtggaatgtctacgtggacacaatgtacacgtgacacaattttattggtccacgtaaataaatattttaaaaaaataaaaaaaattaaataatttaaaaaaaaaaaaataaaaaaaaattctttttctttaaaaattaaaaaatttaaaattaaaaaaacaattttaaaaaaataaaaattaaaaaaaaacccctaccttaatcaaacccatttctctcaccctctctgtggttcttcttcttcttctcctaaaacctctggttcttcttccccttcttcctccttaatcaaacccattttagttttgtcgaaattgaaatctccatcttcaatggtttctccaatagtcacagtcatctgcaacgcttctttatccgaacccacatctttcaaatcctgaaattcgttgaaaatcgaaaacgagggctccatacgaaccattgactagcaatttcgaaacccaaattttgtttccctttctgggcttcgtttccctttcattccaacaattttttttcttcattattttctatttttcttcttcttcatattcttcatataatcggcatccaccaccaccaacatccaccgaaaccaccacttcatcttcttcatctatttttcttcttcttcatct

SEQ ID NO: 294883 - DNA, 2966 bp, Cannabis indica
aaaggtaacaccaggcttccaccggaggtcaatcgagttctctacgtgagaaatcttccattcaacatctccagcgaagagatgtacgacattttcggcaagtacggagccatacgccaaatccgaatcggtaccaacaaggacactcgcggcactgctttcgttgtctacgaagatatctacgatgccaagactgccgtcgaccacctctccggcttcaatgtcgctaatcgttacctcatcgtgctttattaccagcaagctaagatgagcaaaaagttcgatcagaagaagaaggaggaagagattgctaggatgcaagagaagtatggcgtctctactaaagattagattagcaaaccagtaatttctctgaatgtaatcatatgattaaatctaggggtttagtggatttgttatgctttttctaatgatatgtgaagaacgaaattatgctctgttagagcagtttttttcaatctttcatacatatataatctctacttaaaaactcttactttatgtttgataaaattgatacttactgcaattatttcaaccttgagaggattgttgatccttggctcttgcaaagttgcaattcattcatttcttcatcgttatctaggtgttctttgcagccttgcaggtgtttgtatctgcaattggacatatacttgcaaaggtttgaaggtttggttgatttaaatttattgatattcttggataataatgagtgtgtgtgtgtgtatgtatatatatatgttttgtagaagagtgtgaatctgtttgtgacctttaaattgatatgtacaaaggattttctatgtacacttgggattctaattatattggtttggctcttgttcattatctgttatagacttagagagttaattagaggggttatgataaagtgtggcttggggtatatagaatatattataggcagagggaattcatttgtggggtgtggaattattttgtaattgcagggattctttagaattcattgggaggcttaaggaatcctcgaattgtatattccatgtttgagtatcaatagagaaggcttaatagccattttctgatatgagttctgatacacacttgtgcacaattcagtagtttattggtaagagcaagaacaaatacaaaatcccaagttattcgagaaacttggtgaactccctgagtgatatattactataagtatttcacacaaaaattcactacctcttagaagactaactctcagtatttataggctagactatcctaactaggcaaccaaattagaagacacaaatttagaatcactgaacacaggcactaaggacttgagttatactgccgagactaatattaaggcgtaacaagttcctatcatattcattttatctctggatttgaagtttatatgtgctttggagacctcatttcgtccattgtcgaattttgatacatggttgtggctttggattgttgatgctgatccacttgatggaataaagctatgtggggtttaaagtttttgtttagatataagttttcttgtgaaatttataggtataagtttactaattcaaatcttttatttcacttgattttctatgctcttgaccttactttgacattagcttgtggttttaatcataagggctctgtacattaatttgattttcaacccaaatttctgttataaagagttttgtctgggtgtttaaacacggttaagttgtgttgtttgacatagactatggcgagtcttaatgattacaagttacaacctcaaattaatttgacataaacttgctggaggttttcaaggagaacttgtttgcaggagcctctgagatggttccaggacagtgcccgtgagataggtttgttggaggctacatggattccgagaagctgtaacacagtagctaataagctagcaaaatgggctctgttgtttaaaaagaatggtgatcttactagtagattctcttttgtttgtcagttggttatgttgttgtttgttgcttcttttttcggactgtgttattgttttgggaatttttgagttctcttccttttggcttttaattccatcaaaaaagaaaagaaggagaacttgcaaggtgatttttcttacttcaaactcttacaatgtctcgatttaaattctttgaattgactgagttttgaacaggttgtagaggctgctgcagtgttagacgttttctggtaaatgaccccttccttgtctcaaccatcttaagaattgtcaagaatgtggttcattcgattaacttcttcacattttattgccttcatcgacacgatcaagggacaactagggttatcgaaaacaacatttgttctcaccgataataaggttgtcccgaaaagatgcctcaaaagagatatggaaaagaatttacaacactgcctttgctcaacttgttcattttgcttggtggaattaaaaaacttgattatgcaaattgttctttgtgggataataattttgatcaatttgcctatttatgaaactcgcttcatttaatgtgacaattgttgtattgttttggctttagatttatgcatgtttggtttccatgacatttattctaattgagactacaaaactttataataagaatagtcattagcacactaattgtgttcatacatcacttaatataaattacatattttatttctttgtttgatttattttgtgatgatgagtacaaaattatacataaccatactcatcatcaacatcaaataccatgcaaataagtctcatatagaataactctcccatctttcattgtaaccaatatatcagtctcatctttgcttttaattagggtgtaggtgtttttttttaaaaaaaaaattagaaaaatgaaagtattttaaagaaaattgttatacaaaattgttttcactaaattaaaaatgaaaat

SEQ ID NO: 294884 - DNA, 3474 bp, Cannabis indica
tttctgaactcaacatcatcccagtacgaagattggtcacttttgtcatattctacatcctgattggctccagagagacgcaatccttctgctctgatgatttcctgcacaacaaaatgcaagagtgttgtcttcccatcggcacccttgacatccacaagcttaagaagtgtgtcaagcttaaaggcatgggcatcgccacgattggtgccaacattcattcggtttccagttttgagcactgcttcgagaagcttcatgaacattcggctactcctcaattctccacaagcaacctgcggaaagaaagttatgttgttaaggatcttcaatggacaatgtaccatatatatcatgcaattcaatacaacataaagaaaacaactacctctaaagtttcgaaagacctcttaaggtattcgatttctgattcgaaattggcaatataaagcaatgcttccaccctcttgaatgcgaaagggatatccaagactgccttgagaaacttctcggctggaccaagcttgaatggggattcatctttgtactccctaagtttccattcttcctccttggttggagccatctttaataaactttcgagaagttccgtccccagtgcatcggcattacctgttagcaagtacatcaaggaatggtaaaggcgatcatgtaaaatataattaaagaagcaagtttgatttacaaacaaacattgtgtttaccttccagaagggcttcacacacttcatcaatggtgacatttaatgctctcagcaatattgcaatattctgagacttctttggatcaagaactcgattctcttgcactgaagatggaaaacactgtcgacgaccattgtctttaggcaacaaattcgaattattagccatgaacagtgtctcaatcatttcctcatttactctgcaaattaaaacaagaatcttaagagccaaaaggaaaaaagaaaaaacagaatcccccattaaagttacagctatgaacatctttagattctaagccataaaagaataagaagctttcacttaacaaccaaaaaataaagaaaaaataaaagtgttgggctttgttgtcttactgaaaagagcttgatttgagctgatcccacaccattgcccggtccgagcttgctctaactttatcccaatgtaaagctttcagctttggcttcgaactttcctcactccttttctccaaaccaactccattattctctgattcttcagcacctccaccagtggaaaccacctcagagttttggaacacatgccttgaaggcgtcactagaggcggaggccctcctctcatggccgccggagcttcccaaaatctcggtggaggaggaggtggaggcggcggtggcagctttacaggaacatattgccttctctggtccgaagcatcagatttccggcaaggtgaattctgggtattccctgaacctctttctgatcgcgaagataatgaagacaaagacggagaagacaacagaggtatcggaagtggtcgacatggggccgtgaaattcataactgaatcaggtgacttggatttgaagcttctagggctgaagttcgccggaggagaaagagtgttggatgcagtagtcgccggagaaccagacttggagcacgggtaagaaggagtcctggagttaaagcttctacttttaataaagttgtcgactttaaacccctgagtttctctctgagaactcgttccagcatggccaggactatcagtagaacccctcggcgaaaagaattcctcctcatcaacctcatcatcatcagaacccacttgagcctccttgtgggttcgtttgaaattgtatttgggaagtgggggcagtggattaagctccggcgagccaagtttctgatacggagaggcagagacgccgagtctcatagtggcattgctggaattagcagcagtttctgtgtcaacacctcctctggtagagttaacaagggtcccaaggtaaaggaactcagagctgttgttgggtgttgtcctagacttatggattccgtcggaggtagccgtgttgggcgggtaaagtcggaggctatctgttctagaagtcttatcatcagagctagtatgatgaagctttctgttccttcggtagtaaaggaaagcagcagcaatagcagaaatgagagcagcagagagtagtgagacagttacggcaatggcgaccccatgggtgtggtggtgtgaagtagtttggggaaggagaagagatgatatgttagccgggaaagaagtaagtgctgttggggaaggaggaggaggtggaggagggttcaggtaagatgggaagaaaggcttatctgaagggctggaggaagaagaagaagaagaagaagaagaatcaaaagggagcttgggttgttgttttggttgaggttgtggagaaaaggttggagcttgtgttggaggaagagggtcatcttctacaggtgggaaaaagggttggtggaggagatgccggcggtgatggttggaaggggaggaagagtgagtaatggtggtggtggtgagtggtaacaacagtaaaaggagaagaatatgcattgtggggtttgtggtgacagtaaagatgaaatgaagaaagctgaaagggtgtcggtgggtggtgatggttttggcctacatgttttatggttgtggttgtctttggtaaaagggtatcaccattgccattactatggactatggactctggtgtagtgagtctaatagggttggtgggtgttgagaagaagatatatgagcaaagagaatggtagttgttcagagttaaaacgaagcatccatcaaatcatctaacacaaaagaaagctaaagctttttgaagatgaaaaatgagaaagtgaaatgtaataataataatggttttttttttcttcacttggttctgccatttgcattattttcattcatttgaagcagagaaaaaattgaagaagaggtcaaaaatttctgacagacacagtagatttttgggatttgaacttttctttttatttttttcactttttcttaattagattctttactactaggttaggatggatgatcaatgtgagctgtttgcactatggatgggtgttgtaatcaaatgaaataaaatctttttgtatttatttttcatttttgcattgcattgcatgtcccaatatgatataagcttattactatttagttagagactgagttagtggtgatgcacagtgaaacaaatattagtggactcccccattccatcgatattcagccttttcctactctttgactcactcaacaccaataccagaaaataaaatatgtgttttagggttaattttttattacaatctctcaattaattttcatcttcaaaatatttttttaagaataattatctttttacccctgtacttatgacactatactattatgcc

SEQ ID NO: 294885 - DNA, 3395 bp, Cannabis indica
agctttgggttacatatcaagatgattagagatatggttggaatatgattctgtaaaacgtttcctatgttttattcactgcagtggtgatttaacagagttaaaaagattttaatattaattttctctcttctctcaaatagtaaaattctatctttcttgttttcagtgtatgaattagactttttaaagagtgttgtaatcaaacaaggaccttttcttgttaaatttttaccttaaatacaaactttacactcggggttatgtttaaaatagctatctgtaattggtcaatgcttcctgcagttaattattttatttatattttctatacttttctgccctgtttgagagagtaacggttggcatattctttgctttaataagcctcttgtcgattgtaaacttcttttaatgttctaatggacctgttcaatctttttgtttaataggaatggtagatcacttatttgtctctattactttctttgatagtatcacttatttgtttttataataaaacagggtgtgaaccaaggactgaaaaatagggcccttgttcttggaacttcatcactgaaccttgcagattacgtttctatgaatgagggaaaggagtttgggctcaaaatacccctcaatgcccctggttgcacctctgagtctagtccctcagtgactgtaagttacagtgtctttttcgtttagattttactatctgttaagcttttccttatgtgtttgtctgatcgtaagttcatccacaatgcagctatctcttgtgctactagaattaggaactgctcaagacctttcagtgtcagtgcaaggaccaacatcacctcttcctacgtctccccgatctttggaaaatttctcaacaacaaaagatgagtattctgcttttaaggcaggtctgcgaaaggtgaaaacctttaaagaatatgtgtctgttggaagagctaaaaagacgcgtcatgaggaagatgggagtgatggcaggagctctattagaagtgaagatactgctagtgctagccattctccatttgacacagattcttttgatgatgatgctgggggagagacagaggagagtgaggatttcggtgtaaggcagtcggtcagttatgaaacactggctcttgcaaactgtgctcaagtatcattttattctaatactaatgtcagtagtgaagatgagtgtttgatctactatagtaaccgtaagcctgatatctatcgctcatgtatggaaagctctagtacaccagtctctgagcagatatcacagggtagttcaaagcgtagaatcctgccttggaagaagaggaaaatgagccttactcctaaagccaaaggagagcctcttttgaaaaagcattatggagaagagggtggggatgatattgattttgatcgcaggcagctgagctctgatgaatccagtttaggggtaaataacaactgtagcttgtcttttctttttgtagttcgtgtgctgtttttgctgtttgactttcaaaataacatgttcctaggattctgatatgtttatgacaacttttttgcagtggtatcaaacagaaggtggttctacaactagtcgatcatcattttctgaatttggggaggatacttttgctgtgggctgttgggagagcaaggaagtaactagccgtgatgggctaatgaagcttcaggcacaagtcttttttgcttcaattgatcaaagaagtgaacgtgctgcaggagagagtgcgtgcacagccctggttgctgtcattgctgattggttgcagtccaaccaagatgaaatgcccattaagtctgatttcaatagcttgattagagatggatcatcagaatggagaaatctttgtaagaacaaggaatacatagaacggttcccagacagacactttgatcttggacagtcctgcaagctaaagtccgcctctcacggttgttccagagaatctttatggtttctccatccaaggactcaaagaaggggaacttgacttccttaatggtgttatgtcctttgatagcatgtgggatgagatcagtcgcttggcatcagacttgccgtgcaacggtgaatcttcttccatctatatcataagctggaatgaccatttctttgtcctgaaggtagagcgtgacgcttactacataattgacactttgggtgagaggctttttgaggggtgtaatcaggcttatgttctgaaatttgataaagacacaatcattgaaagattacctcaagagaagaagcaattagatgaaaaaactggcagaggtaaagttgaaaagagacactcaaaaaactcaaaggaagctaaagttgaaaagagtcagccgaagagcctgaatgaggtggagaatgacaataaagttgaagttgaagttgtatgcagaggcaaagagtcatgtaaggaatatatcaagagcttcttggctgctattccaataagggaattgcaggttgatctccaaaagggtctaatggcatcaacgccgattcatcaccggttacagattgaatttcactacacggagttacaacatggcacagctgaatattctgtaaatgaagtcacagctgaagcaccagtaatatcaatgccaatgattgtagcatagggtggaccctttcactcattggtaaataattctgcattataatcctaattcctatgtttctcttgtccggttgtcttgaggaaattgagtcaatattgagaagcatatttttgagcaagtgtatagggcagctttcccatttctgtttgtgagaatgggaagaagtgtaagcctttcttactttttagtttaggtatatagcgtagtttggtttttgttaattggttctcttttgatgtggttttataacttaaactaaaaggtttctgatcgttaatttcttttaactcccataaccatgttccttaatttccttaaactccataaccatgtcatgaagagaaggtttcgtgttttactaaaattagctttcattgctgattttttttttttttttttttttgtcaactttggttctctttaactatttttttttacggtgcttaccttatgaaaatagaaaatagttgctgaactgaacttgtataattaaaagattactatcaataatatttatccaaactttctgattggttagggcaaagccaaaattaccacagctgtaaagctagtgttattgggtaggtaggaactatttcactatggggtcatagggttggagcttgtccaccatcagtttaccacagctgagaaacaagtttgacaaccccagacatcggagcatcattctgcagtcaaagcatacataaaattagaagttgcatctgacaattgtgtaccag

SEQ ID NO: 294886 - DNA, 1354 bp, Cannabis indica
tatatatatatattcatataaaattgtcaatatataattgtaacgaatcaaagcaaaagatatgaaatgaaagtatacgtatatcataattaagttcgtgaacagttacaaaaatatatgtatacatcatgacttgaggaaatacggaggaatacaaataaaataaatctaagagaactagcacacattagactttagcttcgaaatttttcagcaataaaaaataagtcaaggcataggcgtctcttataataaaaaaaaaatactctataacttggaaaaaatcgatatcatagggtacaatatgtatcctatgacttcggttatttaaagttatagggtattgcatttgcgcgtgcccaaataactgaaatcgtagggtacgcgcattattaaatgggctttggcttataaccctaatgaaaccctagccctaatatatattattctcaactctctatctctctttttaacttaacaaaatgattctctctctctcatcatttttagctccaccccacatcgaaggccaccaccgacggccccaaaccaccgtcaccgtcggtgagccatttctagcttccaagtttattttttttgtccttactaatttttttcttgtttgcaggtggttctcttggctgaatcgaatacacactctctctacagtatatatgtatcatttttcagaactgtggtgatttgtgttaatatcaaaaaatgttgtttggttaagttccatcttctttgagttaatatcattttggattgttatttccatatttgtgctctcagccaaatcacactatcgatctctatatccatgtcgtccatcagactaaaataaatatatacataaaaaaataaatttatggcttcggttatttgcaaataatcgaaatcataggacatttttgcttttagatatatatacatggacacttaaactgtaatagctagggagtgtaattattagaggattgactgtagtaattacactctattttaaaatataagatagtaattatttatgaattcttaatgttttgtttagcaaaatagttaataattacacaagaaataatattttttaatagttaattgatatgtatttaaaattgaaagtttttagtaattacaaagtacaattacacccaattctcatgggagtatgagaatttgacagtgtaattgaaacctcaatttcctccaattacacaaacgttacatacagtgttattaaaataaatttcttcatgcactgcctgttagactataatatagtatatgaaatatagcatatatataaacgatatgtaatgcagaaaaactataaacatatcgatattatata

SEQ ID NO: 294887 - DNA, 3118 bp, Cannabis indica
tttttttttagtttaattagagaaccctaaatctattgccctcgatttataagggtttttggaggtatgtattgcctttgatgacataacttaatgacaatagatttttttttcaggaattgatgacaatagaattgtaatatatatacatatataaatatatttgtatggggatgcttttcttgtgtttatggtactattttgagtgaagttgttcaatttactttgtagaggtagaattgtaacttaatgaaagttaagtaaaattgtctttgatgacatattttgatgaaagtagaattgtaatttatatatatataatataattttgcatggaggatgtttttcttgtgtttatggtattatttttagtgaagttgttcaatttactttgtaggggtagattggtgtaatataaaacgaaaatgagtggagcaggagagaaagggtcaacagccacaaaacgccagctgattttcttaaatcaattcggggacgacctgttgtcgtgaaactcaattctggagttgactacagaggtgtgtgttctttgttattattgtatttagatcccagagattatcctgaaggttattattttttttttgtcttcattgtttacatatatgtgggttgtgagactttgtgtgtgctttcttgttttaaattatctataatggctcagtagttttattctcaagagacatggagttgatttgaggccgtaactaatatcattagtttcatgatctcctattagtgacaaagtgtctatagtaaatattgtcaagaaatcaaagcatgacgcgacgaatggtcattttgtccataaaagttacacatttttattttttaaacctgggtaattttcatgtgcaggtatcctagcttgtctggatgggtatatgaatattgcaatggaacaaacagaggagtatgtcaatggtcaactgaaaaacaaatatggtgatgcatttattcgtggaaacaacggtaattttcaaaggattatttttctaaatactagtgttcaatttttacttaatactagtgttaaatttgcttagtaataataaaattttatttataattggcgcagttctgtacatcagtacatcaaagaggactttagcagatggggcttagtattgccatgttatcaagtggtgaatataatcttgtctcgagcttctcacaattgtattattatgcttttggattttggttaagaatgaactgaaactatcccaacctggactgaatagttagggttttgttatcaatgcaccatcatataaggtcagctatcatatacatcattccgaagagccgtgttttacgctatcattatgaatgagagtatcaaaagtctaggatgattatatatattttgttagatcatagatgaggatgaatattgtacattaaacttccatttcactaaatttcctcccttaaacatttcaagggtgaaaaaacttgcttaaaaaatttcggtgtgaaatgaatgatttaacagtgatctagaatagttgcactttctccccttacttattgaacttgctttaaaaagtagaaaacagaattacattgcagtttacgtttattgctgaatttttaataaatgacaggacttgctttgtttttgcatcttcacatttatgtttagggtgtataggtataggaggatagtatgtttgcatttccttgtcacaatgtttcggtttcattcaactgagtccaagtctagtattaggggtaggatagttcaaatctcttgtaagaaaattttgggggaaaaggacaagaatatagacttcaaatcttttgtttcgtttcttttctaccaaacattgagtccatttcgtccaccttcttttctttggctatgtagttatgacattaaaaattatagcttgctctctttaggtggacggttactttcatgaatcccggaagattgattcctcagcttcagatttgaagttctttttctagttggtcgtacctagcatcatctattttcccttttctgttttgacattgcatgttgtgttttaggccaaaaataaagcttgttgcttagcttaattgggaatattgactgcaagaacagaaatgcctacaactgaggccaaaagtgtacgatataaaattctattggcatgaaagaggaaaaaaactatacccaatcatgtcgaagatcgttggttttgcctaggattgctggtctaatttgtattgactattttctttatcttctttaaataggtgatatttatctttataaacttatgatttgatcgagtctactatggttcaagttcaacatggctttaatcttgaaaaacaatcatgaatgtagtattcgaaggtttgatcctaattaagaggttcgcataggtttaacgatatcattcagcaacgattttatttcatgtgaacttggtctaattttcaatgcaatacaagtgcttataaaagtgtcaacagtttctctaatccgtcttctctcgtgctcattaagtcattcattatgaagctgataataatattaataaaaagaaaaaaaataacaaaacaaaaagaactaggttaatttgaactcctactgttactacaacactagctagctttaaactaaataatccattcacattatgtttctaaaattggaacaaaaagaaagacacgagttcaatatttttacgaaaaaaaaaacaatttgaactattatgtggctttttaaatcacaagttttatgttcaagctttgagtagtaagtagtaatgaacttttattaaatttaatgatactaaataaaaattgaataaaaaacgctattttggttgtaaggaaagacacaagttattttagggctgttcatctgatccaattcgtattttattcgcactaagtgcggatttaattttttggatccaattcaattcgcacaatagctcaaatccaatccaatctaatccgcaaaagtacggattggatcggttactttggattggttactttttaatattaaattatttaatatttatgaatttttttttttcacataactagcaacaaaataaaataaatatagttattttatgtctccaac

SEQ ID NO: 294888 - DNA, 5012 bp, Cannabis indica
gttggacatgtactcataaatcaatagtttctcttctctatgaatgcaataaccaaatacttttacaagattacgatgttgaagcttagcaattagtttaatttcattttgaagctcattaactccttgtccagaccacattgataacctcttcacagcaatttcttgccctccttccaacattccctataatatcacaattaaaaaaaatgtccaagtagttatatactgcttaacaatcccacttgagagtgcatggatctgataacactttaacaatcacttgggtagaacttactccgaaaagctagcttaagaaaggagggtgcccaagtagttatacgctactaaccaatcccgtacttggtcaatatgggatcctaacaatactcttaacaatttcaaaagtaggtaaatgagagaggagcttactttgtatacaggtccaaaaccaccctctccaagcttattagcctctgaaaaattatcagttgcagtactaattgtatgtatatcgaacgatggaagctccaagtcttcatcttggtttttgtaacttctctcagaaatgtcattagtgacagtactaataattacatctctatctgcaatatgaaatcaagcaacttagtaaaaacatgtaaacaattgccatgaaatgcatttgaatttatgtttctataaaatgagttaagtatagagattgttagtatcttaatcttaccataaatgtgtctcctccaatgaatgaaacatccaattaaaataagcccaccagctaatccaacaaggataattgctataattatcactgttttcttcaccttaaccttatgattggttcttgttttttcataattatcttaaataaacaaaagcaaacaaacattattgggcaaattataaaaggaaattgttgatacaacattttcaatatgtaacatgtacctgtttctgaagccgaaattcgaatgtaaagaccttgtccactggattgaaaaccttgaatatcaaacaaatctccaaaccaaacaaggcagccacttccatttcctctgatatcggagtttgtataagccatacaagaacaattgctcaagcatttcgccctgcattcctctaaattcatactcttattcacccaagtgtattgagtatcaggcattttcaacccagaaactctaatgaactcatctttcactctatcaccacagctcaaaagaggtttatttctcacacaccctccttcagaccgattctcttcttcactcttcggcttaaagaaaccctttaagcattgacaaacttgattatttgtcacgacacattctgaattagctccacaaatcccatacttgtcacacttttcacttggaactgagccataacgccaccatgctctatctgattcaatccacatcattatttcgcgaacactcgttgtttgattcatgacaattcttgagatcactgagttatctttgatgttgtacatgtagtaaacttcaaaatcattgtatacaaacatgtgtttgagaagtggatccattgtcaagctaggacttccactaaaaccaatcccattccatggccctgttcgataaaatttcgaagaccctttacgagtgattagttgagggtatgtatcttgtgattcatcaagctcaataccaaaagtaaagtctccattacaaggatcatcccaactcttccacgacgataatcgcctatttagacctctcttcaagtcacatcccaatttcattccaggcatgattgtatcagtaggatgatcaaagctttcccacaaataattctctgtattctcatcattctcatctctcataaccaagttaccattttccaagagttgaaccaatggtttcatggcttgtttcgacgatgagttagtagaccaaaccaccttattcttattattatcctgtcctgaaaaaagcacaagatttcctgaattgtttatagtcaagaaaccagatgaatcattgatcggtttacatcggtttgcaacccaaacaacagtttgaactgagatatttttgtaccaaattccgagataacgattgtttgatgaagtattaggagtaaagaatcccagttcaaatcttccttctctggataccaaagttgtgttattatctctcaaaaaatctgaaggcctaatataataaacaacagcaaaagttgttctacatagaaaaagtctcaaaataacaacaacaaatatagccagaaaagaaaaggaccccattttatatcaaactttgtgatgatattagtacttataagtaaacatggcaatggaattaatggtattggggtagttttcaagacaacttgtttgtgagaaaaactcatatttgattgaatagtaatgttgaacatttaattaatttaaaactatacttttttttttttgtatatgatggaattcatcaataaaataagtgtaatggagtaaacaatgtgtgcaagttgactcccttgaccttgaaccaaaggtctacaattggagattctatttgtgagtttgtatagtatattttgaaactgaaattaccaaaaaaccacaccttgaagaagagaaagaagggcaagaaatggaatatgagttggttaattggttcataattagctttgaaattgtctaagtcttgcaaagaaagaaaatctctcaccagcccccattgacagattcatgaaagaaagaaaagtcactatgaaagaattggtgtgtttggtttggtaaagtggtgaattactgaatttgaggtctctccatttatatatacttcttttaggcaaactttaggtgaagtttggtaaaatgagtattttgtcaatatagtcattaagaaaactttacgagcaaaataactttccaagtaaaattcatttgcaaaataaccacatttggttacaaattttatacttttacattgttaatttgacaaatttccggaacaaaattatgggttaaattttctgggtttagttgcggactaagtcaatcattttaaaacgttttgcgagtctgtctaaagtgtgttgaacacttaccaaaagggtttgttcagatcatccttggaagagttgggagtgaaaaaatgggatcaaacttcagatctttttcgcagttatactattttcggatcattggttttgttgattttgagaatgtttggttataattacttggcttacacctattttaatggactcaaattacaatgaaacataactcatttcaacatagttgaattgggaatactaataatttctgtttagtatgcagatccatattttattttatgcctatttaacttgtttgtttacttgatgcatttggttatgcaattagtttagttgaaatagctccgcttatagtgtacattgttttgaattgagttgatgttgaagataactattgagtcaaatgtgggggtaagagcattcactaccacattcattccttccatgtactatggatttttccacaaacattcaagttgtctcttgtctaagacttttcaacaaataagatgtatgaaaactacccatataccattcaagctccattttttcgtctcacttaagttaagctgtccaacaccataagtaggtgatatatatcgctattggtacaattcaatataagaaattgttagccattcataagacttcatctctctcgtacttattatatgcaccgcgaaagcttaattgtcataattaaggtgcatcacattatttgcgtattggaggggattaaaagagtattcaataccacataaagtgactaagatttttcaaaatatgtctgaaaattacttacaccaatagcattaactcccataaggttgtgcctcttgacttatatcatcacataaaatggaaatggatcatattggcaccataatgaactagaaaattagtaatggaatttctttcttttctagttacctttgttgttttaaaccttcttctttttagaacaacttttgcagtggttaataccattagaccatccgaattcatgagagataacaacacagctttattggtatcaaaagaaggaaggtttgagttaggattctttactccaacaaccagttcatcaaagaatcgttatcttggaattcggtataacaacattcgaggcgatcaaactgttgtttggcttgcaaaccgatgttaaccgatcaaagattcatctggctcattgactatagacagcacaggcaatcttgtacttttcacaagacagaataataagaggaaactagtttggtcaacaaactcgtcgaaacaagcccaaaaaccatttgttcaactcttggataatggtaacttggtttaacttggttttgagagatgagaatacaacaaactatttatgggaaagctttgattatcctactgatacaatcctacccgggatgaaattaggatgggacttgaggagaggtctaaataggcgattatcgtcgtggaagagctctgatgatccttgtcatggagatttcacttatgggattgagcttgatgaaccaaaccatacatatcctcaactatttatccgttatggaacaacaaaattctttcgagaagggccatggaatgcgataagtttcagtggaacttctaataacaaatcaatttcttggcatgattctgattaccaatttgtgcacaacaatgaagaagtttacttctcttacaatgtcaaaaaaaactcaaacatatcaagaattgtgttgggtgaaagagtacttgaatacaaagaatggttagaagaaaaacaagtatggaattcttattacactcttccaggtgaccaatgtgactactatggtacatgtggagctaattcacaatgtctcttaaatgaagtacatactatgttttgcaaatgtttggaaggttttaagccaaagaatcaagaaaattggaacgcaatgaattggtcagaagcagtgacgaagccagaaatt

SEQ ID NO: 294889 - DNA, 2124 bp, Cannabis indica
acaaaaataaaaacagaggattatgctctctaatctctaggatcctagtatgcattataactggtcataataattatagtctttacagttcaaaacatttgaatcatgcttcaagtaacacaacctattgttaagaatttcctactttgtatcatgttcaaagaatgaataaaaaagaagtattttgattaattataactctgctacataagcttgttctttgtgtttcaacaaattcaaaatacagaaagaatacctgatccaaacaaaaacacattcagaaaggaaatcccaagttgcagtttttcttcgaggtcactgccaaacgcttaatctctttcgcgtttatgtaaaactcgatcaattcatcggcaacttccttaggctgacaattcacaaatgccttgagaaatctcttctctgtcatccttaatgctctcaacatgtcacaccctttgatatgcaattccaaagccatgtctttcatcttctctgcgagaagaaaccgaggtttcaaaacagcttcgaggttacaatacaacaagttcgggtgatcgaggacacttgaagccggaaacttcattgttcctaatataaaagtcatgtttctttgaactttatcaactgataatgtcaacaaaagaggtgaccttcccaaaagccgaaaaacctcttcttcactaaacccgaatttctcaaaatttgcaatcttactacgaatggtttcgaggcgagaaacaccaatgagtgtgacaatgtacttgtacatcttagacttgtgggaaatcccagttttgtgtatgtattccatcttctcatcgttaaatgaagttcgcgggatcaaggtcggtcggagtagaagcattgcagtcaaatccttcttgcttaatcccatttcttcatacaattctatagttggtttgattttgttctgaaaatcataagtaagcaaagaagggttcctaacaatggctttgataagtacttcattcgattcaaacaacgacattagataccgaagacgctcatcgaaacaacgattaatacgacaactaagaaatctaggacgacagttaatgatcttaacaagttcagaagcagtaattcccaaaccactcaaaagactaagctttgactgaagttgaacaagatcagcattctttaaagaaggtcttctaataaatatcttagatacatcatcttcattacaaccccaactcctcaaaacctcaccagaaccctttgaatggtcctcaccttcatttttaacattctctgtttcagcttgacaattcgtcgaacagttggtggtcgagcaaaatacacgtttttcagacactaatctctgcgaataagagatcaaatatggaaaattgttcgtaatagaactaaccttaacgaaaaaccaagcccagatttcatagtcgagctttttcacaatgttgagagttgttcgtatagcaataaaaaagattcgaaccttttcaactacgagtagttaacatccaaaatggtgaaatgggttcgtctgaaatcgaagttgaatcgtgttggaattgtcttcatcggcatagacttagtttcactgaaaaatttgaagcgccaaggtccaagctttatgaaaaggtttcacttttgatgactgtgtaatgggtgaagaaaaagagaatatcgtgtggaattgttgcaagagaaaggtgagaaattacgagaccatgtgagtgagtgaatgagactgagagtagttggtatggaaggagatcagagttgagtgttttaacgaagaagaagatccaaaccaatcgtgatattggctatctgagttgagtttatttctctcttaaaacaaattaactctcacttataaaaaacggtaataataaattataattttaaaacttacctaattgttaagtatgaattaaattgaaaccacaatctctaattggtccaagacattaaatttttactttttaaaaaaaaaataatttaaatatgctaataaaaaaaatgacatgggaatatgacttaacatttaattgtcagatacctacagaattctaaaagggtaatttacgtcaaaatctcctaaagtggacaggtttttacaactaaccccctaat

SEQ ID NO: 294890 - DNA, 5866 bp, Cannabis indica
atttaacaaaacacagggttcaatcaataacttttgtaaaacacagggtccaaaatggtatttaccctgtaaactttggtcgttaaaaatatctcctgaattattgagattattagatttaaagacttttgtctaattttaataaaaaaatttaacatgaatgacagacaaaaattctaattaacctattgaaaataaattggacaaattattttgattgcccatttatattgaggttgatcaaaattcaaaactcaaaagttcggcttgggcccaaattccaacagtgaataataaggcaaggcaaaggtacctttgaggcgcgaccgaagaatcgatcgaacgcgactgtggaaatggaagtggaggttgaccatagcgagctcaaggcggctggagccgagcttctgactgaaggacgtcatggcatccgtatccatggttgggaggtcgagtctcgcaattgctccattctcacctcttccacctttgaacagtaaccacttcttttattcacttttttcttttttgggtttctagtatgattagacttgttcgaatagaaaacaaaattgtgaccaaatttgtacttagagagtaacacataacagattgaattggtttaggggtgcactcttcaaactgctttattgaatttactgaataatgtttagtcttttgtgtattatgctaatcatatggatgtataaatatgtatgagtctatgtaatggcggattgatggggttgcaggtggggagaaaagcttcagacatcccatttgccagaaatgatatttggggacagttgtttggttcttaagcacaatcctagtggcactaaaattcattttaatgcgtttgatgctctactgggatggaaacaggaagctctgccgcctgtggaagttccggccgctgaaaaatggaaattccgcaggtaagcaacaaatgtgtatgcattaccttagtgaaactgaagaatgtttatcatgattagttttacagactaaaatgtaccacgttactgtgttgaatttactgaaagtgatattattctctagcatgataaaaaataggctttcttaagtcgctttaatgtttgtattttcatcttcttatatcaacatgagtttaaaagtccatctttgtggtgaagagagtgcgctgcttgttcatgtattaaaacaaagccaaatccacggttttaacatattttgttcttgcttaggtgctcaaaattctccatttgttcggtccaaatactacacatgagtggcccaattaataatgtgcattgtaggaaatttgtttaagaaatgactttgtccaccctaggtcataacgaaattgcgtgttttgaacttctaaatcaaattgttcttttatttcccacttattagaggagatattttattaagttgcatgatattccctttccgaaatgcagcaaaccatcccaacaggtcattttggattatgattacacttttacaacaccttatcgtggaagtgaaacaattgagattgatgcaaccgaggtgtgtggttcctctttctctctaaatttgctgggtaaaattgctgttctagagtgatttaacacatcataatcagttctttgagaatctcaaaattgtggtgtgtgtgaccaccatttttatttttggtttgatcagttcactttctcccatattatcaatttgtatggtcctatacataaactagcattataaatgaatcagttcttaaatgaaaattaaatgataaaaagtgttccattttctcagcaagaaagagaggattcctctgagggaacctacaatctccagtgggaggagagcaaggagaaaattgatatggctgcactggcacccaaagagcctattctcttctatgatgaggtcagcatctatggataataaagtattattatatagatgcgtgttttcctctatgcgtatatgtgtttttgttttcctgctgtgtatttacagcccttgagcaagtgttttttgtaactgcacaggtaatattgtatgaagatgaacttgcagataatggggtgtcgcttctaactgttaaagtggtataatatcaatctctgattctttttggctgatcttgtctttcttgtttcactcatgaacaatcctactattattgatgactgactgagtcatcctttgattctccagagagtcatgccaagttcttggtttcttctattgcgctattgggtgagttagttccctttaacaacaatattgcctttgacttcttttaggaaaatgccattaatatatacatgcacaagcgggtgtgtgcgtaaacacatcataattatttaacttgagatcattcagccgataatagctaacaatgaactatttagaagagtagaagtaaaagggtagataatagtggacatattttgaaaccaaagcaatgtacggaatttctctcttcaaatttaatttttatctatttgctgactagaaacactttctgtctgattcctagctctgttggttacatttttcttacagctcagagttgatggagtgcttatgagactaagagacactcgaatgcattgtgtatttggtgacaattcaaatccaactattcttcgagaaagctgctggagagaagctacatttcaatctttatctgcagtaagtttttatgtgcttgctgcatatgctataaattgatcctctgatctctcatcaaggatgaaagttcttttttcatcctcctgtttctgaagtactaatacatgtttggctttaatttatgaaatatcactcagatatataacgaagctattgtttcaaaacagaaattcttcttacatacaaatgtaatgtttgcttcctactgcccaccgttttggacttttgaacattcaattatttacttattttttgctggagtaaactttcatttgattgtatatataaataaacacattatataacatcaaaatttattgttcattgaattttcaattgtttcctgtttcattaattggctaatcccattgtgcagaaaggatacccttctgattctgctgcttacagtgaccccagtgccatcagccagagactacccattgtcatgcacaagtctgaagtgcttaaagtccccggtaacctctagagctgtaaaaattatatgcacggaagattgttgaatttagtctttcattgtggttctggttgatgttaaacttatttatttacgaaaagaaaaattggcatacattttcttgtaacttcaagtttccatctatagtgtttttttacccagaaatatttctcaattagttcagggtagggaaataaataaacttaccgaatatgtggtctcagaggtgatcttctttcagaaacaattgtaggaactgaaagctaaatcatgaggcatgacaccctctttttggtgaaagagttagaagcattagatcaatgtgtgatattgttatttatagttatatttttgcttcagcttgagcattattgaactctggcagtggcatgatagatagaaaggataacaaagttcagaaatcttgtgttttgggaccgtgttggtgatacggtggtataactcctacggctacagaccatttatttatgttcttaatgtttccaatttccttggaagtttgcaaatgcaaatactcatttctttcaagaatgaggtaggtaggtaggtgctttgactaaccttgaagtgaaattatgaagtctgtgggagaaagtttcatgtacgctgaaagacgggaaatagttcccggaataaaaaagaagaaagaatcaagaatgctttgatttatgattctttcttccttgggtgaaggaatttattgtcattgaaagttaaagtggtccaaaaatgactacattttttgagtgggaagtacaactgtacagctacacgcaatttcgttcgtttcctatgcaggaaaaagaaaaaaaaaattgtttctatgattggccttgtgacttgaatctatctcaaggtttatagaaagtaatttttaaaaggagaaaggtttagtctcaaatcttatgatgatgaagagtacaattactgacgattgaattattaacaaaagacaaaaacataaattaattgggttcaatggaataactccaaaatcagtgtcataagcatataatattgcactggatttattattccatgcacagtgggatccaaactaaacaccaacagaaattgaaaataggcttttggactttttcagttgggtgtttctatagtttgtaggtactattacaggcacaaagagtaagaactaacttccatcttggtactactgccttcttctcacagtaggctaggttcttctctacctaaatacgttagttttgtacttggtaaatgaacaaaaacatcaccttgatcctcttacagaagaacaaacttgcatagaatagtggaagtttgatgttcatacatatatgtaaatatatatatctatataatcagagtcgcaggtttaaatcgagcttgagaggctctatcttgggctctgctgctacctgttgatgatccatccggaagcttcctggccatatcaaatccatggcatcatcaagcggaaatggagaagtccaaaccattccaaggccaggagtagcttcttcatcaaatctggctgcaactgaagttccaagcctactgttgcagccccgcttgtggactaacgaatgggggtgaacgccgagtgacctgatcatagaagtagtagaggtgttgaagggcatcaagctcatcatggacatcatcgacctgtgagagtactgatatcttctggctgcacctctctctcttttgtgggcgttttggtggccccctaatgcctgggagctgtaaaactttctcatgcagaagttacaagaaaataccttgccagaaggagcagactgtcttggttgttgtagctgatctgagtctccagctatagtattaatattgctactgctactgctactactagtactattaagactcaaattcagccactccccgggatgatgattgccgttgttgtagtcctcgtcttcaccagtttcatcgagattaacaacatctgtaagtaataattcttcagtttgctgtctattatgatcatcaattacttcttctagggaaatcatttttctttctgtttggtttcctaaaaaatctcaatttattacatggaggggtcaaggtaggagctgcatgggatggttatgactgatgagtgatgaccatgaagggttataataagttcaaaagtgaatgagagaagaaactagtagagagagagagaaagagagagagataaaaagtatgcatattagaatgtggaagaagtgagaaatatgacttgtttttttgttcttcagttcaactcatctcaacatactgaccccactcagtgggggttgattgcttggtgcacctagggacaatacttacgtcatcatactattgcacatagtaaagcttgggattctccacttttattctatcatactccttttcctatcttttctctttcttttttatgttttacaagttgatgcccaacccaactcaacccaactttacattgcttctctagttcattagccaaagaagtacaaggccgctgaggtgaacaaagaacaatcgtgttaaaattcctagcagtagtcacaatcgttgtcttatcacttactttaggtgcatgacatgattactttcctatacacacatatatacccaaaaacaaaagaaaaatgctctttgatgatacaatcttactgaaagcaaagaaaaatactagtaattatccttttgattcaa

SEQ ID NO: 294891 - DNA, 4203 bp, Cannabis indica
tttttttttttttttttttaactctattagccatatttttattttgcttaattagtgtggtcccttagagagtgggtactactcccccacactctattgttattattgtcctatccttacagaaataagggaatcgtttttctaggggtactttaacgcatatcccggaagaaaagaatctctcaaataacaacatcaaatatcgtatagtaaattaaaaacaaacaacaataaaaaggttcatggtaaacaaaagctgtaatattatataccaaaaacgtacaaaaacaaaatgactagagcagaacaaatatatatatatatatatcataacaaacagccaaagcatacccaaacaaataccactttttttctgtgccatgtatatatatattattctttcaaacaaatttgttatattaatgccctatttgaaaattaattaaagactgcgtgtggtgtggttatatattacaaatttggaagaaagggataaaaagaagcttctatatatgaattctagtacaattagtagctaaatagtaaaaagagctcgattgaaccagcttcttcttacaatattgcatatatagataaaattaaaagaaactgtacaaacgacaaagtaagaaacagtacccaattctccaaagcaagtaatgtcgtatgcccatttcagtcctaccctatgtcattttagcttaatttccttacccaatatcctatttgtttttgttttaattcttctaaggctttaaacaaacccactggtaccgaccatccaagggcgtatccttcacaacatcaaagttgtacctgcaaggcaacggaaaatgggaaagttgttagttagttagagaaagagggctgattccacttactgctaaaatgcgcatgtggtgtaggatagtacaatttacacagctgcttatcctacgcctactactaaaaaaaaagtgtactcacttttctgtaaagcgcttttgctcagtcttctcggctatggcgaagaattcctcgatctcgttcctcggaggtgttatacccgacggtgtccttctcctgatgttaacagctaacgctaacgcttctgcttcctctgctgattctccgcacagctcgcttgacggcgtagtttccctgctgatattgaatagagagagaaaaatcattattaatggaaccaaaaatatactataaggattaatcgattagagaagaaagttaattagtaatatatacctgaatttgttgctgttgttattcatagggatagagtctgtggtttcaaaactcttgactccatcaacctgtaacattaattttcccgttcagatatttcgaatgaaattcaaattcgaatttcatgttttcattactagctaaacacacatttattacgaaagaagtttatatagaacttttcaaagaaaacggagattttcgtgttgcatgaaaaaagtacaagagaataaataaataatatacataacaataaatgattatgcatagagtctagattttctatttcgttgattgctgctatttttcatccaaaacaagaacattcgaacgctagttttctcgtgatttttcttcccagccaaacagcaaataacatatagacaaaaaaaaaaagataatgaaaatttataaactgaagcagacctgcagatctacgagtcgcaagcttctgtcgttaacgacctggtcactactcgtttcattgctgaagcagttagacggcggcggcgacggccaatccgtggaaaacatggagcaggtaccaccagtggcggcggagataaccacgccattgttgagcattttcggcgaagaattctccgttaaagtaccgagtccgagttcatcattggtagtagaagaggaagactgtcgtcgaagctgctggttggaggagctaactacaattttccttctcttggccatagctatggcagagcttgaagattccatgaaagaaatggttgcatttcgtttacagtctcccatttgggttttctctctctaaaagctctctttgtttttgtagagagagaaaaaaatgagaaaagttggagatccgagaggtatatatgttgatgaatgaatgaagaagagaataggtaaaattaatagatggctatgatttcaattaaaattaaaaaaataataataaatttaaaaatgaaaaaattattttgaaaaaatgaaaaatgaaaaatggtgcgctggctgttactgttaaaaagtgtgggcctgacatggtaaaaggcgacaaggaacggaaacggtgccgttacgacgatctgggccgtttgagggatcccaggaacagaaacgaaacgatcataccaattccattctcttctttttttttttaaattaattttattaattaataataaagatagggttattaatagcgggaaaacttcatatgttttgattttaggctaattaggattttaaatttttgaactttagtatatatcaaattatgtctttaattttttttttatctaatttaaaaacaagaagtttaatatcgatgaaaaatcaaggagtaatatttgatacatgttatgtgacataattttgtagataccaaagtctaaagaacataatttagtacatgaaaaattactgaattagtaaaattaaatgaaattgaacaaaaaattttaaatctaacaatttcaatattttaggagagtttttaacgaccagaaaagttcataagcatgatttgttaaatatcaaagtttaagaggcaaaaatcttaattagccttgaatttaaaacatttaacttctttttttttttttttataaaactctttatgtttacttttctttataaatttgagacattagttaaatagttagataccactattatttattaattagattaccacggtaatctaattaataaataatagttagcatttaatattaatatttatctcgtatcttaaatttatataaaataaataaataagaaaaatttactattaaacataaaaataaaaatattaaatatataaaaattaaaatatacgagaattttgacactaattatcctaaaaaaataattaagactcggtaaatgggttaccataacgcaaagtcatacttacgccgttttatgtagacaacaaattaccgctgtattatttattaagtaattaattagttaattaatcacagtaataattaatgagaattactgctatacgttccgtttttcgctctactgtaattaatggattagaaaattcattactaaactaacagtttgtctaaagcatttctttctgtgttaattttatccaaaaataaaaaataaattggaaacaaattaatccggataagattctttttctttaattgattgttgagataagtccaaggctacaaaaatccgagtttgaattgacctaaaatatggccatacattaataaaattttacataatttctttcgaaattttatgaattaactctatgtcactaacttttatattctctatcttcaatgttaggagttataattaattttttcaatcaaaataaacttttaaatccaggaatattacaaggctttcttttttgagttaacaccatattaattacactatttacattattttctttttgttgtatcgagtaaaattgcaacacgtaaggcatgtattggttagtgaaaattttattacaattttggttcacttaattatagctaaaagtgaatgaaattgaattctttttattgttaggacaactaatattctatttctgtacgagataatattttaatactttggtaatagttgatctttaatttaataaaatatttacttaaaaataaacatctcaataaatagtctaaccaatgtttataatttaatatttttgatcttgcgaattttatgtattaaatcatatttttgaatttttaagatcgttaaaatttttggttgaatagttgaaattattggatttaagaactttgtctcaattttaataagaaaagccttttaaaaaaaaaatataagccaaaatttttcaaagaaagtctaacatggataaaagttcaagaaatatgatttagtgcctatcgaaattcgagagaaagaatttgataaatatcaaagtctgaaaaatataatttagaatatatataaacaattactgaatta

SEQ ID NO: 294892 - DNA, 1210 bp, Cannabis indica
agatcttttatttgtattgaattaggatcatcgctaaagaagtgtgttagtttactttctaattttcctgagacgtccttaatttatattcatatagttatgaattagcggtgcatcaattacagtaaactattttaaataggatttctatccttttttcttggtatattttactcttattattgtttaaagaaattttttattcattgttcaaaataaaaaatatattttaagaccagttaccacttttcattaattatgggagtagtttgttcacttcaaactcagaagccatttatggtatgatcatgaaaggactcctaccatgatggaactctcaactagttcactttattactaataagtataacacttgtgttctagttttattctcccaaacttgaattcattgattaagaattcaagaagacttgactaggttaacttataaattctaaaatgtaattaagaagaactagtggtaatgggttgatatgctttagtaaagataaatttgatttaagactataatgtgattatgtatggtaaaacgtgatatgcattgtttttgaactcttaataacaaaataaacaagaatctgttacttttctgtgtaacacacatatgtaaaatgattattatatatatatataaataatttcttaaacattatgactctttcataattaatattgttgacctacttttttcacatttcaaaccttagagagattagttttttaacattggtaaagtccaattttatgtgtcaacatctaaaaaattatatgttccaaagatattgtattttgaatatcttctcaatattaattgtcttatggtggagcgtgaattcggggcctaaatagtattttgacccaagataagaacacgtacgaatttgatcgctcgtaaatgtataatgcaatcaatacgtgaaacatggtgggccaggcccaaaatcgaggtgggcccagttcttgtccatacatggtgggccaaaacctaaaacacgacaatagtctacatcagtaacataatgccctcaccaccagttctcacagttctggaatttgtacaaacccccattttatggatcataatctaaatctaattttaaaatggtcccttcttataagaaaaaacacaaaagttaaaagggattatttcacaaatacacaaatacaacaaattttttttataaaaata

SEQ ID NO: 294893 - DNA, 7409 bp, Cannabis indica
gtttttttttacggggtatttcgttatgacttactaatattatctctagttaaatttttagtaaaaattttagaattaatttacaatcgaccgtaaaagtacgtttagtaagttttttgaacgtgtagtaggtaaactaaaatatcagcaactcgtgttttacggtactgtaaactattacggtaatttttaaaaaatttatagagatggtactgtaaattatagcaaatattgctatagaaaaaaaaaaatttaaaaaagtattttggtatttaatttcgatcttagagattgactaaaaaattgtaataagaggttgtaattagtattcctctaaatggctgacggtgatgatgcggtggttggagaggtgtttggggctttgggttcgtgtaagagaagaaggagatagaattagggaccgaaaatataagaatggtattttcgggtataaagtgaaagtaattttttttttttttttgatatttgtataaaattgggggatttttttgaattagtgtcccgatactttcagcaaagtccaccggcacctcgaccttgacggagcaaggtccggcctgacgctttccactctgcccctgcctgcatactctcagggggtctttttggtcgactgtggtctctccctttctctttgtcaattgctcacttcctctctctttaagcggggacggtgtgagcattgactcttctttccaaccagccatacccaaggtaacacaaaattcttcagtcatttcatacggttgagcatttcaattgctcactggaaatgcattaataaaactgggtcacacaaaattctccagtgaatgaaacgagaggaaaaatttccaggtatggaagatagacctaagttgttgatactgtacgctagtcaaacgggaaatgcattggatgcagcagagcaattggcgcgtgaagcagacctcagaggctgctttgtcaagcttttctctttggatgaatatgatcctgtaagcatttctgttcaatctgaatctcagtttcttatctttctatttgattatagagaaaatattcaccaaaattataacatttgcttatcactatgttgctcttgctttttttatttctcaggtttccttgccttatgagagtgctgtagttttttttgtttcgactacgggccagggtgatactccagattccatgaaggtttggttggagttggaatatttgattatagcaatatgaattatgagaattataattcatatatttttgtcatgtggctatcttaatttcctatttttgtatgcagggtttttggaaataccttctgcagagaaatctaagtcatcattggctagaaggacttccttattctgtgtttggtttgggtgattctggttaccagaagtataatgtaatgatacatattttctcttttcctttgaaaatgttcttttacttgtgttataggtgttggtatgtatttgagatatgtaccagtttgtaacttggatctattgctacatagttcttctggaaagtgattaaacagcctttgttttatttatgttttttatatggagtttactaactaatacttataaatttttgccactgctttagtttgttgccaagaagcttgacaggagactttcagatctaggggcagcagccattgtcgaaaagggcttgggagatgatcagcatccatcagggtataactatgtaatatgtctagaaattataagtgatcaaggattagcacataagttgtcttagtcctactttcatactttttggcccctatgtcaggattttgattttgatttctggaggtgattaggtaatgtgaggcaggaaagaaagaaatttaaattttccaatacatcaccagattataacgaataaaatgcctaactgcagttccaagaacttaatggcaatccaactgtatcagcttagcttttgaagataagtgcaatgaaagcctatttagttttagactgcaatctatagtaagggctttctgtcaatcttcattctattttctcctgtttgactctaaaaatggaaataaataaatgagaaggtataagtatgcggctttatgtatatacaaatgatacattggcagttgtatttgattcataagtagataagtaaatattgttaaggcatttaagttttagtaacttgtgtgtgtaattctagttgctatatatcctgtttgcattgtgtactttacctatagtttttacccgaaaaagagtttacattgataggtatgaagctgctttagatccatggatgacatctttgtggaatatgttatataatctgaatccgaaattcctcccgaatggtccagattatgtgacttcttctaagcaatcaattggtcagccaaagtttcaggtcagataccatgtcattgacaagatggattcacagttttcatattgtccaggtaacttagtttattagacttctctacttttgatggccagttagccgcagcaagtttctttttcacatgacatcaacatggacacatatctttgaaagatttatcaccttttataatgccacacacacactatttatcttttgaaagattgacaagaatcatgatgttaaaaccaattagtagagttacccatgctcttataaatgactcaatttctttatacttattccatgtgggatactatactccaatatccctatcaagatggtggcaatattttttgctcaacaatttagaatcaccttatcacgagtagccattgcttatttgcttggatctcaggtgtctttgcactgtgcagatcttgtgtggcttttatttttggcacattatctttgggattgaatgcccacaagcaatatggctcatgataccatgatcctgtttggtttagcttctataagcttttttttagcttttagaattaaaaaaagtccttctaagtgtgtggataaaaaatgaaagtacttttggaagaagttaggatttgtagtttcttccaaaagaacttttgagaagttattttaaaattaaaataatttacataatttttaatttactcgcaaaagattttttcttaatgatatccaaacactttgaaaagtattttttattaaaaaaagatcttcatataatagttattcaaacggtaaaaataaaacaaaacttatacttctagctataagcaaaagtagaagcttagccaaacgaggacccatgtcaagaattatgaagtttcatatcaaaactaattagttatgagtggagttacttatgttcttataaatgacttaatattcttatacttgttccatgtgggaccagggacaaagctatttgaagtttatggggagcctcctccccccctccccccctcccccaaaatattttttcttccttttctaactatgtttttgtacttttttcttattttctaaaaaattatttattgcccccctcaaattttgtttttgcatattggcccccctcactatgtatttctgcctttgtccctatgcgggacactatactccagtaaagattgacatttaatatttgttttgcaatagcttcagaattgaaacagaaagaaatgcaaattgagacaactcggaggatggcccctagaaaattctcacgtcacaaagataggccagactgctttcttaaattggtactcaagctttctctattatgtttgaaataatgtttggtgtcattatcttggtaattgacggtttcattatctcatgaatatttgggcaaggaatttctgtagttttgagtgttcagtgcaaaatcttttgtaaccacggttttcctccgccacaagtgaggtttgctatacataacggaggagggaccaatctaagacaagtgttctctttctccttttttttaaaaaaaaattgaagcccattacagatggtacaaaaaacaaacttaaaagaataggtgatcgtaaagcaactcttggagtaggtgattgtaatctctgtggaagttgacaaaacccttaaacatcttatgctaggaaatcaaaatcctggtgatgagctgaaaagcaagtagattgttgttggacctttctgcaaactcattctctctctcatcctgtagcttatagttcttttcacttgctcttgtaggtgaaaaatcaaccattgaccaaagaaggttgtggaagagatgtccgccactttgaatttgaatttgtttcatctgtaagttttgtactttgtttgactagtgtctacatgccctctagaactccatttatctatttaattcctccgctgtatcaaaattatcatgtttttttttacttttatccttagaaagttctcttcattttttatttttaacaggtcatagagtatgatgttggtgacagccttgaggttctccctggccaggatcctgcttcactagaagctttcatgcagcgttgtaatttggatcctgaagcaataatcactgtaagtagatattggttaaccatggataaagctactttgccatcacaagtgttgtgcttcttgaactttacaaaatggttgctgctggagattcattaaagcattagagttgagtgaaataaaataaatctaaatggaaaagaacctcaaattagcaaaaaataaagactaatgagaagtaataatcattttaatgtaaaattattctagtaagaataagattcaaaaagaaaaaacatagccagtgttaattaccacgtaggagatagaaggcaagggtttagttgtttcatcaatcttcaatgttttcttcatatagttgcaatagttttctatgtatgaatgtgatgagcaatattgtatcttgaacactatcaatatataaattttaggtttatcctgtggatacaaagacttgcaatgatgatcatgccacagtggatcctatcaagttaaaatcttttgttgagttaactatggatgttgcatcagcctcaccccgtcgctatttcttcgaggcaaggacccagtatgtttttgacttgtaattttcattttatactgcctagaagaaaaaaattcttctgtaagtttaagtgaaatgttatttttgccattattgtatgctttcacccatactcttaaagggattacatcgattcattcatactacttcaacaaataaagtcaaagagataaacatattgtatacctgaacaaagcttctttttttgtttctctcagatctctaagttcacaatcgtgtacttttgctagattcttgtgtttgtatttatcctgaattttgatgaaacatcttttccaggtgatgagttattttgccacagcttcacatgaaaaggaaaggctgcaatattttgcttcacctgaaggaagggatgacctttaccagtacaatcagaaagaacggcggactgttcttgaggtgatgtcgtaatgcatttttgctccttagtatcagtacattatttggtggactgtatgtccctgcaaattatatttattgttttttcattgttttcccaaatccgtagttaacataatggaacataaatttctaatatatattccaaaatacatcttctgtgttatatttcatcagtattttttttataaataaatgatactctattaaatttaggaaagaaaagcagagatagcttacatactttagcaggtttagaggaaatgattagctttttagattccagcgcaattgtattagtgagtagtgattaacatgatggtaagctacgatcttatacaggtattacaggattttccttcagttaatataccatttgagtggctggtgcagttggttcctcctttgaaaacaagagctttctccatttcttcctctctctcagctcacccaaaacaagtgcatttaactgtaagtgtagtaacatggactacacctttcaaaaggaagcgttcaggtctctgttcaacctggctaagcaagcttgatcctgaacattgtacggtacagaaactctttaaaatcacaagcatttagatgtgttttacactgatacattattatattttgttcatttgaaagcaggcatttatgttccagtgtggttcactaaaggttcccttcctcctccacccccatcacttcctctaattctcgtaggacctggaactggctgtgccccatttcgggggatttgtggaggagagagccatccaaagtgcaaaccaagatgtcgctccagttgtatttttctttggttgtcgaaatgaggaaagtgactatttatacagagattttttggctgtcccatgcagaagatggtggggtaactctcccagacaaagggtggaggtttttacgtcgccttctcaagagaccagccacaaaaagtttatgtgcagcacaagatacgtgaacacagcaagagagtatggaagttgctgagtgaaggggctgccatatatgttgcaggttcttcaaccaaaatgccgtcagatgtgttatcaaccttcgaagaagtaatttccaaggaaagtggggctccaagggaagctgctgtgagatggctgagagctctagaaaaggctggcaaataccatgtagaagcttggtcttgacatgacttctatctaactaaacaaaggacaactaaaaaaaaagagagtatatttgattcaaaaattgttccttaatattttttttagttacacttaaaacaatggttccatgattctttgttaattagtatagaaaaaaaattatttctttatttttggatcctgagttactcttacaggcaaaaatggaggtggagtgaagttactgttggtacgaaatcctatggaaatatgatggaaagtaaaggttatcatggattggatccaatggaaatcaactagattaatgaaactttttattactcaatcctattattctagtcagcgtgagccacaatgccaccaacttcaggaccattaccacttttgtttagggccggcaaaacgagttagacacaatgacacgactcgaaacccgcacgagagttagcgggtttgggtttgctttaaatgggttcgggtcatgttcgggtcatgttcgggttgactcgtctaacctgtttaataaacgggtcgtgttcgggttgacacggctaacacgaaattgacccgttaatgacctatttaaagttattttagtactttaaccgtttaacgtgtcataaataggttacaaacgtattgaatacttcataacgtgttattgattgacatgtttaaacaaaatatacttataaacaggttacacgggtcgtgttgtgtcaatctgtttatgaacgggtcgtgttcgggttttatatttttgacacgattattaaacgggttgtgttcgggtcgagcat

SEQ ID NO: 294894 - DNA, 3267 bp, Cannabis indica
cttaaagcagctactagatcgatttaaatctcaatcaaaattcacatagcaacgcacataaaaactactgaagaaatcatggagcaacccaaactataaatttaaaaaataaaaaaaaattaaaaaaataatatatagagtaatttttttttcataatgtgtagatcataaataattaagattacttgtaatttttcaaaaaaaaaaaataaaaaagattaatatcaaaaataaaatttatatattttgctatccgttttttcttccatttttttattattttattttttatatttatttttcttttttctattttaatttaataaaatagtgtaaaatataataattaaatattattaaaaaatatatataaaaaaattgatatatgatataatataaatgtacacataaaataaaaaaaattgatgaaatattttaaaaaaatataacataaaaggtgatgagagagctctaatagttggaacaatatagtatcctcaaatagtattggacactaccagaactcttctctttttcttgctctcattttaacgtttctcttataatatgattattagaactaaactaatttacattagcattacctaattaaaagtgtcacatatacttgtactagtatatatattattgggtaactttataacacatttcttaaagaatatattttggtagactctttatttgttttacattgagacaattttttagtctatttttatatatatatatataattgtgtacgttatagtcatttagtacagtctgtaaatttttaaaaaattcttagtaatatacaatgtcaaaaataaaatttatatattttattctacacgcaattattttctttcttatactcgtggtaagtgtaagaacataaaaccagaaaaacaaagcacgagagaaatccagtagctcttgtgataggatgaatagcctaagacctaaaattcatcttgtgagagtgatagggtctgagatgtgaaaaaatgaacacgtccaaatagtttcataatgatataattaggttgagagccaaacaaacaaacattcaaaggggctgacattgtttagaacaacatttggtagcctgtttatagtgaaggtagcatattgaaaagcatggcaccaataagtgaaatccaggttacatttagcaagaagtgcgaggccagttttaataatatgtctatgttttctctcagcccttccattttgcttctgtgtgtgtgtgtgtgtgtgcaagggtgagagaaaaggataccttggtcaatgaggaacctcttaaaaggtttatattcacctccaccatctgcctgtacaactttaataggtaagctaaattgtttctcagccatccttttgaattgaagatgcatttcaagggcttggaattttaatgacaatggatagatccatgtaaatctgctcaagtcatcaatgaagtgaatgtagtatttgaatccatctttggattgtatgtgagatggtccccacaaatctgtatggacaaattcaagaggttaactagcacgatctaaggatattgggaagcgcaacttgtgattttttttccttgctcacaagcattacagaactatagtgttttaatagaaccagtgtgaggttatttaggcaatagtttgcttaaagttaataagaaaggatggcccaattcgcaatgccaaacatttatgtcatcaaatggagaagaatataatgcagaatatttgcaatgccaaacaacattcttgtcattacaatgtatattttgatcagtacaatatgaattttgttcagaataagactcgatggtgagatgacattgcagaaatgggtcggatgacactggaccttcactcagcatgtatagaccatctttacactttcctttgaggagagatgctcatgtttgcttgtccttaacaaaaaaataatttttatgaaattcaagaaagatgccattgtcatcaacaagcttagatacactgatgaaattcttagttattgagggcacttgtaacacagattgtagttgacgaggacatgatggattatatgatggaagagtagaattaccaacatgagagattaaaaatttcttaccatcacccatgactaaggttttaggaccattgtaagcatgttgattgtccagattagtggcatcgaaggtaatatgagcagtggctccaatttcaacataccagcaagaatcatcaccaaaatcttgaaccagtgtggtggaatgggcttgaggatcatacttggagtcaacctctacaagatgtgcccgtgcagattgattggatcttgacactacccaatttttgtcaaaatagtagtgacaaactggaattgtatggccagaccttagacacacttgacatatgacactttgttggttgtacttaggatatcccctaccacgaccagtggatagttgggtaacatcatgttgaggattcttggagttggaatatggtggaacaccatcagatctaccattgccaaaggtaagatttgcttccattttgacaacaagatctgtcataaattgatgatgttcaagtctgctttcatgagaaagaagcagagcttgaacttcctcaatggtcaaggcatcacttcttgatgtaatacctgagacaacagagtcaaattctaggccaagaccatttaagagttgtaaaaccaaatcttgatcatcaacaggtgatctagcaacacttagggcatcagaagtagattgaatattatcaacatactcaaagatagagagacttcccttttgaatattggtgaattggcccttgagttgaaaacgacaagcattggtttaactggaaaatttatggtctagtgtttgccacatagcaaagcagctctggtaattagcaacagatgcaaggacactctctgtcatagacgatcgaatccagaaaaggacgcatatacttgggtcatttaatacctccattagaacaaagtttagtttatccaaattaaagtgtgatgtcaattttgccaagccatctgtaatagagttttattttcttggaacttgttctattttaaataatcaaacctttccaaactctttcaaactttttctagatatttggccattcttgtgccttttgcttggtattctctaatacccggtaaaattatacatatattttaaattttatttgttatacaattaatgtgagaataagtattttatttatttctactaatagtgaa

SEQ ID NO: 294895 - DNA, 3863 bp, Cannabis indica
tttcacttttagtcacaaattttgttgtgactaaaagtaagattttttgtagtgttggttgagtgcgatgtggctggttcttccccaaaactagaaagttgggtggaggaggtggattgggtttgcaatattagggaaagaacaaccttagtcctctagttagcacaataggtaaacctattatggtggataaaataacccaaaataggtccacgcggtatgcgagggtgttaatggaaatcaatgacaaccctccaaaatcgagagcctatataaataagagaaaataattggtagaacagttggttgaatacgagtggctcccctcaaagtttgttgcttgtggaatttcgggtcacattgttgctaactgtaacaaggaaaagttcgttttggtgctctttttgagaccaagatcaagcatgacaaaattagtagtatagttatgaataattttcctaattgggaggtgtattttagcatggttgtttctagccgtattttactaacgtggcaggctaagtttattagagttgttgtgcttgttgaagacaaacaattcgttcattgtaagcttaagatgttcgggcgcagggggctgaattttttattactgtacaaaaagaatggagttaacttaattgctactctaggtaagctttctcttccttgatttgtgtatgatgattttaatgcaatgttctactataatgatagagttgggtaaacatgtcttggctaaggatgtggaaaatgcttaaaattggcttgccttaggccaattggaagaattcaaatgcctagggccttctatatacttaaacaaataaacatgaggttgggaataagatctactctaaacttgatagagttttctctaatgagtacgggttagattcgtttccaaaaataatatacttaattgatacaatttatttattaatatataacgaaatctaatattaaaatacaccaactacgtgtaaatatttctatattttttataaggaaaaaaaaggctttgcccctttttattattatatattattttaacttttgataaaaatatggtagtggttgatatataatcttacaatcccaatccgatccatataggcaaaattcaaatatatgtttattaaggagcgcacattagtgccaattatatttgcatagacttgcaatagtgtatcgacggaaataaccttattacatatcttttattgttgtcatgatcactgttatttgattagagtgtaactttcatctgaaaaaattaatatttattctaaaagcatgcataatcaatgaacaataatattaaatgtacattaattattagaagagctttaatgtcgtaaaacaaaatacctagctcattaagatacacaaaattagttattagagcgtaaactatttaaagacaaagaattacagaaaaaatgcattgactaagagtccaacatcttgaacttatcttaatcctatcaataatgctagagtgtttacttaaaagagtatttctatgaagtatatgacgcccaatattatactcatataatatgttatataaattgttagtaattttttatattatttatttgattaaaatgtgcagaaataataaatggaattcaattaaaacaattgtaaggtaatatttgaccaaaatactacacttctgccaggtatatttatgacaaaatgttagtaaataatatatctacaatcaccaaataactttaataatagtcacaaacagtcaatattatcacttataaaatttctctaagaataatatctttttggacaaaataacaaatcacatattatatgaatatatataactttcaaatttgactttacagaaacgtacaaatatatcgattaggtttaccattatattatttatattatacgcggccatatatatatgtgggagacaaagaaaaagcaaaagtgggtttactgcaatgtgatatgtatagtggagttgtaaactgtatgagttgaatgtaccaattataccacaccaacttcttcttcatgggatatcgattgtattgcatgtgcttcaaccactttctcctcagtggaaatatgcctttccactccaaacccatccctataaatactcacctactcttctatcattcttactcatttcttgtgcttagttctctccataacatttccaatatggctaaacacaataagcttctaggttgtgctttccttttcttgctaagtataggcctttgctcgacaactagggctcttctcacctatggcgcaggccatggtgctgagggatatggaggtgtcgccgttggaggttatggtggtggtggtggtggaggttcaggcagtggtggtggttatgctggtgtaggagaaggtggtgctactggttatggtagcggtgctggtagtggacaaggtggtggtgctggatatggaggtgctggtggtcatggagctggtggaggcggtggaagtggaggtggtggcggtgctgctcatggtggtgctggtggtgctgctggatatggaagtggtggaggtcaaggtagtggtgcaggatatggtggtggtgctgcagagcatggagctgcaggttatggtggtggtggaggcggtggtagtggtggtggaggcggcggtggcattggatatggtgatgaccacggtgcaggttatggaggtggtgcaggaactggtgcaggtggtggttatggaggtggtggagctggtggtgcaggtggtggtggaggccatggtggcggaggcggtggtggaggtggttctggtgctggagctggaggagctcatggaggtggatatggtactggaggaggtgaaggtggtggttatggtggaggagcaggagaagctggaggtgcaggcggtggaggtggtggaggccatggtggtggtggcggaggtggaggaggaacaggtgctagtgctggaggagctcatggaggaggttatggtactggaggaggagaaggtggtggtgttggtggtggagctggtggatatggtggtgctggaggtggcggtggcggtggctctggtggtggtggcggtggtggatatgctgctggaggtgcacatgcaggtggttatggaggtggtagcggtgcaggagaaggtggcggccatggtggctatgctccatgaaattagtatttatattttaaatcgtttgaagaagagcttgttcttactcactaaaactataaaaaataatagtacgagtaagagaactttaatatttttataagtattacgaatgccaattgtatgctcttaaatgttgtatgttcttctttatagcaaaaaaagaaaagaaaaaatgttgtattttctttataatatgttaatcaagcattcttctacattataagtttattaagtacgtaaaaagttgatcaagacatagattttacattcactaaaataaaggtgggcaatgaataataataataataatatatatatatatattcagtcagtgtgttaatatatattttaatcaattaaatttttgtttcatatatcaatcgttgcatgtatcttgcatggtaatatttagtaattaatacactactacatctttactataatacatgtaatacttttactatgagtcaaaaagttgtattattactgttactatttttctttttatttttttactgtaacaacaaaagaaaccaagagaaaaataagctgaagaataataaaagagttaaaacctaaagtcacatatataaatctgatgcatagtgtaatatccaatttaaaatagtatttaatttttttgtttggatattaattgtgcgaggataattatc

SEQ ID NO: 294896 - DNA, 574 bp, Cannabis indica
ctaagcgggctttacagagggatatgtggatctcaatcttttgtatgattaatctaattgaaccaaggattctttaagaaagtaaaataagattataacttaactacatatacccaaaattttaaaagtaactctagattataattaaaggaagtcactacacaacactcttttactataataacaagtaaaagaataacaagtacccaatattttattaatgaatatattataattttctaatgcatgtaaaataaaactattccataaacatgtaagttaaaagaatattaatttattctccattaaataagaaagataatttattttattccatatatcttatgattgtctacacagttgtactgtagatgttcatacttaggagcatacatagtacaggtaaacaaattatatatataacagatacatgtatggtataaggattaacttatgtataagagaaatagatatatttaaaaataattaatgacgtcgtggcggaagaggtgggatgctttgctcgtttctaaaaaaattattgggatcaactttggttttcaccttaactaac

SEQ ID NO: 294897 - DNA, 9547 bp, Cannabis indica
tttttttctttttgttttttgttttttttttgagtttcctatatttcgttatgtggttatgtctaccattttagtagaataattattcctctttaataaaagacactcttttcatgtcacagtctcacattctccattacctcatcgtactcatagaatagaacagcttaatccaaacaagtcctaaaagtcgaggcagcaacacaatataagttgaattgcaacaaattttactgattaagcaacattgaaacttaatagttgctataaaaaaaagcaattgagctaaagttagaggcagctgagacaataaaaattggttagctgatgaaagatcagtaggcatacctctgatgataacatcagttaactattgctttgaatgcttttgggactgtttctttttttctattttgttttcttgcttttgttttcgtgatgttggtccatctcaaaaatgcattgacattcgccttcggctgcatcaactgaacaagaactccaaaacaattcaagaaaagtttctacaagagggataaggaaagatgcaagagtactgaaaggacaattccaataatcacaactctgctttctcaacactatttctagatcataaactatgttgaaaagttcattaaggaaatgtcaagggatgcatgaccaaacaaaaagagtcatccaaacctgttctgtattatcgtaaacttagaactaatatctttaatgtcctagcttaacacgcagatagttgaagacttctagattttgtacactgcaataaatgaaattgtcaggcaagagtatagaacatcaggaacatgactcaccagttctattgccttgatcctgtattaccgaaaccaatagctaacccaggttgatttctgcaaagacagctttacagcaaagtagataagagataaattcatcatcagttatgaaaatttcttaaaagcgaggaccactatcatttgtggatttccaagatattcaagcaaatcaaatggaacttcgtgacagaaactaaagtcttaaccatggaacatatttttaaagaaaaaaaaaataaagtgcaacaattgatcgccagaacttaaaagaaatgtttatacattattcttaaagaaataatcacaaaaatcagataatgagattttgaaacagatgaaaatgttcacattggcttataccaatgtgacaatatttgcagatttttatacaatgcagcgataagaaattcaataaagttaaatctgtcatctgaaatgaatttcagaggaacaggataaacttaatacgaactctgtacatctccattaattggaaatgaatttacacaatttttggtttagcaaaagtaaatgactcatttcttgaaaagcagtttcagtcctctgtatcagtatcattatcttcaccaggaggcatctgtctggtctctgctagtgaaagtctcctggcctttgttgatccggcttcaacaagtccttctgaagaaaaatttaattgagctgttccagatgatgaccccaacaaacgaagaacaggggcatcgggagaagacgatgcagatagattatacgtaaagattcccatagggtggtcaaacttgcaacttggaccaaacttgcagataccataacgagaataaaagatgcataaaggttctccctgttgaaaatcaaacaaaatgttcattatgattcaaattaaacaaagatcttactgatagaataaactacactgtaagaaattaaaatactttaaaaccatccagctattcaattaataaaaatgagtataacttaagaaactccatgcaaggtcaaaagctagtctgaaagaaatgacaaaacctcaaataaaggaaatataagtataatgaacataagaataacaaaccattcccgcacttgagcacacaatttgatagtgaaaaaaaaaacactaaccgggcgtaaaggaaggcccattggacttaaaacacagtctggtgtaggaatcaatctctctctaggatgatggaatttacaaactgcaccaaatttacaatcccccgtcttcatgtaaaactggcactcaggctgcccaggtctctctgggaaaacattttccctcggtaaggcatagaacccaacaggtacggagctagaacgataaggcgaatatgtcccttgagatcctgtatttgcctgatcagtttgacgtgaagttccatacatttgactattacctgctgcaggttggttatcaggagatgaaactgaacccagctgaccctgaaaaaatgaccgggcatgactacactgtttcagtatcactagttaaaaaaatatgctataatcaacaaaatattgaagaagaaaaaaacacacacaggcaaaacatggccaaagacactacatgattaactaagtaaattgaatggggcaaagataactctggctttactgtttggcatgtaatgttagaagcttaacaaaaaagaactcttacataaatggcaaaacctacttctaagtcaaactcattagggaatgctttatacccaccttattttgtaatctaacggcaagatccttaaaccacaatcccaaatgaggccttaaacctaaccaatcaagaaactatgcattaacaaacaagcgatgtggaaagtctaagggagaaaatcagattatgggtggccctttggttgcatgatgttaaggggttttgaagatactcccttctctatcttactgagaaattgaaatgtcatcatgtaatttgtgtttctggttttctttcctgcattttttagtctttgtgtttattgttcttatttgtatcacctttttgtgctagtgatttatgcagattgttcatgtccatgtaattttcttttaaatgaagaatgaactaaagcttacactatatgcattccagcccggaactgataccattccctgaggtacaatcagaggtgcgtaacttgatgaaccttgccagcgtggacttggaataaagatgctcttgaccagtttgtcatccctccaatatatgactgctgaccaggagttgttggagattgaacagtaggataaacaggggaaccgcgcattgaaaccatcatattagtaggtgaggggtgatggaatttgcatgtgcttccaaacttgcattgtccggttcttaaataatatgcacactcagtctcattctgcaagaaagaaaggaaggcaagagaagaaaagaagagaaaaggacaagaaaagagaataatttatttcaatcaacataagaagctaactcgaaaagcaatggccatgtttagatacaaaaatatttgcaggtacagaaaaagcttgaaacaaattctttcctcccctcaaaagaatttactcttttactcaaaatatctctcgttatattttttcccgtaaagtatggtttttcttattacatcttcttatcttgcaggtttagtatataaaaatttccaatatatccccaaacaacttctgttcccttccctatatcagtattttctaaattaagcaaacctttaagcgtgcaacaaccagaaaggaaaggaaaggcaaacataacaatagcaaaatgtcttggaaaccatatataaaaatataggaggaaatttggaattcgaaccggacgaagtggatagcctaacatatttaaggaaactcttccagcgattccggctttgtctctaggatgatgaaatttgcacgtcgctccaaacttgcaggttcccgtcttcaaaaagtactgcagagcgaatacaaaaacatattaatctacccaccaaaaaaacaaaacgagagaacaaggggaaaataataaaatgaacaactatgcattgaatgaaaactatgcagtgcgttcagctaaatataagcttaagtacttcttaaacctcactttcaagcattgggaaaatagaaagcttaaaaaagaaacaatgaacatagcataaatttccaatgacctattttagattcagtatacaattcggttttcatacaaatccttacccaatagaatgtcctacaaaatgacgtatacatcccattaaaaaatccgtacattaagcattactgcaaactttatacttcctcccccgcttgcatgcaaacataaatttatcatacctactcccctgctcattcatgtatgactattgtaatcttaaatagcttaaatacttacacgtcctctctttcacagaatcttgattaatttcaaagaaaaaataatcttaggcgcaaataccttctagtgtgcctaaaaaccactcataatgtcataatacaaatatttaaaacaaattacggagaaaattatgaagagaataaaagcaattatacgtgcctgacactcagcttgtccaattctttcagggaactcgcccttcattcttgcagtggcaatagcctggaaacaagaagaataacctaattgcttgtttgtgatgcactcaaggtcaagaaatacaaagcatgataacattacttgagtatgtaaatactagtgtaaactcaaaagtatgtttctagagattcttgtttctttgttgttttgtgtatgcatcaatattattacaaaatcatagcataggtagctctttagtttattataacttgttaaaacaagctaaagctataccaacttcctgtttgggggatgattaaagcgacaagttgcgccaaatctacaaagacctgttctgatgtagtaagaacaatcttgctctccaggacgctcgggatatgtcccaggctccattgtttcgcttgatctcaaattcatttgccacattgcatctgaaatagtattagataggtatgttcaagacatacaacaacgaaaaaaggaaagaaaactgcatagtacagagctactttaaacaggcccagttcttccacgatcattatagcttgcaaactaattaccgatgctccacttaacaaataaattatcatctgaaagtggtaaaatttacactcttacccaccgaattccttcaaaaatgtactaataaactcctaaatgacatcaaacacatgattttgtatgtggaaaaatcagaaaataaaagcatgtgatggaacaaaataggaacttaggaaaaagttccagaagaatacaattcattaaccaagtaaccaaaatagaacaaaattgatcgcacattattgtaattagttcttctccattcaaaacctgataattcatttatcataatttatccaaccaaaaaaaaaaaacaccaacgtttctataatgcaaacaccaattgattgcacgtcaaaaaatcgtcaaatttaaatacctttttcgcgatcatgaaatgttacaagtaaaaaaaatgcattttacattttgctgaaaacgaattcagtttcacttttaatctgcaaattatgttgtagaatgagtaaaaaaaatattcagagcctgaaaacaagaaaatacattttaaaaaattattaattatgaaaattttatattaaaaacgtcagagtgtcggtaacaaacaacaaaacggaaaacaaaaatcagcttaattcgatcaaaacaaataaataatgaaaatttcaatgtactgggctcgaaaactgagaacaagggaagaagaacaattaatcgaaacgaaggtaaagagaatggaaaggggcaaaatggaccattaacatgtggaatggagaactaccattcgttagtttctgttgattgagcttagaacaatgacaacaacaagaaaaacagacagaaaataaaaatgataataataataataaaaaattaaaaaaagaaaaaaacagaaccttcgctaaacgatggtgacaacgagggagcagcctcggtcacagacgcgagatgagacatcgggattatttcaccatcgaactccatacatccatagtcaccggtccatcactgtaggaaagccaccagaattcccattctcaattctgacggccggctttctctcagagattaaattagaaaacaaattgacgatcaaagccgagagagaaagctaaatcaaagaagaaggaagaaaaaaaaattgtgtcttttttttcttagagagagaaagtgcgtttcttttctcttttctttttttgatagagagagaaagtgaaaggaggagagagatagagagagagcggtgtgttctcccctccacaaacgaggagagggaataaaaaccaaccgatttaaccaaacagccacaagcctcaccctcagctcagcttagccttagactcctacttagactttcagactcagacccgaacccatctctttctcctctcttcaattcatcacccgcgttttggaactaaactaacgacgtcgtttcacttttgtaatctacacccactcgcgagacccgtttggtttcttattactactcgctttctcattcgtccacactctgatttttagcctttctttatttgtactttagcttttacgtatgacgtcagcgcgaatagaattttcggggctggccacgtggttgatgcaggacgcgagtgtcgcttagttgctatcgggttgcgactgtggccgtttgaaactggttgccagaagctaggaccgcttctttccttataactgcttttactgttaccaggtcattttttttatattttccactaactaccttccttcttttttttttttcaagttttttaattttatttctctttgttataaaatgaatttttcctccaaaataacaactacaatctggtatttaattgacatgtacacttagtttccaataagaaaagggtagtgtgtcacgagtataaatcccgataatattcttcttatatgatagaaacatgtgagaaggtgcgatcaagacatagtctagtcgcacactatatgtcgcatagtaaagagaataaaaacgagacataaaattaagttaatacgatcacgacatatatcaattatatgtgatgacccaatattctccttgcactctatgtaaagaatgtgtctacaacgattagtccaaatgactattgtacgcgacaactcatgattgacccacgagtactacgttgtcaatacaaaaatgttcgatatacaagtatactcgtaggcattctataatatggaaccttggtaggttcactcatctatataatcccaagaggtttatgcgttcacacagatggtccaaagacccaatataggcggtaactcgagtgaactcgtgagttcacatgataccaagaatacaaacggtcgatgagcaatcaaggcagtcgcacccgatcaaatattgaacaagaacagtcgaaactgttatttcatttattttacaatgttttcatttcaattaaatgtaattaatgttgtaactgtcttatctgatcggttatgaaattgaatgattacttgttttctatatagaagagtgtttaaatacgaataagacgaatcacaaattatcttccaaagtggactaagaagattatgctatgactgaactactataattctcttgtatttttacatactcattatttacacgttgatatatgaatatgtatgttttcaattttgtaatttctgtgtggtaatagttttgcatgtaatatgttttatgtgtaaacttattttagaaatttcattaaaattggttacggcgttgttgacaagttgttgttgacagtggaaactcgtcaacaaagttagtggtcagaaactcgatgtaggaatatcaggaagttagaatttaggtgtaacgaaagtgttctagtgcaaaattttggactagaaatacaagtacaggctcctataaaactgacacatgggcccaattctcgattgaaaggataatgtgtcataaaatagctctagtagagctaaccttgcttgatgtgaacttacaagaagatgcgactgagacaggatctagttgcatactatgtctcgcttagtcaaaagaataagtaggaccgagaggattgaatactggtcgtgcatatactgattatatgcgatgaccaagtagacctcttctgcaactagtaaataatgtttctttacataggtttggtctgaatgactaatgtgttcgatgactcgttagggactcgcgtgttccgcgttgtcaatgcatggaatgtttgattatgcgatcatgatgaacgcagacatccaaacgataggctcgaaggccatccggtgagtacaggatcgtagagcttgtgagctcgtgtgttagaatatgaatgggcaactcgcagcttatcaagtcgcatacgttgatgtacttaatacaagaacagattaaattgttcttcattcattctttaaatatttaatttgattaaatactgtaatttattgtaaaaataattctaaattgatcaattatgtaatcctaaaacagacttgctttctatataaatgagtgatccaaatcaaatataccaggaagaaatcattacaaaagtggactaagcagaccgaactttgacttgaccactataattctcttgttatctctttatttctactttcattttgtctatttagtagcctatatcttgagtactcgctattccaggtgattacttgcacgtctgtatttaagtgttctaattttatttgaatactcgtatattttggtgtcgtccaatttcctccaataacatttgacatcgtttgtggaaaaaaagtacttttgaaaatttctagaggagaatcgagatggctacagattagaaaacacatgaacaacaacaatggatctttcaatgttggcaccatcaatgtccctcattatggagaaggaacataccccattgatgttgtcatcggaggagtagggcgtaccactatgactcccctcaacctatttcctgagttcgcatgacatgctggagaaacctcaacaccagcggctactgtgggacaattcccaccaatcacacctgtcattgccttcaagggtatcattcaactcacaaccttgcagtatacgattatgcagaaacaaatgtgggcattgcaagcagagatcgtaggaagagatcagatttaatcctgatgtctgccacgaatcccaaatcaaagtatgttaagtgcatgagaaattacagatggatcgattcagaccatgtcttcatgcgaccaagaaaaaatgtcaaggttttcccttagaaatttgatcaatttagattttatctttgttgctaaacctcggccaattttgagtttcctagttggcatggagaggtcgatatctacttcttctaattcctcaaatggtctaaagttatttgtaagatccccaaagcgaggatctatgtttgtctccttgccttgggcggactctcacctcccttggtcgactcggtgttcgagctcttggtgggcaagtcttccttttttcctttggatagagcgatgttataacattgtcagggagattgttggtctcctcttaggcatccgatgttgggcttcgtgccctaaaaaaactttgtttcaatgtaatcttttctat

SEQ ID NO: 294898 - DNA, 1079 bp, Cannabis indica
agggcaaaatagaggcggttctttatgagaaatgttaaaaggtgcttagcaccctcttacgtgttaagatcgttattgttgtaattaagtaatgagttttatatagtttaatagtataacttttagaaagtatcgctgtagaaggtgtcaagtaccactaatacctaatatcaatatatactctttatatatatattatatataatttttctttaaatgatatgagaaactattctactattttttttagaaagtttaattataacatcaattcaattcactcagcacataattaatatttaataatataacatacataattttattattttataaatatttagtttatataaatatattactattagtcttgttagcttggatcacttgcgatggaggcgtttgatggtgagcattgctagcaagagaaaggcgcttgcgccgaggaaggataagacgactgcagcggctccttggtggcaaaatttgtcgaaaacattgcaaaccttcttccattgcacatgtgaattgccttgcaatccaatcaaaccaacggctgctgcggctccattactagagaagagcaatcctaccatcatcatatcaaaaatggcgataacaaaacctaagttaccgctcttatcttttgcgtgattcgcgaatgaaaatattagagaaattaacgcgtaggaacttgctatggcatttgctaccacaaaatacctgagaaaaaaaatatttgagctttattaatgataaaaataaatgttgcttcaaaagtataatagaaagaaaaatatgacattcttgttaatttattgtttctgtgcatactctgttacttgtgtagtatcagatttcgttataaaatatagctagactagagtacacacgaacatacattagttatactttatttttattttcttacgtactatatatttatatatagattacatataacttttaaaaataaaagtgtataacatggttcgtaggctaattcaaatggttattaattctccatagtaataataatgttgggaccaggggcggacccaccttgtagcgaggggggg

SEQ ID NO: 294899 - DNA, 4013 bp, Cannabis indica
gcaccagcgcttgatcagctatggaaaacagaaagaggagagagttaaggactttttctgacgttcaatcgcagatccaaaagatttgtggggaaattgctgggagcttgaacctgaatgaccaagtaggaacaccttctgttgatgagtctgacctaactctgaagaagttagacgaatatcatgcgcagcttcaagaacttcaaaaggagaaggtaagtgttataccgagggtccttttttgactaatgagtgagattgaccctagcttgtgctatctgtggattgatcactgcaaattacttgtttgatctggcagagtgataggttgcagaaggtgctggaatttgttagctctgtgcatgatttgtgtgctgtccttggaatggacttcttcagtaccgttactgaggttcatcctagcttaaatgactcaactggcgtgcagtccaagagcattagtaatgataccctatctaggctggctaagacagtcatagcactaaaagaagataagaagcagaggcttcaaaaagtataccatttttcattttctcactttacactcaaatcactaaaatatatttcattatatgttttatttatactgtcttgtgtaataataagttgacctgtatcttcttctgcagctccaagagctagcttctcaacttattgatttatggaatctgatggatactcctgaggaggaaagggaactatttgaccatgttacctgcaacatttcagcatcagttgatgaggtgactgttcccggggctctcgctttggatttgatcgagcaggtactgacttaaagttacaacttatttgcaatttaaaataaatggtggcttttattttttattgtcattaggtttatatatattttttttttgtctaggctgaggtggaagtggataggcttgatcagctcaaatcgagcaggatgaaggaaattgcctttaaaaagcaatcagaacttgaagagatatttgctcgtgctcatatagaaatagatccagaagctgcaagggaaaaaataatggcaatgattgattctggggatgttgagcctgctgagttgctggctgacatggacaatcagatagcaaaagcaaaagacgaatctctcagtagaaaggacatattggacaaagttgaaaaatggatgtcagcctgtgaggaagaaagttggcttgaagactacaatcgggtatttgtcattattattgtctatgccgatgcatttatatctgtactttacacggaatggaactcgtgaattttcaatcaatttgtattgttttattgtggatttccatctaatctataaaacaccctggtcaagaattttaacatcaccaaagataaataataaaaagatatcttgtgggatggcactgttatggtacattcaaggcttttcatatggattatgggtaactcacttttatattttcaaatgggcatagaaagcttttcagtccttaaataattgaatcttaccaagattttcttgctcaatcaggatgagaacaggtataatgcaagtagaggtgcacatctcaatctcaagcgtgcagagagagcccggattctggttaataaaattccaggtatgcataaaatttggaagcataattcttgtagttggacataaatgtgggtgcttatatactgcagaaatgtactttgaatacttgttgaacatatttgctctgtttatactaaaaacatttctagcattttgtcttccataaacagctttttagttctttgagcttgaggtatgttgtgatttaatttttatgttaatttccaaattttattttatttatttggttttctttgccatacagctcttgttgagactttggttgccaaaactcgtgcttgggaggaggatcatggcatgtcatttacttatgatggtgttcccctccttgctatgctagatgaatatgccatgctcaggcaggaaagagaagaagagaagaggaggatgagagtaagtatcaatagacttttattatttgtgtaatgtatcaatagactggttgattagctacttagtgatgctgtacttataaaattattcttctctatctgcctaacaaggacaaattactcttgacacgacctcatattaacctggatcttcacttaaatagtttgtgtttggtattgatactctgatttcattctttcttactcgtgtacttgactgaaattcgtggacttatcaggatcagaagaagtaccaagagctgcagaactcagaacaggaagccatatttggctccaagcctagtcctgctcgaccagttagtgcaaagaaggtggcaggtccacgtgcgaatggaggtgccaatggaacaccaaacagaaggctatcacttaatcaaaacggagctaggtccacaactaaagatgcaaagagagaaaataggcttagtgctcctgtgaactacgtgtcaatgtcaaaagaagatgctgcctcccatgtttcaggcaccgaccctattccggcttccccataatgataaagagagagatggagagagatctgtaggtttatacctctgttatattacttctgttattagttacgtctttagggatatatcctatgaaacagtgagaggagagttaagagtgagatgttagctgtgtatgttatattggcatttgaaggctttttacaacccattttttttttcttttttgttcaagtttaatcctttgtagcaatccaatcatggtggtgccttggtctgttccaaataattttgctccttgcatcactaagagactttcttcttattacgtttccatctctgtaatgctgttaatagttggggaaataaactgaagcctgcttttagctaatggacttttgggagcttgggaattacacatttgaaaagaaaacagttaggagtggattatcttggaagagtaacatgggtggactaaattatctttttattattgtaagataccattagggagatcaagtatatgtagaaatgaaattggtttattttattttctgtcagtagttgaatttgtgaagaaggctataattttaacacatattggatggagtagaatcaatggtgcacaaagcatagaagtggtttcgtgctcgttttgttgatttgatttttatgtcaataatgtattccttcaaggcactaccaataaggatatttttatgtcagtcacaagactttattgataataatcattctaacacgaacaagctccttcagttttcgtgtagacacacatttttattcaaaatttcaccgtcaagcacaaactaacaactcagtacaagaacaaagtaaacttctaattaggaatggcaaacgggttgggtcagcccgacccatccagttagcacccctgaaccggatcgggttagactcgaactgattgttttgcctttttttttttaccacttttttaaaatgaggtcggtaatattaattttgattgaattaaaaaaaatgaaaagaatccaaaaatatatcttatccaagatcaatatcaatctaattcaacgtgtactccatacatccgatactggtaaactttgactatactttggagaagacataacacttatccaatgtgtaaatatactttatcgctgattatcatgtcagtataaatctagtgaactgacaaatcatgagaattaaacttttgaacatataatcatgattatattctattgtgctgacaacactataatcatgaacaaatatatatatatatatatgggtgcactcttaatgggtattaccattaatgggtaatattagaaaattttgagtttttatgattatatttttctatttaattagaaaaaattctcatttttacattatatgggctgagattggtccatcagctgaaaaaaaaaacaataaaaaaaaacgaagtttactaacaaaacgttaagtattagtactaatatttttactatataaataatattt

SEQ ID NO: 294900 - DNA, 4747 bp, Cannabis indica
gtccgggtctgggtcccggtccccgatccgaggtccagggtttgggtcggggtccgggtcccggtctgggtcctaggttcgaattggagattggtgttgatcctaaatcctttgtaaatattaaaatacaagctaatacggactatttgttatgtattaaataatacaacatacattgtattaaaaattttggtcgtaataattaatacaatacattgttttatccaaacatagtgttatttattatttaatacaatacgactcttatacggcgtaccaaacgagccctaagaggatgagttgaatgaggaaactttgaatgcttattatgagaatgaggatccaagaggtgctagggactcggtagggaagtctagcattcctgaccttaggaagtctagcattcctgacataaaccctaaaccttaagccttcaacacggaggtctccaaatcacattccctctagtagcacgaatcctcctaaatgtattatgtaattgaaataagaatgtttaacttagctaaaaatatacggtaatttatcgaatatataaaaatatttatagtataaacaaacccactaaagtatgtatgtacgtatatacaaagtaaaataaaatataagatcctcttattctcatagccagcaaaacttatctcattccttcattctacattataatttttacggaagacatccaagtcaaagtagtttaacaatataaaatttcagagttctctttttctttacttgtttttcctctcttcagtttgaaggtaatttaggcagatccatatataaagattctcaccagctacatatagttcacaatctggagcgacgtatgcatttgattgggttaaactgattatgcctccgtcggctaatggaatctgatgaacggatatcccaaccttcaatgttgttggggacacaaacgtcaaacaagatttggccaaggacgccatgaacgttaatgcttgttggtggattaggaaggtggatcagaccttcttgtctatgttcatcttgcatggacccgacatctctgccttcgtagtactccactgagctaggcaagtagagattgtcacctgcagccagagaaatcccctggaaactatttgagctagctgctgtttttgttaaagtagggattggctctactgtctcgtcatgcgttacctctacattgcctaatttttctccttcaagccgttttaatctttgagaatgattcctgctgatttacggaggagctctgtcactgcagcctcgtactgaattttgtaattcctatagtggcctgtggcaacatcaggttgagtttgaaaaatagaaacataatttaggaataagaatgcagttcgatcttgctagataatttagcaatatccagggagtacttaagttaagaaacatacccacatgaggtgagtcattccactttacaagatttacatcagccccaagttcttgcagtcgttgagcaaaattgtggataatttggaatggagcaagatcatcattttttgaacataatataagatatgggaccttcatgttctgcataagaatagtagtggttgatagaaaagaataagattaagagtagaactattgaattgaagagaaattaatgcacactttgttacttacagcagtagaatacagagtctgccaataatctgcacgctgttgttcaaacctactgagaaaaagagcatcaagactagaagcaataccatgagctaaccaagatactactcttggtggtttggacattttcatcacagttgggtgaagaatgaatttggttcctagatcactggtaaaatccactggacttgaatcatagatgtagccgcaaatgcagtctttaactagccggtaatcatccttagccaaaaataaaaaagtaaagacagagagagagaggaaaaaaatcagcaaagttgagccatcactatggcagtcatgttaaccttatttcatagttgagccaatgtacacattcatgctcaaataaagtgaagcgtctacagttatcatgacagaattactagtagcaagaaaagaaaatgcataccagatccaattgtgtttcacaaattccctcaattatctgccaaagaagaaatgcattcattaactggaatcacagtaaaaatacataactaaaacaaaaaaagtcctttaacattggaacatcccgtgtttgaagaggtttacctgaagaaccttgaccatgcaggctttaggaccaccagagaaagaagcaaatactactgggcgtggcttactttttagttcctgcaagcaaattatatatgcgattacttgtaaatcccatgtgatcaatcatatttcagggtgacttttacattacatgttttgtattaccctaatctggtcaggcacatttacaacttttctatattacttagatatggtgttctattaaatctgaatataaatgcaaatttcacagcaactataagtttactcaccactacaagctcttttaaaatatcaatggcaggcggtgttgctttctcggggaagaacctgcataaattaaagagatttttcgaacaaaagagaagcaatttagaactgcctttttttagtcttaccatcacataggaagcaacacagaaaggcagaatcattgcaacactaatgtatttccaaagtctaattctgttaaatagatggcattccattaatttctttttgagtctaaaacattaaatattttgcttcccaagtagatcttatcataataattcattcagtgagatgcagtcatattttgcaaccgaaccaacaagatggaacttgttacaattgcattaaaagttggtataatggtcatattctacgtccaacagaatataatcatcatgtgtgcttatggtcctttaagtttcatacaaataagtctgtaatgatcaatagtttaagaggaaagctttccacaattttcccaagatatatgaatgaaataatctagagtcgggtatcaatgaacaagaagaaacagaatcaaaaacacttttggaaagagtactctagtgaaagtggccatccaaatagacaaagttgttactggagtatacagtggactattcagccttaatcatgatggaaacaaagatggatcttctcgaaggcaagaaattgagatcgaatggtccaaccgaaacgcggacgaaggaacgtatattgagagtagactaaggttaagtgtccaaataggaaggacaaacttggtatgcttatagttattgatgtcttctatagatcaatttttgtagtctggaagatgaagaagctgcttgagttgtaagtgtgaattatatttttcaagttgcagaggcattcccacaatatagtgaacttgaaagaaaagctgattaggagtttgtacagttcagtctttgttgtaggtgtaagtttctcaaattgctaggaagaataaacatttcaaaatcccataatcaagctttcttttttggcaataaagtatgccctttttaatcccaaaataggtctgtatatgtattttgttcttggtacactatacccattacaattgtttgtcttcgtcaaaaaaagtcaacgtaatcaatgacccaccaacccagaactaacccaatttaagagagaaatcgaaactgaactatctcatcgagacttatcaacagtaataaaattccactctaacgacaatctagttgtatctggaatacatttaagaaaaccacattttgcataaacaaaagaagaaaactcagtgcaaaacccatacatagagctccacaagtgaggtataatccagcaaatcaaacaagcaaaactcaattagatggttttctgaaaccaagtcaacccgtaaaacccacatagctaattatacaagaaacacaaaacccataaaagataattcgaaagctggcaaaaaaagaaaaaagaataccactgaactcacatattgagaaattgagagtggcaaacgagagaattccatcccaaagaggtgtagagctgaacataactcttcaagtgtctttcatggctggacatccatgcgaacactacaacaattccttcaactttctcacatcgctcttttctcccccagtaataccttcccccaaatccccacatcttcttcgttctcgttccaaccaaaaacaaacttttactacgtctaccaaaattcttcgaaaattctcccaaattaaacagataaattactcaaaaaagaaaaattgatattccaggagaagagatgttaagctggtaaatgattttgtcgtatccacaattttgcacaaatgttgtattttttgtttcaaggatatgcgtgatgatcttcgagttttggattaagtgcaatcaagtagttgctgttacctctgcaacttccaacaaaagcggcccacgtaggacccaccatacgatttttctcctcatgaactacccatcatctattgatcgagtggaagaccatcacaatgctagcaagttgggctaaacttggggcgaatttatcgagtttcgggttcaaaaaataaaaccgaacctggacccgaatagggcacgggttggctggttggcaggtcacggattgacagatttcggttggccgagttgaccgaattggcaggttgactcggtcaactcgatcaactccttaaaaaatttattttttttatttaaaactaataaaaataac

SEQ ID NO: 294901 - DNA, 4566 bp, Cannabis indica
caatattaaccaactacaaagggtaagttggtaattaaaaccctgacaattctaacgcttctaacatctaactataatactccgatgatattctataacatataaaatatgactctctaaagacccaacgtcgatgtccacaacctccgaacacaatcacagaaattaggtaatttacataaaatagcataataacatatataataataaatatatttccaaaatataaatttcataattattaattaatctcatacacaaaccttaattatttaatgattcaaagcattaaccatatgcggtctttacaatgaatatctaaacacaagtcagaacgaaattagtaaacttccatgggaattttagagtaatcaacatctcttcaaagaaatcccaatccaaggtatcataagccttttgtagatcaatcttgatcatgtaattaggctttgaaaccttccttccataattcctaatcaaatcctaacatatcatgatgttatgtgcaatatacctcctcccacttaatgaatccttcctgatttagagctactagatcaggaagagtgtttttaagcctagagcaaatcagcttggtagccactttataaagcacattacaacaagatataagcctaaaattactcaccttgttagggcattcgattttaggaattaacgttataactgtagaattgatttcctttaacaagttacctgattgaaggaatgatgacattgcttcacaaacatccctgccaataagatcccaattttccagaaagaagaagctaccaaaaccatatggtctagggcttttgattccagggatgctaaacatagcatttttaatttcatcttctgtaaattcttacatcagggttgcaacctgaatatcttacaaaactgggccctctgcaacaagctccgcaacagccacatttccatccctccaaacccccaaatggtcaaaaagaccattaattgtatttttcttcttcctacccgacgctttgtgatggaagtatttggtattttgatctccacattttagccaaagagcccgacttcgctggcgccaatacgtttcatctttttccaacaatacatttaatcttttttcctgttgcttaatttcaagccaattttcaggttgttgagcagtagaaaggtgattgaacatctttttcgccttactcgctcctcatttaactgcttttttcttccttatattccatcttttcaattcgccaccacacttaattgactttcttttaaacccactggctaaatttatctccccctcacttccccaattacgatgaataattgccttgcattcatcctcctcacaccaagcttcctcaaagtgaaaccgacttcttctaccctctttgacaccggtctctacttgatcactaataggttaattcaccaccaaagctcgatggtccgattcccaccaatctaaaaccctcacatttgccccctcaaatagttttaaccactcctcattgcacaacccccgatctagtctctcgatcacccccgtatccctatgcccattacaccaagtgagcgcggttttacaactgccaaaatcaatcaattgacacacatcaatcgcttccctaaaatccccaatacacagccattgtcctttattctcacccgcaatatgttttagaagttcccatgaaaacatcctttgttgtttatctggattcccatagaaacacgttaaataccacataaccaatcccatcccagtaaccacagatgcaatatttccaggcgaactagaatgaactcttatatccaattcatccttccacatgagcaacaaacccccactcaaccccactcaatccaccacccagaattttgtaaattgtaattctgcacataatatctgagcttgatgccgcactaacttactctccatcaaaaaaattatactcgggttaaattcccgaacatgggattgcagtgcaagcaatgtccaagggttcccaattccttgggcattccaactttgcgaatacattatgctcggcggtcttgatccagagggctcgccgtttcagtagtgaacacatgaggagataaatcaaaagtagaagaaatagcaacttcaacattaatactgttatccaagacatcagtgcgattcaaaaggccaccgtgacttcccacatcgttgtctcgcgagtctccaacatcaattatttccttcccctttccaaaagcacgggccttatttttgatagagacccgtcggtgttgattgatgccagaagaatgtgatgacctcgcacccgtggcctgcacaaaagaacctcccacaatagccgcatcaagctcctgaatcacctccttcccctttccttccaatctcacacccccatattcattgtgctcccttaactgtgaactacccccctgagctccacatttcctcttcttcagatcaacatctccatcgaacctatcacttctatctgtccctacttctttattactttgagtttaccccaacaaagaagaagacccaaggaatgcattatgtaaacgatttgtattagaaagcccaaccccaatactattcggccccattccctccttctcagcaatatttgatccatcatttagctggcccagttcagaaatagtagaattaactttgggctcaacagtaggcccattccgtgccacctcaccgacaacaccaaccccagcactcctatttaaactcccctattcccatctccttcgtccttctagtaactgccctctccttgttccacgatcatcggcgtatcacaacttccgacagcctctatcaaagttgaaataagagtttctaccacaccgatcgtcgttcacccgtctccagagcatcagcctcgcaacccctttgcccattctcagtttccatttccgcagcatgattcaatcttgcttattgcatatgaaatgctctgaatccattcggcattgggtcatcgtccttaagccaagcaccatattttggaacaacagtcccatccacatccgtttcagtcacttcctccttctctcagtcagtatgctcatgtccccatatgccacatttgaagcacaatagcgacaccgtctcaaatttgagctgaatccaagctttattgccattagatggaatgaatctcaccataaaaatactttgataaagtggaaatccaatgcgaaccctcacataattattcaggaaaacttgtttggtattcgtccatttaatatccgattacctataccacccccgccaacgaactaatccgtctaacattcttgattgtgaatacatttaatggaaacccccttatctttacccaagaaaaaactgtatcaagctttgcatcttgccaattccccgtacctggccactcttctagaattagaaaccccccattgaagagccaccactgtttttccagtacccattgggcgtcctgtgtcgattggaacgaaagtccaatcagatttgcatccgtagacccttcgagcaccttcaccttccagtttaaaacattcctccaaattcttgtaaacatattctggaataaattctcagtgatctctcttttatccacaatcctacccattaatgatattttaccgaaatcagttgctgcatcttcattcacctcccaatcatcctcttgctccaccacaagtttgttagttaaattaaccaaatctttaacaccatcagagttatcaattccggccattaatccgattagtattaagattccaatccccttcatcaagatatagtcgtatagacaaagcagttgcaggacccttaagactattttatagctctctattcaaagtactctaatctttttttaacatttttctaatatatttatacaaaaacctgacgaaaaactgttactaatttatttatttttattattagacacacttaattataaagtgttgctaaaaaattcttgtatttaaaattttaatatataaaaataaatagtaataaccaataataacacttataaaaaaagtgtttttattcatactagatcaaagataaaaagtgacacttttcaataaatgtggtcttataattaattaatataaatttatatatacttatatttcgtgaaagataaagataaatacgtgagtggagtataacttccgttaatttagctacaaagttaaaaggaaaactacccactatcttttaaccactatataaaccaatctttctaaaataaaaaatcatacaattcaatcgagcattaaggaattacataatgtttgatgttcttcatcaatattctttatcaatgttatgtgagaaagctcatcacatttacaggattgtaatattatacttttggttcatgtgaatgtagttttctattgtttcaatttatttgaattattattttcatcttctatttatgattacacattcatgtgttgtttaatctgtaaatgaatatcttttatgtaaatattttttttttatcaagaaggaacaaacttcattaatcacaa

SEQ ID NO: 294902 - DNA, 6100 bp, Cannabis indica
agattaatttcatatgatatcttcatattatccagcgagttcacttatgggaggacggtccatgacctcagacgcaatccgagcattactctggaggaccgggtcaatatcgggcaacttgggaacttgggccaacaaatcaatagtccgtcgcaagagacgggccagatcaccctcatccattgcacaatccatcatcatttctctccaagtcagcccagaagcccaagcttcaaccattcccgaaaattggctatccaaactacacacaatattcactccatgtttttcttgtagctctaccagtgagcttctttgctcgtttaaaaagcttattacgtccactacaactgatgttgcttcgtatatatagctgttgtttttccagggacgaactttaatcccttcagagactaaactagctagaactccagccagttgtgccggctttagttccgttaagatgttattccggagaaccattgctagccatagttcattctcacctcgaattgaggctgctgtctcaccgagcgggaatataacatgggtgtttatgtctaatgcccgagactcgtgtatgacattgcttatttgtaagaactccttccacccagatggttcaatctgctctattctatttgtcaaacgtcttgatctaagcttcaaacgcttgatcttctcctccgtcagcttcgtcatgtcaatgacttttttgtattctttaaacccttgtgtgcgtgatatcctcttcttcaaacgtgaaactttggttctttgttgtttgtaggattccacagtgccatggtatgcttctgatatgtgtaatagctcatcattttctgaaagactgtttaaaaccggcacgttcaaactccacgaccatgtctccagagatccttccatgcaccatacaccaccaaattcagaacctgaaagcttctcccatttcatgtcatccttatcaagaagcttcctcataatttcccgtggcaaagcatccccctgagctaaagcaacatttgggaagcccgtcttatataccgtcttaatccacttttctgttaatagataccatgaattatctgagccaagagccacataatatgatggctctaaacttggttcagcgtcagaaccagacttttcttttatgttgtttaatgaaaaagcctcatcggtagataccatattcttaagttttgaaccctctagtgagtctaccttccctaaataaacagcaggaacagcatgttgaactccttctgaatccttgtattggagacatagaaagggtagttgtccactttcaaactcctctaatagaggtttcagagaatgaatcttctgtgattccatcttccttcgtagttcagtccttaatcgtttttcggccctcagttcttcctgcagatctgtaatctccttgtatgctgcctctgatagaagcttcctactttttctgtctatagcatcgtcagtaagttcagaattaagcaattcaatctctttctcgattttagttacctcttctcttgcggcaagcattacattactgctaacatagtttccaaaactttgctcgaccaacttcctagcttcatccaaagtcctccctttttggaaggaatttggatcttctgatacatttgctctgcgggtgacttttgcaccagcaagaagatttaaaaccattccataggaagctgtaaactgtgatacaagaggttcaagtccagaaaacagaaccttggtgcattcttcagcgccttcaaagggagtctgaacaagaacaacgtgaccctttttgtcaatgcccctacgtccagcgcgtccagccatttgtagaagttcatttggggttaaatggacacggccgctatcactccttttgttgagggatgcaatgactgctgtcctagcaggcatgttgattccagcagccagtgtttctgtagcaaagactaccttaacaagtcctcgctggaaaagttcttctataaaggacttccacaaaggtagacaaccagcatgatgtgcagcaactccttgccgtagtcccttgacagcagtttgcctgatggcatcaggatactgaatgcgaaatctcttcaaggctagctcaacctcacttgcttcacattcatctaagaggttgtaatcttcaaggtattgaacagctgcatcacagcctttcctgctaaaaatgaaccagactgcaggcagcatatccttggacttaagttgccatagtgtatcggtaatttgaggaacctaacagaaaaaacacaagttaatgcagattacgatgattttctaatctttagcgatctacaaaaaaacataaataattgaagaaacaaatgcttgtgcttggaagtgtctagatagttgatgcagcaagttcttacttgggaacggcgtattgtattgatgtcgttctttgaaagaggttgaccattattgctacgagtaccatcataatcaaaaaattcacttgtatgttttcttgaattccttcgtttactagcatctcgggaagatcttattcctgaactattaagttgtaggtaattgagtgaacacttcctgttgcaattaaagaatatattcatcattaaatcattacctgctttacaaggcacatagacaaaatgcagatcaattaaatggacgagtatgaccagatctcagtagcaatatgcacaaaatatgaaatatcagtaacttattatttccaatttacatcaggaatattcagtagcaaaataatagtgaaacttaaccattaaccctataatatatgaccattctatcccaagttcgaataccgctactctaatgtcaatatcttaccaattatataaatgtttatgtaacgatattcattgtgtgttaacagaatttgttgtgatttaacagaccattttataaaaaatctgttaatattaacagaagctattaattattaaggtgcgtctcttcaagagattgcaaagaaatataactaatttataaacaatacgattgagttatgtttctacaaaaagttgcaaagaaatataaatataaccaatttgtaaatgattttataagcttgaaaactgatatctaccgttaggaaagatgctgaaaattcttgtgcgatagattgcagaaggtaatgcatatattgtttatttggttcaagccgtaaggattgattaggtgctaatcttttgaagaagatgatggccatacatatcctttttcattcttaaaaagtatgttttgagaaagtttggtctaaatattaattaggggtcttactctaatattgccatttttttcactgactgtgctatatcagcataactatttaggatgaaagttgaattgtttgatgtatttcaaaaatcttggtcagttttaaatatatattttgtgtttacaatatatatatttatatatatatattgggtttacaatactatttaatgtatggaatggattaatgcctgctaacaaacatgattttgcatgcattatactatttgttgttgtacaagcaaagttcggtcaatatttgatgtagtagaggaagcttcggaagttggtgtcatgcacagcgttaacagtagttgcttattttcatttgttgcttatttctttttcattcttatttttatgagtcactttccgttttgtgatagtatagtgatcttttgaaaagtaaattgatatatgtaatagttgtttttggcttgacacagattttggaatgagatatcccgtgttcttgtctttgccttcacaagcaaactgacttgtgagttaaattaacaatttaaggtttgtttggtatgccgtattacaccgtattgtattttatagtattatattaaattatattttatacaatatttatatgtaaaactatatgtggtattaacttttatgaactaaacatgttgatttaaagattttaatttcttgaacatattttaattttaaagattttattgcatgatagttctaactagtatatatataacacacactcctcttttaaaactttagaggaaggctacaagcttatatagcaataacctcaaaataacatttcaaagcaaagaagaaaacaaaacgaatcgcaagaaattaagtcagattactgtgcataaactagtatatatatatatacctattcattcgtgttccagtctcgtcgagaagaggtaacaaggatgtcttcgtagagaaatgccaagtcaagggtactggtcgctttgatgatgttaccaactctgttttaccgtgaatctagatgcaagatgaatacaaacaatatcaatcctcctgcgattccgtatatcactaatacaagtaactcaaacaaatagaaagaacgtgaggtaaggaggtcatcacgaagtcacactaccttaccaatccaaccagcaagctcatccggatttgctacagtcgctgatagacatatgagttgcacttcttttgggcagtaaataacctaacatttataaatttgttgaatcaaaatagaatcatatactaacaaattggcgctaataatattacaatattttatttttttacttactatctcctcccacaccgtaccacgagatatatcacttagatagtggacttcatctagtacaatcacatcaacatgaaaaagactatgtccagaggaaaccattcccacactgcacagagaagttacagatttacggttgtgcttaatggcagcactaaactcgagctaaagagtaggcatcaaaaaaggacaatatgtggtttatcagtagattcattagatacactcgtcatcaataaagctccaaattttcaaataaataaataaaggtccaagatgcacctttttgaaggaaaatttacaacactagtatccaaaatggattgttggttgctacaaaaatgtacctctggtacaacatgttgcgcaagatctccgttgtcatgattaaaatctgagcatctttgttcactgaagaatctccagtgagcaagccgacattgctgtctccgaatgtctcccttaaattacataataaagaaacaatttatcatatgaagtacatagaccatgacagacttttaacattatgaaattcaagcttaataataagtaccgaaattcacgaaacttctgattagataaggccttgagaggtgttgtatagagcagtctccttctcctggctactgtagcaactgctgcagcttccgctatcaaagtcttcccgctgctagtaggtgcagataccaccacggaagaaccattcaggaacgcttttatggccaacctctttaaaaagaggtcaaagtaatgcataccaactattactctttcgaaaatgaagattcaatactgggaaaaaaaaacatttgcgataatttacctgaaatttatcaattcggaaatcgtagacggaagcgagctcatcgacatctaaaatttcctcgccgaactctctgacttcgttttgcaacttctcgactctctgccacctgaaatcctcgggtcgactcgagtcctcggctgccgccactgagaaatcgacctcatcgtcactctggtcaagtccttctgataagtcgccggaaatatcaccatcctcatattcttcggcggcaacatcgtcttcgtcgtcttcgtcttcatcatcatcatcatcaaatgcatcatcttcttcgtccacatccgataagtgtggttcaacagagaaggcagagctccgagacttcttcaacgaaactctgaatcgcaacgagcttggagaatgtgcgggaagcgatttagggaaacagaaggctagggtttgactgacagtagttagacgtttggaaatggaggagtggaggtagaggcgcgtggagctgtgcgacgacgataaaattgaagagagagaaatagcggtcatggcgggagagaagcttacttctgcaatttggatacgttcttaggcttatcggcttcatctttcgtgttttattattattattattattattattattaaccgaattttatcttaaaaaaagatttaactgttataaatattaataattatgt

SEQ ID NO: 294903 - DNA, 3010 bp, Cannabis indica
ttccatggacctgaggtacctcgctatgttcttctcaccgtcggatacacctggttttgctctctttccatcatcatccttgtccctgccgatatctggaccgtatgtttcccatgtcttcattatttatattttcatttttcctgatcatcattgtttgataaattaggtcgcccattcttgagtcatcataaccctaatttaggttcgacattgtagaatttatgattatggacataattttattgatcttttttattttttaacggcagaggtgatccagatgaatgatagttttgatttgattgcttgtttgtagctttggatttctttttctagttgttgacatctcatcgccgcagagctcaattgctcattttgtctaaattttggggcaatgcaatgtgataggtttagacttagttatatatatacaagttcaatattacgcatacgtctgtatatatactgtgtgcacttcttaattaagctgcttttctgtccaataaaactgggaagtttattgtagtttcagagtatgcccgcagtaagcattacggatttacttttactctttattactttgtggcaagtgtttctcttttggatctttgacaggaaacattttggggcagctttagattttcctgtattgattttcattttatcctgttgttttgacgtaacaatagctataggctatagctgatatttcatatttttgaaagctatcacttcagttctctaattgtgtcgaggtgatttgcttactttcattattcacaaagtgcagtgcaattgaagaaatttcacttcttttaaagcatatttaaattggatgtaatggttgattgaagcatgcgttctctaaggattaatttgctttacttgtatttcttatttttttcttttaaaaaatgtatagacaatacacgagatcaagaatggaggcatttctttcttttggagctggtcatattggagcacgtttttattaacttggtacgcttccaaactataactcttctatcttccaacccgctttgtacatataagttgcaaagctttaaatggatactacatgctctagtatttttaatcacatttcaatcaagtcatcgtcggatacatatgctctatagttggcattacctgtcatatatatgtatatatagttatatacatttatgaactcatttttctaggaaaataaacgtccaatttaatagaatttataatattagatttgagaagatattccatttttttttatagaattctaggaaggcattttctattgaaatgccttgatttatatattttttcaggattttgatttaaaagttattaactttcatgtgcatattgtttatggtggctatggtggagtttattctctcaaatgttaggtggtatattattactatgatctatgtctggttagtttcacattctgcttaagatatcgtttctctttgtggttcatctttggctgcttatgtaggtgcgcagcgcagatgaccttttgtaatatgtgtaaatttcctcataaaattgagttatgctatgtctaagcagggctgtggtgccccttattcagggttttgaagatgctggagatttcactatgaaggagagattgaagactagtgttcatgttaatctagtcttctacctgattgtaggattgattggtctctttggacttattcttctcattatgatgcacaagaattggtttgtatctcacttttgtaaagttgatataccatattttagcacttggagctattcttcttatgcttatcaatatgtgtaaacaggaaaggaagtgttctgggttttgcaatggcctgctcaaatacttttggactggttactggtgcttttctccttggctttggtttgagtgaaattccaaggaacatttggagaaatgcagattggacaacccgccagaaagtcctttcccataaaattgctaaaatggccgtgaagcttgatgatgctcatcaagatctttcaaacgctattgtggtacttctctttttgtttatttaaattattatattattatttaaaaataatgcaaacaattcctgtttttgtttaaagaaaaaagaaaaatctagacctgttgggtttgttgtaccttttctttttgctatgattatctgcaatcagatattcatttgaggtgatacttgatagttgctggatgcttgagaccagtgatgggtcatgggtcataatgtaatgtgaacatttgaatttgaactttggaacagttttgtattgatacttcagtttttttgtcttcatagaaaatagagatttttcacaatgtattagagatatttaaaataatcttttgcaactctggtacattgacagtggaaaagactacgttttatgggttctgtttctcagtcttttgagtgaaagatccaatttgtagtatcggtattgtgaggacagaaataaaataaatacacatatttgtaaaatagagttttcagagtgaacacatatgaaatgggagagttcaagtcattaacattgagaaactaagagaaaggatcaagtaagtttaggacactgaaatcatcatttatttgtccattattcaacaggattcagtccctagaataagtgatactaagtagatgttatatatatatattttttgagaacaatctttgatctattatttgaaatatttattctatcaaggatgtaatagcttgtgaaagttcatgttgtatggctgtaactgtatgtggtatagctgattttatgaaatcgtaatgatctcttccttaataggttgctcaagcaacatccactcagatgtcgaagcgtgatcctttgaggccctacatggatgttattgataaaatgttatctcaaatggtatgtatttatttttttatacttcaatttctttgttggataaaggttctctttaaacatgttgaatgatatattcctcagttcagggaagacccat

SEQ ID NO: 294904 - DNA, 5858 bp, Cannabis indica
ttagtacgagaaactcaaaactttcgagtctgtatcgttcagaaacggataacgatatctttggtggttaatattggcttttatgacacacacagctgaatcagcgctttaaggttattttggtcaatttttgacctaaaatgggccggttgcaacttgttataataagaggcccaataagcccaataagtagagaatataccataaaacctgaacattatataaaattggtgtgaaatcttcacactattacacttcatatatgtactaaattatacactgatgtggtgtgcatacaattgcaccattaatggtgtgaaattttgaatcttacaccaagttagtgcatttttttttcaattctaaccctctttttttaatttattttaaaaaataatcataaattagttggtgacaatatacatgattataacatataatatgagattttaagtaaaatagtttattttttatcatatttggtgtaaatcaatttgcgttgttgcacagaaattggtgtaaaaaatacagtaaaatggtacaatctttggagataggtgagttaacggttaaggttatgttggtcaatttgatcataaatgggccggttgtaacttagataattctaggcccaaaaaaggcccgttaagggggaagagagtagagacctcaaatcctgaacaccggagaatctctctcctctctttcgctctaacaattttctggtgagtgagcgagagtgatctcagtactcattttcaatcctatctcaatacccaagtcgctgcatttgaactgaattttgctccaacaatggccgccaaaccacagatatttacgggattaaccctggcgtccacgcctgcctcttcttcctcctctactaacagccttagattatgtgtggtcaagaggcctctcactacgtccttcttcggtgccggaggtacgtcgtctctattgggtttttccctatcttcatttttctttctgggtatctcatgaattttcaattcgttcacaaactgagtcgcttttggggctcgaattcagtgggtattgatataataaaaaaactagctttgataattttcgtattgttttgacaaaatttgtaacttcattacattattgtgaaactgaaactatctagctttgatgattttgattgattggagttcatttaaagtgtttagcaaaagtatctgcatttactaatttatagcattttggtttagtgggagcattaaaagttgaggtagtcaagtcagctcgctccaataaaattcgtggtggtgctcttggtgcccgtatgaatctttttgatcggtttgctagagttgtcaaggtgatatgttttacaatgtttataaatatatgtgcatatatttcaatatgattttttttactaggactttcttattgaaatcatagcttatattcctattccagtcatatgccaatgcagtcataagttcctttgaagatcctgagaaaattttggatcaaacggttatcgaaatgagcgatgacttaacaaagatgcgtcaggcaacagcacaagtaagctctatactctactgctgtttgttcattacacattctcaagtccttttctttcttcatatattgccaaaaaaagaaaagaaaaagagggtttctgtggtggactggactgtagctagcctctttattagcttcttttactccagttaaagttacattgcttttgtagtttcttaagttatcttcatttataattgatcattttttccttttgatcattttaaggtattggcatctcaaaagcggttggagaataagtacaaagctgcccaacaagcttctgaggaatggtactgcagcgaataactcttccttccaaactagttgctgagagtttctgaccttacattgtattgtgctgtcacttaggtaccgcaaggcacaatttgccttggagaaaggagatgagaatcttgcacgtgaagctttaaagaggagaaaatcttttgcagtaagttcagcgtaattggcgtagtgcaaattgcttgcatatagttgtttattaagcatttacacaccacttgtttctttgcaggataatgctaattctttgaaagctcaacttgatcaacagaaaggtgttgttgaaaatcttgtctctaatacccgggtaagctaattttgttgtttgttatcgtttaactttattaattgtaccaattgtgaaactcatcatgcagcatggttcactgaattatacaaaattctgtaatttaaatgttttcaaaattaatcaaggaacatattcactttctcagttctcacttttttctttcttttggttctttcgtttaatctagcggtttgtctacaatagagttctgtgttttttcatgttgtcaactatttgaacaatggtttttttctttcttctttttttttcgtgtttttaaagagttggaacaatgaaaatagtcttactttttatttcttccaaatctctttcccacctctttacgggtctggattggaagttggctacaaggttaaccccacaccaggctacaacaacatgggatttgaccatccaactttgttgatgcgtatagtgatccagttactaatgatttatctacatcatgtgattaaactttttgctagcttctggagagcaagatacaagaagcgagatcaaagaaagataccctgaaagcacgtgcacagtctgcaaagtttgtctaaacagccccttaatgttatattatttgttgagatttttaataatatttgagtaattgttacttgcatgcttctttaggactcaaaccaaagtaagcgaaatgttgggaaatgtcaatacaagtaatgctctttccgcttttgaaaagatggaagagaaaggtatagacttcagactttagaaccactggttgagcatacatgttaagtttgtactggattttagctttataactgaaaacccaaatctatgttgccctgaaagcataaacagcttttttcaattttacaaaaccaacaattgttttttcttagaaaataaataaaattcaaatcacatcatattacttttgttggtttactcagaaagtctagataaaaatggtttacaaatatacagacaacaatgcttctttaagaaagatgcacactagtgtttttaaaaattttctggaaaagttggcgataatgtatgcgtatgcatgtattattatttttaaaaaaaatttataagatatacctacaaaagacagctttatcctacatttttcttcattgttcatgcttggtttggtagtatgtgtcgtaaggtgtccgaattgtagaatccattatactatttgaccattgaacttatatatagttttccatctaaaccatgtttctttggtgaggaattcatgcatggtttggtaaaatgtgttgtacaattttacagtggtcgaattcattgctctgatgagacttttagacaatattctgccaatgaagctatattcttaactttccatttcttctgatcttgtattcttgatatacattttcgtctcaacagtgatggcaatggagtctcaagcagaagctcttggtcaattaacttctgatgatctagaaggaaaggtagaactgcttctgtttccgacttactttgtccaactctcgattaagtcttatgcaatcagtcagttgatgatttttcaatctttttgcagtttgcattgctagagggctcgtcagttgacgatgatctagcaagcttgaagaaggaactttccggtagctcaaaggtaatgatttcctattttgacatatgaattaggacagtaaaatcttgaaatcatgtagttggatttcttaccttttttttttcaaaacaaaatatcagaaaggcgaacttccaccgggaagaagtgtcagcgccagctcaaatacaccatatccctttcaagatgctgagatagagagggagctcaaggaattgagacagaaggcaaaagacttctaatttttatttgcattggtcaaaaattgggggaatctactcctgtaggcaaattcaaattttgctatagcttcattcagctgtttgttttagcatatatttgtataggaaaacaccaaacaaaagtcctaatttggtattaattagattattaattctatggtgtatgtatatgtaagcagtttctgcttttgagcttcgtgcttatgtaaactagcttttggattatgtatgacattgacacccccaacaaaaatgtatattaagattatttttgacaatttcttgttcaaattatggaatatatacggcctcctccaatgtccaatgagaagaaaataatcctaaatatgatatttttctttgtttcttggtccaagtacagctattttacttgaatattattaacacaatttaagcattttagttttgaaaaacaaaaaggtatgctttgactacttgttatgcatgcaaaaaccacccattgttgacagttttgagtttgagatcatcatcagaattgaggagccaacttagtaatttcctctcaaaacagtattcatattattattcaaaacacaagatcaaccaaccccagttagtcaattcaactttttgccccttttctttcacattgacctcattgcccctcatacacaaaacaacaaaaggaaaaaactttgttttgatgatcaggggtatattggtaattttgaaatgttcaattattcacaaacatgcataacagtttgactgtttcaacaaaaatcccaattgtttctccactttaagcaacaaaaccaaccatagtatacatataatatataatataattcaacaagctcaagcatgagagcttgactttttcacacaccttggtcaacacgtaagtaaagttcattaatgaaaagcccaccaatccaaaaatgaaaaccagttaaactctcttcccaacttattataaatactcaaccacactttcaaatcctcaaaccaaaaccaaaaaggaaaaaagctcccattacttaattctttttcttaactcccattacaactgaaacccttttcatcaagatacaaaacataatctttgatttcaaagatgatgaacttcaaaaacaaaagtacccttttgattgttttgattgtggtaactttgttagtcttgagctgtactgacaaagtagaaggaagcagaatattatcagaggaacatgttcagattcagaaatacacgtcatcatcggagatgtacgagaaagctaagttcaccatggcttgctggcttcaacgcctggcttcaggtcctagtccaagaggacctggtcactaaattaattattgtcacaatttttataaatttttttatggttatttatttataattaggatgcctttatactagaattaataaatgtacattgaattacacactattgtaacacaaaattttgtaaagatacattatttgttcgttatttcttatatttgtttattgatttattaccttcatattcaacttataaataaataaatatatattggtgtgcgaaacgaaaacaattaatgacttacgattcagcataccggactaacaaaacgcaacataatcaagaaacaataaatcaagtaatctcaaaattcaagtaattaattaagcaataaaacataaaagaataacaccaggtttaacaaatttgagtcatgtgcaatgctctatatctcggtcaaaacagcaacattcatatctttattgatattagtatttataaagttacaagaatcttcataaactcttagagattacgagaaaatatttctctctctctct

SEQ ID NO: 294905 - DNA, 1897 bp, Cannabis indica
ctcacggttttatttttgggcaccttcccaaaaagtctcatactaataaagaaggtggaacgcttatatctaagacaactcttgtatattcttctaacgtgagacttggattgataccccaacactaagaacactttaataggagagcagcacattatcaaacaattgaaacattagatcactcaccttgctgattggttttgatataggaaagaagataaagagaagcaaccgaacaaagctagacatctttgcaccaatacaaagtccataacgagagcacacagcttgaggaattacctacaaatgaaaaattgattaacaagaaacaaaagagctcttaatgagaataattcaatcttgagtctaacagaagaatattaagctgttcttaacactaacctctgcgaacgcaacaacgagggtgactgacataataatagcagcccaagatggaaggattgagtccaggaaagtgggaagtgccttgaataagaagaaaagtagttagaataataaatttacttgacttgtagtatttgaaaaactgagtggctttcctacctccattgccagtgatttgcttattagaagagtacatagaagtaggtgttcattttttataagaggtagaatctttgctgcattaagagaaagaaacctaagaaaatgaacaaaaaaagagagaagaagaagaaactgagtcaattatggctgaaatacagtgatgtttaacctgcatttttttggtcatgaaactgaccagacttaataaggacctcaagatcaacttgggtgaaggacaagagtcctagagcaaggcctgaagtaatgcctgaaaataacacaaggacaaaacttatggctagaaacaaccaaaaatccagttcacaacatgggatatcatcgtttctcatgttgatgatattggagtagaaagtatcttggttataaaaacagattaaagttgatcataaactatgagaggaaaaaagggttgtaaattatgaatattggaatgacaaatatgattataaatacacacacaatcagcatattgatttgtctaaggaaataaacaaaggcaagaaaagcttattaagagaagagaacaaatggagcaaaatcaaaatgccacgccagcaaaagttgaattgatagtgagaggttgattttagtcttaaagaaaatgacactttaaaaaagtttttagttacaatctgcggcagatggcttctgccatatatgcacaaaacaaaaaagttcaactggggctgttcatatctgttgtgttatcaactgatcattctctcagttctaatatgaaaataaaacgtagctaataagaaaatgtttcattgaataatattaacacgtgcaatgtaatataatcatttgatttgagaaattgattttaagtggagattgctgggaaattcatgacaccatataagttagactaaacattattggtttgtgatttgtggatactctgactgatgatgatgacatcttaagaaaataataataataatttcaccgaatacaaaatactaaatttgattaggtaagatttgttgcttttttgggttttgctcagaataagaggagattaagaaaaatcaacgaacctgatgaaaaatggttactttgactgacttggctgactggctttgttttcttaacactaattattatattacggtaaatgacaattctggcttacctgttcatattacatgatatatttgtataagatttgatggggaaggttgttctaaactaatgtcctcaaatgcaatggttatggaaattagaagcaagggagtaacaagagtaggggtggcaaaatgtgtcatcgtgtcgtattcgtatcatattttatgtgacccgcttt

SEQ ID NO: 294906 - DNA, 3853 bp, Cannabis indica
aaaactaaaatattaaataaaactaacactacgtggcttggcacgtaacaatcacctaatatatatatatatatatttataagagtagttcacgatatatttgtgattatcttttggtgttgagcaacttataacgtgtataatataacaatgctcattgctaaaaattgtgttgtgtcaatgtaattatgctaaatttaatacatatttagggcgtgtttgaaaagtcatccgagaattagaattggaaagtcatctgagaattagaattgaatataattgaaagtaattatacagtttagcgtgtttgttaaggcacgtaattacactataattgtataattgaaagtaattgggaaagtctcagtcactctcttcagttctcataccccatgaaaatcgagtgtaattacactgtgtaattatatactcaaaataattttaattcacaaaaaggtctcatttattgttaacgaaattctgagttaaaaattaatgctttcattaagcccttttttaaaaattaagactttgaaaaaatgcatctccccagaaggaaaaactcaaatattttcccatcatggaaaataatttacagaatgttaatattgaataatgagagacggtgcatcgccctaggaaagagcctcaagggactcaacctcaagaaggccaaaatggaagaagacgtcctactaaatgggatttcaaaagagaggtaaatgagaaagagattccagaaaggagaagttctgatgcttatgaccccactagatatattccaattatgggactggaaaatcgtcaacttcagcagagactcgctgagtcaaactgaagaaacgaggaactagagtgcgtggctgctgctgcacgagtattcccgaatgatgcaccacttgtgcaagatgaacctccagttagatgactatgaggaagacctcacgagtcacgaactagaagtgcacgaggtcgcaatgtcagagaataatccaaataacccagatcaagaacacacgaggtttatgacaaacacgaggatctattattataaagtcatgccatttagattgaagaatgcaggacctacttactagcatcttgtaaatggaatgttggagcatcagatagggcgcaacgagatctatgtagataatatgttggtaaagtcagtaaaaaatgaagaccatgtgaatgatcctgcaaaatatttctcaatattgagaaaattcaaaatgaaattaaatccaaaacagtgttctttgagagtatcttcgatcaaaaattattatgacttggtcaaatcacattactcacgtatcttattcatggttatttatttaatattaaattttattaaatctcaaacatgtagttagtcataattattgtgatgtaaatcacggtagaaaataattatgaacatgatcaaaatattgaagtcctaagattagtcagtgcattagatttacagtaactagctaatctatgataaattctacttacactaagttaagtgttaagttctttctagaactttggtgaagtagatatataagagcaagggtatttattacattggactggaccgatcttgacttaatgttagatagcataatgtattattagctagctaatttagtcagatcactaatattgaccgtaggtcaatttaacctcaactttgagtaataagcattctaattcattaaattattgagttccttggtgtgttcattaacatcttactctatggactagtccatactttggattaggaacttagtagtttaattgagtgagagtgtttatcgtagatatgaaaatctatagtttcaattaatggaaatgaaatggtaatttccttatagctcagttcaaggagtttaaatgagtgagatctcacttcagtagcaatatcgtattgaaatttcatttacaaggaagtaagtgttttaaggataaaatactcttaggaatagaatggtaactttatattccacttatgtaaatcacctataaagagtagctattgatggttataacaataaataaggcatctgcataacgcatccatcacattttggaatgcatcaaagtctaaaacttcttgtaagaaatcgtgacactaagcaccaccgatgattaataactaactcttcctcttctacctcatcatctagcaagaactcatcctatttgttctctaattgaaccccagcccatttttccccaatctcctgaaggatcgaaaagttgaaagaacacaacaagatcacaaaatacacaactccctaattggagaggaaaacaaattaacatgtcaaaagacacgacaaattgttcttcacttattacttttatcacatttttggttatcaatcggcatagaagcaaagcgttatgtaacattttatgtcgttttggcgaaaacaaacatctaatatttttgcaagacgttactgcatgcattaggtcgactcttaatcgacgttaaaatatctatatattagcgataaagcgacatcccattccgatggtagtgtaagcacataattattcgtaaagtaacttttttcacatagcaaattactcttacttaatatacataaaataacacacatattaatatttactattttttttgcagttttggtgcattagtgcatactaatctattattgtttttttttcctctgatattaaatatcattgagaagagactagaatatcacaagcatatatatatgtacttccaacatttatctatatgtatacataaatataaatatagtgcaatctcaccaactttgcaatatagtctgaactgagctagagtggagaggtttgtccaaaatggataaggaacttttcacacgcacctttcctcaataataataatatttgattaaatgtcaatgctttcataccaaggaaagcatctatcgaaatggacatgttatgatgtgtgtgtaatgagtaatgagaaatcgttggtgatttttcattgtttccccatactgcttaaaacaatcgtacattaaaaaaaaatgatacaaaaggtacccaataaagacttaaaagatttgtgcataataactttcattaattttggtcgtctttggattttctcctttcaattgattttgattttgattttgaaaggtaaactcaattgattgtggttagtgactatgctttcttatgtgaaatctgcttggcttagcttctataagcttcttttgggccaaatcgagttcgggacccgaaatatatttttgagatttattttggcattaataggataattttgaaaatctgaaattatgtgttatatatgggtgtgatgaaagacttgtttgcccttgattgcataaatatgtttattattggctatgggagtattttggtaatttgaccctatgatgtaatattcaacaaaatcaatctttgtgtaaaatgaaatgtcattttctggttctttccagccctaggccgaacccgttctccctcttcctttctcatttttttctcttgaagttttatcaacttggatttgaagctttaatttgtgagaattggtgaggttttttacttaaagcttaagagaatttgtggtaagattcttaacctttttgttttgctaatttctaaaagttataatgaattgttaagtgttcttgatgttcttgatgtttatttggaaattgaatgcatgttgatttgaattaaggtgaaatatgatgtttttgtgttgattgagctagtaggcttataggtattgcatttagctggattttgaggggaattagggttgtgaggtgtgtttgaaatctaggtttggcatggttta

SEQ ID NO: 294907 - DNA, 8854 bp, Cannabis indica
aaccaaccaatttcaaaatcaaacacgtatccaaaaccctgtgactgctccaatcttcaatctccagattcaacaaaacaccaaaaaaagccctagaaaatcccccaaatcgcaaacacaaaaccttatcaatggaacacttgtaagtctagtgtgattctaccgttacgtatcactacaccaccagatttctcatatatatatatatatatatatatatacatgtattaaccctaataacatctttaagttatagcagccagccgcaccccaaaccaatttcgttctctctgaggtatgtgggtttaagttagtttattaaattattgtctaaattttgtatattattaaaaaatgtagtaaagtaatgctatgtatatcactttataatgcttgattgcagtttgtttggaggttttgatttatcccagttggtttggatttgagatttgggagtttttggcttggtggatttgaggtatttatcattattactaattacataaaatcctaatcctataaagggattaggattaatgatgatttgttgttttgaggcaaattttatattgtatttagtgtttcaattctgatatgtatgtgtcaattagctagtttagtgaattaaatgaaaagaacacaacagactgcaaaaatgcctattcagacattattttgatctaagtaacctatagtataccttagaaatcataagagtaaatttgtaaaaatgcctgaaaactgtattgtgtttgcttataataatttcttttacatgatgatcaaattatccaaccaaaaataattagaaaatacttattcagctggtttcgaattctaataatttccgaataattatgcccaaacctactatataagtcgaatctcatatagtccaaacccagttaacccattcttaataaaactaaggaccaaaaaaccaaacctaaactaacttaaaagccaaacttagaagcccacacctacccaaacatatgccttaataccttaatatacacatagggtttcacacatttatgattcatctttctcaactattagtcgattccttggcatagcactttggactttgttcattctatagtaattgtagtactagtagtaattgacgtacaagatactgataaaattattagggagatagcatgaaatcaagtatagaacacccaatcaaagcaaaatttcatttctttttgtttggtggtggttcaaagttgagactactcacaaacacattaaatcaagataccaaaccttgtcaataaagtgcgaatttcatccataaagttcttttgatcaagacaattgtaagtggggcttgagagaagttagaacttggatctgcagtgtgaaagattgttgtaagtgcttttgatttatccaagaaagcaaagagactataagctacataacaaatgtcaaatttcttattgaaagtagtgaatgcatgcaagcataagtttaagttcccttaaaaaatgaattatgaaattctttagtaaataatacaagcatatgtgtttgtcaccttttccagactatgtttgaaacaagttctttctataaatatctatctaagaggtgaatatgtaacagacttttgataaaatcctattaaatataagtcgaaactagccattgattcgacaaagaaacttaaagtatatatatagaagaaacatcgatatttggtgtcaaagtttatacatcttctacaattatttgtgttaatacaattttaaaattgtacaacataaaatgacaatgaaccacaaacaattaatcatgagctatagcacactgctcatgaagtccaactaagtgaagctaatcgagtactaaagaagaatgttatcattacattatattttgcgaacaatcccaaactatgatagcacaagcaataagcacacaaagatgtcattactgaccattttgtatgttgttagaaagtattttaagcataatttaccttttttaaaatctatgcatgagctggttctactcgagattagtagcataaggatcaagtcgacccttataaagtgtgggagaagcccatgtctagtctttgtctctcttttgtagtggtaaatgcatgatactattctctaccatttgactctagttccaaccaatctatatatataaatatatttttatatatatatatatatatgcagatcaattaaatttatgcataaattgttatatgacatttaagacgtgataaaaagttaaaaacccaaatataaaattatagccaatattatagtatagactatggacctagagaaagaaaaagaaaacagtaatttaaccctaagtcacaatcttcttctgttgtaattataattcgtgacatttctccaaactcaaatggacaacaccatcgttgaatgttaagaaacgaggccaacattgttgtaattctaattctgttgcaagaatgaatcttgtaatagagttgctttgaatgaacgcttgaagaaagtgttatatacatgtagaccttatttaaggttagtcctattcaatcatctttgacttgaagaataagaagtgataaagtaaatatttcagaccaaaatcaaagaaaaataatcaagaatagagacgtagacagataccattgtgatcgaagcaatgacgtttttctggagctaacttacaggccatggcttctgctgtagtcgtgcttctgttgtttcacctattttgttaccctctatgctctcttctctgcattcctccgcttgatttaagtagtgtactcatttagacaaaatgttacaaatgtacatcatggttgattgagcaaatttctttaaataaaagttcacaatatagtggccaacatgctgacttaaaagagagaaaatagttataattttgatagaaaagaattacatattctataattattatttcttcccatttgagcttctaatgcacgctacctaccaacatttactttaccacttttctttaaattttgtgtttgcaaaccaaactagcattgttgtggtcttcataaacaaagcttctatatatgaaaggtaagtattttcagtcttttatcttcttcgatatttcttgttatcttataaataataattttgattattttatattttaaatataaattacataagtaaacttaagaatcttttttaggatcgatttgtttatttttgttcattcacgttagtaaatcacgtaagattaacaaatttgccacgagtcatggtgtacttttgtgatattttgtctaggtggctagcactactcgtagataatcagagaaacaaagcaaaagctagagtagagagtaactaaataggcgaaacgaccaaaaagcttgattaaagaagaagcaatggccgagaaactggctccagaaaagcgccacaacttcattcacaatggtatttatctttagtcccgattctcttttctttgactttggtctctgaaacagttgattttcacttcttattctttaggtcaaaaggtgtttgaatgggaccagacactagatgaggtcaacatgtatataactcttccaccaaacgttcattccaagcaattctattgcaagattcagtctaagcatgttgaactcgggatcaagggcaatcctccttacctcaatgttagtcatgttacttaatgttcaccgtggtgttttatcagttttataatttagttaatttgagtcttattatcgcagcatgaccttgctagcccggtgaagacagatgattctttttggaccttaggtatattttttttgtgttttcttattcctcgaataaaatgtccttagttgcccatttggatttggagaaatatcacgaatttgaattacaacagtagagaactatgacttttagggattagatttttgagttttttatttgggtctatactaaagtactggctgaaattttatactggcgttttagttttactaggtcctaaatgccatataggatgccaatgcgtaacttctatagaagtgcatgtatatagattggctcgaactagagttcatagtttattaataaaaaattgtcattttttccgcaattggtagaggatggtataatgcatataacactacagaagagggacaaaggccagacttgggcttctcctatattgggtgagggccaactcgatccttacgctactgatctcgaacagaagcggctcatgcttcaaagatttcaagaagaggtaaattatgcttaaattgcattgtaatatcatgatataattgtctttatacaaaatgatcaaagtgcattctttttgtgctttatttgttgccatggttttggttcgtttctcaaatatataatgcaatgttaatttttatttttcgtgctgagttgttttcattgatttttgatctcttgttctttatttggactttctgagcactgtattgtagctgataattaaatgtttgtaatacattgtcattttatgttatacaattttaaaattgtatgggatagtaatggtaaaagatgaataattatgacatctaatatgtggcagttcttgcatatgtgttaagtttcttcgttgggccggtagtttcaattttcattttataggatttcatcaagaatcggttaaacattcacttctaagtagatatttttaaaaaaccattttaaaaagtttgtaaaagatgacaagcactttcatattattactaaaagaaatttagaattcatattttttagtgtattaaacgaacttatatttgcttgattttattactctaataagattttagtaatttgatgctgtgtagcttagagtctttttggtcttttagataagttaagcactgacaacatttttttgttatgtcattgacatgatacgctctttagtctgagaccagttgttttaacgctttgtttttaaattgcagaacccgggttttgacttctctcaagcccagttcactggcaactgtcctgatccaaggacctttatgggtggaattcgtactgattgacaatgtttggtatcttgatttaaaacttgcaaaatcacgacttaacatttagtaaataagacgatctaatgtgtttgtgaggagtctgaaccacaccttaaataaaaagaaatgaagtttggttttgattgggtgttctatatttggtttcatgctatctctgtaataattttatcggtgtattattatctctgaattactactattgtagcatgaacaaaattcaagtgttgtgtatgttagaaccatacttataaatttataattattattgatgctgactgttttcgtgtatatcagaaatgccaaggaactgactggtatttgtgaaagatgaatcatgaatgtgtgaagtcctatgtttggataactatgcttaatagcaagacactagcttgactcataaaaaggtcaaacttaatttggccatataaacaagagaatgaaaccatagaaaagtaaatgtttggctgaaaaggtgtgactaaaataggaattatattcttttctccatgtttaaattaaattgtaaggtttgatgtgaatgtgttcaatccaagaattctacacacgagttggaatcaaatgttgttggtgctgtttttagggttaataaagatttctcctgcctagtcaagtgcttcttcacacacacccttctgaaggtcttacattaactaggtatggtctattttaagttttaatcatgccaaacaacctaatttactttaatattcaaaatatctttgattttcttttcctatattttcacaactaaatttagtacattgggagaacaattgttgtgctaagtttttatttgctttatttatcatttctgtcttgttagaaaatgctaagattattaggtgtgttgtaggtgacaattctcacaaaagattcaattcccacccatggtgagggaccgaaaatatccccgacaccggggcctaattgttggcaactattgccatgatgttcttctccgagacgatgttgtagtggccgagactctcggcggtgctgtttccttcatttctgccgtgttcgatggcgtgttggtttgtcacaattcaatatcgaaagttggctgggacttcgcttattcgacccatcatgaaccaattgtagtgcctgattcgaaaaccactttgttccatgcacacttcagctctgaaatcgatggggatgggcaccaagatcggattttgaaaagggtctgcgcttgtgacccgatttggccctcagatctcccagaatcaagattcaattttggaatggcggttggggtcggcggggagattttgccagagacgcttgagaaaatgcttgaattatgtgaaacagtttctgtggatattcaggctttgatacgcgattttgatgccattgatggaactgtgaaacttgtggatttgaaggagagtgggttttatcaccttcttcctcaaattggatttataaaggcatcgggtgaagagacttcgtctctggacattgaggaagtgagaaaattgtgttgtgttgttgtaacaaatgggaaacatgggtgcacggtctactggcaggatgaggaagctcaaattgggcctttccctacgaaccaggttgatccaacgggtgcaggggacagttttcttgctgggttcgtggctggactcgtgcaaggtttgcccgttcctgatgctgcattgttgggtaacttatttgggtctctagctgttggtcaaataggtgtgcccaagttcgatttgaggttgtttcaggtatgttttatggagttccttaatacttcttcattgtttgaataatcaaattcattctgttctttgcaaaaagaagacttatgttgttgtagatatctttcatagtaaatgttacttgttctttataattagctaaatcaaaaagtgtttctaagaaaatgtattaagctccaattttattggttattagtttttgatgttatagacaattaagtcttacatggaaacaagtaaagatgttacttacgaaatcacttgctcactagacaaattcagggcttgaaagggttgggagaaatggcttaaagttctaatctttgcttgaaggatagccattataaatcataatctagaaaaaggatacacttttattatctcaaaagtttgtttgtgtacttatgattctttgaagtaatgaatggagtgggtagtttacacttttcttggaaaatgaaatggaatttgaaaacacctcatattgttaagctgaattgtctttatgatatgagtgaaaggctttaaagactggaagtcatttaaatattctttctctgttttacttgtaagaaaatgctgttctttttagtcattagttttttttctttgatgcctaccagagagttaaggaagaggtacagaggaggaagatgcagtgtaacagctacagcgaaatgaaagccgaagactcgaagcttatgaaggtgccaggatttgaacagtttcatgcatcactttcagcagcaaagatgatatctacttgtcctgtccaggaatgccaatgggatctgtcgatttctcctcccgaaacagtagatcagccgaaattgtttagtagtcctgtctttgaagagacggttcaaacaatcgacggtggcaaaccatgactggtaaaacttattttgtgccttttcaagcctttggattcaaataaaattgcatcaaagtaagagatgtttatgtgtagagagctaataggactcattatgtatcttatgtgttccctctgcaattaccatgatcatgtgcccctaattaattggttttggcagatatataaatgtattttgaaaagcttacttataaattgaacaagtaataaaatggccaatgccaatggcaagaacactcatattgtccacaaggattaaaatttaaacacattattaagtatagcaaataataaattaacaaaattttaaactaaactatccagtctagtaaggtaagctgctatagtacataacacaaaaagtactcaattttatttattttagaattacttcaaagatacacaataccacaattaaacaatagttatattatatatagacttttttacatctttccctcatatgtatagttattattatttgctaatatgcaaaataattaagcttaaattatcaaataagagaatttaacttatcatggattaatttttcaactcgctctactgtagccgaactaagatgattaacccagtctcccacttctccttttctaaaatagcttttattttcaaaatatggcatgaattttccatgtttattcacatccaactctttcaaatttttcaaactacaaagctccaatatttcatcaacaatacctagtgcctcttcctccaaagaaaaaggaaacccaacaaactcagccaaccttttcacttgagttttagtgtcctttttcaactcttcatacttgagaaacataaccttttgaggattctctacactttgcttccaatacccaagaatatggctccaaaatggcccataaacttccacaccattgcaatatgcatccacaaactcctctaaagtccactttgaagaacaatggtcgaggcgattaccatcatcagcttgatttgcgaaatgccaatgggaaacaatagtatcaagagggtttcgacagatgtaaacaatttgagattgtgattttataatagattttggtaaagagtcataaggtatgtgagtggagaatagtcttggagatggaatattttttattagagggggat

SEQ ID NO: 294908 - DNA, 5596 bp, Cannabis indica
aaaaaaaagacttagttctttttcaattgaactcgtgatctagcttagcattggaaactttagctaattattatggcatattttctgtctaaagtgaatatactaataataatttaaagaaaatatataattctaacatctattatttaaataatattattttaaatattaagaatttatgtaatagtaatttaatttaaaattatacattttcactaattttaataaataaatttttcataaaaaatctataaataaattattatgaattcttctgttttaatgcctattaaatttaaaatatatagataagactaattaaattagttatttagacctccaacatatgcaaatattggattacatgattcatcttgtcttatttaattaaattctaggcgccaaacgaactaaaattaaaaataggcattaatgttagaactaattttggctaaacgccaaattaaaacacttttggtgtttaagaaaattttcaaagctttagacccaaatatataaagctattcttgcttgatttttaattaattatccaaaatgaattttgacctggttctttttctaaaagattatttttaggtctagtgaacacataaaagcagtccagttttggtggcttaaaacctaacaagtgaaaactcaaatttattataagggatattaatgacacttaaccgtataaattaattttttgatagtaaaactctttaaacttgacttttattagttatttactttatccgttcaaaaaactttattaagtaccacagtagacataaaaaattttaataggaaatattgacgacaaaattacctgaatgctataattagtgacacctgactacataaattcattttttgtggtaaagtgacacttaaccacaaaaatcaataaaaaaaaaaaaaaaaaatcgattatgtagttaagtggctaatcatatatccccactaaaaatttatcacgtgtacattgtggtatgtctaccgtagcacttaacagcatcttttgaacacgctttttgaacaaaataggtaaatagctaacaaaaatgatgtttagaaaattttactaccaaaatatcaatttatataattaagtatcactaatcataaagtttaaatagctttaccaccaatattaattattataaatttaaattcctatttcgtagatattgttgttgcattttaacaataccatatgtttagaatgtctcacaaaaatctcaagaaaatataatcgtatatggtttgtgaaattaattcctcaaactcgtaggtcaaaactgatttcagagaaataaaaaaaagttcacatgatgatcttgcaagtcataacttgattcatatagaatgtttttgaatttttcaaaagtctaaacacgtctactcttaacatactacaaattcaacaaataaattcacatatgctcacaacccaaatctgaaaatatatatatatgatttttatcctaagttatagaaactttagttttcatcatcctttttgggttcctatctacacacatgcgtcatcaatcaccaacacaagtttataactaattataatactagctagaaaaaaactaaaacacttaacctcgtatcattttctaatcaaaaccaaaattcctcaaaatgtgaccttttttgaaggtcttaggcttgggtgaatatcttatttataatcacttttaagtctcccacatacaaaccaaagtcgttctatatcatagctttagcttaacaaagaagagtaaatgaaggaaagagttaaagaaactaccttgatttattcgctcttggattgcttccaagttttttaaatatcaagacatgaggtttgatgaaaagaaaatggaaaatagtaaatgatggaagagagagatagagagttttgacataattatatatgtatatagatttacatagtacatacatatatatttccaaaaccggttacctcttaacagagaaaataagctttgtgtaatatcattacttcctttctctcttaccaactctatcattcccaacatgtgacacctagctctaaaggtgactaatcttcccaagatatgagtcactacatctatccaattttgctctttcacacactgatttttaagaggtggtaatgctggtagctaccatatctcattagataacaatcaaccattttcgttggtctcacatccatcctagtgtaaactgcatttatttcccgagtagacgcacattatgacaactattattgcacgtcagtccaaacaagatcaaagaaactaggcatcgtaggaccctgtttggacctttatactagccttgttgatccaaacaatcttagtttgttgtatcttgtttggacctttgtactagcttttgcgtaatcaaagatgtgaagacttgtcggtaaggataatcataatatcaaccggtcatgctctggaaaggctctttgagtcttgactatcaatcaatgcagtggccaaccaactgacctaagtaaattcaaagttaatgttgctcaacttaacagtttaaaaagcgtgtcgtttctaagataagttgagggattatgtttactagtttaaactgtattaagaactaaataaaaagtaggctgatatccacaagtggaaatgactataataacaaatgcctagtaacagcctcacatatgtccataaacaaaaacgaaaagctgtgaatctcaatgattgtgtattcatttgagtttaaatctcacacgacattattctcaaagcagctgcattccctaggtcttggtgcaacattgaacagtaaggggagcacatgttctcaattcaccaagcacttctacaacaaaactgcaaaatttctattcaaactagattttgtttttcaatccatcagagcttcagcagtgcatacattctatttaaagcacttcctgttctacagctcccttgaagttttgcttgtgtagtacaaaatcctttcatctagtagagacattttggtcacctgcattgcctctgtccccgctgcaacaatagaagtgcggcaatttgactcgaccacaacccctgcaaccaaagaatactcgattaggtacagagataaaagaaaatgtttttttctcacaaataatcatcatctagaaatatgataacatcaattaacgagatttaaatgcgttggctgtccttgttgatgggtgaatgtgaaatggaaaaaattcaactccatgtttttcacaagaaatcaagcaatgaaagttttagaaacagcattcttccaatggtttattgaataatatatcaactttcaagcatctatctatcattcaaattcctaatgtaaggttttcaaatctaacaatacaacatattagagggttaaattaattctaacatggggtaaaaaatatattgaagtgtgccgtccacagcaattagtcccaaaatcccactaaatcggaaaaacaagcaaaataacttgttaaactcctacctgcatcttactataactggagtgggcttcaaagccttaggaccatttcttatgcctctcttgtgtggagaagtctacacagcagaaaatccaaaacgtatgaaccttcaaactaattccagaaatttaggaaagataaaagaatagcaagaccaaggaagtagaaagaccttcctcttggggacagccataagctccatcgatccaccaaatgagaaaatcgggaaaccaaatccaatatttttattattgtaagaatcctccagagatgcctctggcaaaaccatctgaggagatatcacattacgatctatgagcccatccaatgggccaggaatagcagcaccatgactccacctgagtcctaacaagctagaaattttccctccagcactcctcagcatcagcatcctaaatgccatctgcaacacgcaaaagaacaaagtcaaataaagatacacatgtatttagagaaacatgaggtagttttttcctcatcactcactagacatgaaataacaaactgtgcagctaagaatggtacattcaatttataataaaaagatttaatgactttgctacacaaacatactgtacaacacaaacacactgcatggcttcaattgtggacccaaaacatgaaaaacacaaactctgtcaaaattcttcaaaaaatatatggatacgctatcttggcctcatcaatcaaaggtaatgtttaattcatcttacattcttacataaataaccaaattatatatacattttttgtttatgtatctatatctctataaaagaaggagaatcttccaactaaatatctgagtttctaagaatgttgttattgacagccaacgaaactaaatatgtgtggcaggggcaccacaacattctcataaaaactcccacagagcccaaataagacacttgacagagctaatgaccaaaatttatggatattacctggaaggtcgtaccaatccagtgtagttcctttttcaatccataaagataaagatcatacgaatgtttattttctttcggccgctcgaactccagaactaaactcaagtcattgctcattccctcccactcatctttgctagcccatgcttgctgtaacaagtcttttgtctactagacttgtttgtctaaaagaagaaaagatgcagttcgtcctgtcaatcctccagggcccagataactcgattatatcccataggtaatgaacaccagataagtattttccattaatttgtttacttgaccatttggtacacaataattaggtagactctcaaacttgacctaaaattattcattaggaagactgatgtgctatatggtgtttactaattgcagtgattatatcctactctcacacaaactcatgtaagcaactattgaatgatattatttgcaagttctaagaaccactcatgtaagcaacggatgttaacagcgataatcatcaaatgggaaacaatataaacatccatcaaacacagcattaaagaaatggaattcaacaaatgatcaaccaataacccccaaacaaagaacaaatattcacccaaacccctaaaaaaggactaattaaaaattatacttccaaggatagaaagcattttagcacatgaaactaaaataatttggatttagagttaccgtagctgaggaaagtgaaccagtgtgccgacctcagagcttaatggctgtcacacttgaacgagagctcggagaggagttgcagtgtccgtggccgtgggaagaccaaaaaagagggtttcggaggctgaaaagcgacggctaaccggtgaggagagcgcctgagaaggggagaatgagacagtgagcgagagacaaaaaccagacgtggtagtgaagaagaaagaaaagtctagggttagggttagttgggcccaaattgtagtattttgagcccaagcccaatattttagaaaactaccgcaactttctaaactaatttatagtgaaaattaagggatttttacaaaaaatattaggagcttgtttggctgtgtttttagttttcagtttttaaaagtaagaataaaaa

SEQ ID NO: 294909 - DNA, 6138 bp, Cannabis indica
aatgaaaaccacacaagaaactaactaaacgctaattatatgaaaattagtgatttgcaatttaggatttcaagtttaaagctttgcccatagaggcatagacaagccatacaagtagtgattggtgacattttgtcgttctatttgataaagggaaagtgagacctttcaaatggaaggtgtaatttgaaacctaatgaaaaatgagcatcattttgaaagagcgacaaactttagatccttatttaattttggtttaagcataaaaagtacaatttctcagttaaatttcacataattccatttaacttaaaatatataaaacccgataaggaacttgcacaaatagcaatatgacatatgatgtttagatgctttgtacaatgttgtacctctaaatcttatggatataccctttttaataagacaaaaaaataataataataaatgctttgttacaagtttaaacacaacaataaaaataaggaacaaaaaatgtcttctaaatggaagactacaactacaactacaactacaactaaccactacattattcaatgacataattgggagctacggctaatattctatcatttctagatgacgatggtcgtccttcaccgtccgctgctgcttgtcctccatcgtccaacactatcaaatgcccttctcttcgaatcaaactctaaaattaacaaacacttatttttagtatttcatttagtattgactatcaaactcacacaaaaccatattttattacctctataatagctttgattttcgaaacttcgcttgctgcctcttccatcgtgctgtagttgtttttctcattctgttgattcacataccactggatcaaatccctctgcctcattccagctagtccggttcctgcaaacgaaaacaaccatgctttataacataatcaccaaatatttattgttagcatttacaagctgttaaaatcaaccaaagcacaaggctgaccttcaatcctaactgtttcttcatgttgtctaaggcgcataacaagggcatgagttaccctttggaaatattcatcgcttatcacgagtttctttgcttgttgtggttgttgggcagaacctcccccattttctgcaccacataatcggtaagcatttacacaaggcaaggaaaagaaattatgatatttggtataaaacttaccattgttagtagaagctggatcaggggcagcattattacttggttgttcaccgccttcgccagcattgttattttcattaccatcgtcaccattatcgtgatttatttcttcatcaaattcagatagatctatctcactagattccacactgttaaggtaaaatataacacacattatggtcataaaaaacagaaagataaaacaaaatgacaagagagctttatcattcttacctgattatggatgttttcagcaatctcactgctaatcggacatggcgagcaaatatctattggaaagtaaaactcagtttttaagtgtcatggagaaatttgtataaaattggcaatactgaatttcacttcaacacacctgagtttccaaatgacttctagcgatggcctctgaaagtctgatcaatgcctccagttgcctaacagtcatacgataagcaactcgactccctggagcagtatctcctctacggagagttacataggactccaccaacaattttctggcttctgtactcatctacagggcagaaacaaaaacaaataagaatagaaagtgggagaaacaaaactcccgtaaaaaaggacttgtagcaaacctttggcttcagagtttttgcatatccaatgtaacgtttgagttgtgcagtagtaaatgtaggagaaagagcttcttcacgcttttgatgtaccctcacgatgtggtgggcaatgtggtaatctgtttgatcatctgggtcatcaatcattacatatactagatcaaaccttgaaagaatagcaggaggaagagccacattatactgccaaaaaaaaagcacattaaaagtgagtataacatccaaaagctccaactttagcaagttcatactgctaaagttcagaatcatatcaaaaacatttgatagtctttattaaagaaaaaatgaaaaatttaaaacagtaaatggagctctcaccttaagtggtttagatttatcgtaacgccccctgtggggttggcagcagcgagaattgatgttcgagcgttcagtgttgcttgtattcctgcttttgtaatgcttatggtttgttgttccatggcttcatgaatggcaaccttcaaagtcaattcattcatcagattccagacacaattttcattacaatgtttttttaggaaaaaaaagtaacggaggacatacctgatctctgacatccatcttgtcaaattcatcaatgcaacatatgccattatcagcaagcatcagtgcaccagcctgggacacaaaataaattataatcaaggactaaaataaagaacagatatgcaataagattataagataaaacaaagaactcaacatgcaaagaaacattggctatttcatctgtgtcaacaaatttcaagtataaattccttttggaccagtcaacggaagagaatgtaataagactccacaatacttgaaaaatttctgctgagatcttgatcctcaaaatgaagattgaactgaaaaaaggaagtaaattcaaggattttgcagggatacctctatgcagaattcaccagtttcaggttctttggcaactgtagcagttaacccagcagctgaggaagattttccagacgtgtaaacagatcttggaactatacccgaagtatacctgtggcatatataaaagacaagcattatgaaagattcaatctgtaaaactgtaaatggggcaatgagaagactaagattcacatacttaagaaactgagactttgcgcaactaggatctccaacaatgcaaacattgatatctcctcttaagttgatgccttcatgggtgactttgtggacaccactcatcagcataagcaggattgctcgcttaatgtcttggtgaccaaagacagttggggcaacactatcaacaagcttattgaagaaatccgggatattcctcattctttgaacttcatccaactcttcaggctgcgaaattcacaaatgataaccaagttatggaatcaaacaataggccccgaatgcataacacttactctagaaccatgttatggaaccaaaatgataagagagaaaccaaggcagttttgaaaaagttaattaaacgagcactacaattctttactttaaaaggcttagtcatgcttactaataaactacaacatcatgatcataaagatgagttataaacttataacaactaaatttgaggcaagaaagtatctacataatatgattatgaaaagtgcatcaagaacttactgtgaattgctgggtctcatcttcatcagcatccttctttctattccttatatcattatcccttcttccatcagaaatctaaacattaagaataaaaatatgaggaaccaatcagaaggtcaacatgataacaatgacctttttactgcaaaaaaccaatcataaccaacctgaactgaattggcaataaatgcaaggctgtaagagagatctctgactcctaatgctctaaggcccctcacaccttcttgtccagccattgaatccttgcgtgaagaagcttcccggcgacactctgctctctctccaggtgaggccaatgccataatgtcgggtatcacaacaacagtgcctgtgaagactaccctgtaaaaaacgtaatgaatgaaacggtgaatactcctggattagtatttaagactgaataccatttgagaatgctgatcaatacgaggagacgtagaaaagcaaaattgtaaaatcttacgtgtcgcctgcccttgctttttccactatctcatgtcggataataacatccaatgatctgggaagggaaccagcaggaatctccttggaagtctcctgcatccgtaccctctgccagtctgcaaatttgctctcttgcctgagtaatgcccactttgttctattggcacaggttgcattcatgcatattgtaggctgtgacccccaaatgcaaaaaggaaatcattaacaaaaattgtagtcaaataaaaattgaaaaaaggaaaaagaaaaaaactgccccaaatgcagaagtatttgaatatcaaaaatgagaaaagataaacacctcagtgtacttaaattgctgttcaacgttcttaatgactcctccacattccaaacacttgaaagtcccctggagaagctcaggtcgaacctcacttgtacgagtcaccactcccgatacagagactagtttaccaatctctgctgtcgttagctccctcaacctgcaaaataaatatagaacacgaaattgtagagcaacgtaacaggaaaccggattggagagcattttttttaatcaaaaaaggagatttcattaatcggacaagcaaaattacacacaaaccagcagcctcaagataataaaatgctacattttacacaaaaatcaatgataaccttgtcctatcaataagcgaaattcttgctttcagcacctatttaatcatcatatcatcacactcaattgaatacactttttgttcaaaaatacatgtatttctcttccatactattaataaaccgctgctgccatagctgctgcagaaatgtcactaaggaccaaggtcttttggtcatacagcaaaaaagggaaataaacttgggcaaattttatacgtatataaaacgaatttagtcggtttaatgagaaacaaaccttttggctacggggaggttgaagaaggcaaggttgatgtccttattagggttatcatcagaaataaaggtaggtctcaggtccatgacgaatctcttgcaagcgttcttcaaataaggttcgaatctgagatactcatcggagatagccttctggagaagattgctaaatgacatgacatgagagaaatcgacgaacatagtgttcgactcgttggctctcatgacttcaatctcagtttcgtaatacaactcaccagaaatcttaaagctgttggattgaaatgttagaagaatcgaaagacacgaaggaaaaaaaaagtaagaagaagaagaagaagtacctcttgagaaagtcgagaaagctggtttcgactcggacagccttctcgtcctccatgaatccaccggtcccgaaagcctccatagctaaggatcgtcttcgattgtgtgagggttttgaggtctgaagtgtgaggatttgagttttgagtttcagagagaaatgagtaaagggattcaacctgtttttcttcttcttctttatggcgccaaatctaacacctttttcccgccaaaaccagaccttatgggcctgaggcgtcattcccgccaacctatttttatgggccgttctttttaatgttttttatttcaagcccaataatttcatactcaggttttttggggagtaatttcgaaaaataagaaatttaacaaaaaaaaatactaattttatttacaaaaatattaaatcttcataaatatgtaaactataatagagaaaattataaattttatggatttttatactttttgtgcaaaaatatgggtttttttcaaaaagattattttatgaggaaattgaaaaaacagtttaaaaaaaaatatgagaaaatgaagtaagcgtaatcaagaacgttatggtaaccaccagaatagtaaccagttatcataaggaaataatcaagtaccttatgatgtttttttcatttattttaacttttttataaaaatttccaataaaatgatttttttgagaaaaagccatatttttgaatagtacttaagacttttatgaaaattcatcactataataatttacaaatttataaacattttgcaaataatgcttaatagaagatatttttaaattcacagtattattactagtgaacattcaaaattagtaatcttcaaatacaatatatatatatatatactagcaaaaaactacgtgcgaggcacgtatattaaattt

SEQ ID NO: 294910 - DNA, 8664 bp, Cannabis indica
ttttttttttttttgtaagagaactaaaataatattgttcggctagtcatgtctccaacatggaagatatctcaattagattgcaaattattattttaactaattgctactaataaaatttcataatttattaaaaaaatatatattatcgttgggatttgaactaaacaactataagtaaggtgaaatgtaaaatattattacactaaaattactttaacataattatgtattattttatattttattatatctaattctataccataattttattaaacttttgaaatcttaaaataatatacaaatatataatggcacattctcaattttattttatggtctagctcctagtgttggataccactaaattgaaaatgctataaagagtgtgattttataaaaaataaataaataaaacaaaatttagataaaaagttacccagtgtgtcaagtactacaactaggtgtcatatgtaataaattattataataaattttatattgatattaataaatattacaaaatatcactaattatttataagaacgtcattttttttttatcgtgctaaggtaataggaatgatctaatataataagataaatgctaaaagatattttattgttggtagaattaattattgaattacatataatttaatatgataatttttaaaaaatatcaccaaacagttgtagaacgtcaattttagaaagtgttgaacactatgtcgaatgacaatgctaataataataataatgatcataaaattaagagtgcaaaagttgaattaatccatatgactgcgcatgcaaatttccaatcactaattcactattaaatgggaataaagttccactattgtgcacgacttgtgaacccaaatgtgcctaagaaagaaagaaagaaaagtggtgtttattattctttagtcactacaaacttcttttcaaaaacacactgattcatataaacagacatttacaagttagaagagcaagaagaaaaaatcaaacttcctatggtttagttagagggacactagtggaaataagggtccaccaaaactttcatttggcctcatctcatttgtttctcccttcaaagaagcaagaatgtaaactaaaacaaaataataataaggacttgttcggtacgaataattttgaaatattaaagcattaaagcagaaaatataattgtctaaaaacttataactgtgtttgattatacatgaaaatattaaattaaattaccatttattgaattatattatttggttaaacataaaaatttaatgtattaaaattgagagacatctttgaaatccacttttttttaaagatctaagattattaggttgtattaatattaagttaaaactttttttatcattcataaaataatgaaacctatactaagtactaacaaaagaatgagtgctactattaatctcttattataattttttagtcaaattttctattcaaaaatacatgttaatttttttcatgtattatttatagttacaacattattcctgtaagttttaaaaatttcaaatagtctacaatgtcaaaaatatatttgaagttttttgaacatgtgtagcaagctggaatatcatcatgaactctgttttcaatcttgtaaactattcgaattttttaaaaaattacaagaataatattgtaactataataaatactactatgaaaaagaaatattctggcatatgaacttcgacgtggaggttgaccaccaagtagcttgcctgaatgtcgagtcttttttcgtcgctaactcaatatcatcgtcaccaaaaagttataataagacgttgtaacttgagaacattaacttaaaagaatgttaacctattccaataatggatatgtaggaatccaaggtctctaaggaattcattttcttaatgagaaggtaagaagcacgaaagttcatttgtattaaaaaaaaaaatagaacactattaattaataattaaaactaaaaataataaaaagtctaaaccaacggattactttttccacggaaagcatattcttccggagaaccaaaagaaattaatttaattaaacaacatttaaaatataataaattccttcaaaaaaaaaaaaaaaataataataaataaattttctacaaaaaaaaatataataaataaataaaaagtcccacaaagcaaagccacttgacttccactttcagatgtgcagttaaaataggtccacgtggtctcgctttctgactgggccacatgggaagatatctcccaattcttaacacgtggcaacattcaattggttaccgtatatagtaatctacacctgcaaatgcaatccaccgagtctgcgaagcagttgaatcgctctctctctttctcttctcactcattccttttccttcgaatattaaaattgtcttccatctcaagtaagaaccttttggttattattagtattataagatctcttgctttacttctctctctacattttcatgagtttcaggccttttagagagagaaacaggaccacactgggctcactccaaatctggtaaatcgaattctttgttttctcattctgcgccattagtagataattgataatcgaagtagattgattactttactctatgtttttttttttttttttgtttttaatgattttctgtggccaaacagggtttttagggtttcatttctggtaattttggatttggaggatttgatttgatttgtggattttttttgtttttggaataggagttgttaaatttcgatgggtaaaggaggtgaaactcatggtgttggatcgttgaatgaggagattttcccggcttggtcgaaggatgttcgagaatgtgaggagaaatttgaggtgagtcaagaatttggattgtcgttcgatgaggtcgagaagcgacgggagaggtatggattgaacgaattggagaagcatgagggtcaatctatttggaagcttcttattgatcagtttaatgatactctggtgaggattcttttggctgcggctgttatttcttttgttcttgcttggtatgatggggacgaagggggtgaaatggagatcacggcttttgtggagcctcttgtgatctttttgatattgattgtgaatgccattgttggaatttggcaagaaagcaatgctgaaaaggcattggaagctttgaaggaaattcagtccgagcatgctagtgttattcgtgatggtagaaaggtgcctagtttgcctgccaaggagcttgtgcctggtgatattgtggagttgagggttggtgataaggtgcctgctgatatgagagttttgagattgattagctcaactgttcgagttgagcaggggtcattgacaggagagagtgaagctgttagcaaaacggttaaacctgttcctgaaaattctgatattcagggaaagaaatgtatggtttttgctgggacaactattgtaaatgggaattgtatttgcatggtaattcaaacagggatgaattctgagataggaaaagtgcatttgcagatccatgaagctgcccagaatgaagaagataccccattgaagaaaaagttgaatgaatttggggaagctttgacgatgataataggattggtttgtgtattagtttggcttatcaatgtaaagtactttctcacctgggaatatgttgatgggtggccaagaaattttaagttttcatttgagaaatgtacttattactttgagattgctgtggcactggctgtggctgcaattccagaaggtctgcctgcagttatcacaacttgtttggcccttggcacacgtaagatggcacaaaagaatgcccttgtccggaagttgcctagtgtcgagacccttggttgtacaacagttatctgctccgacaaaactgggactttgacaacaaatcagatggctgtggctaagcttgtagcaattggttctagggtcggtactcttcgagccttcaatgtggaaggaacaacatatagccctattgatggaaagatacaagactggccattgggtaggatggatgctaatcttcagacaattgcgaagattgctgcattgtgtaatgattctggtgttgaacaagctggcaaccattttgtggccaatggactgccaactgaggcagcattgaaggtaaaatggaaatatagtttgcaattccttgcttctttattatttatttattcatttttattagagtattgttaatttcttgtaatacttgtataggttttttcctttttcttcttgtctctctctttcgttaaaagttctggaaaaagtaaacaaatcatggtattataaatcatatgcttggtcttctcttaggtccctaccttgattggatttagcctccattcttcatgtgattttcttaggcggcgcatgaattggcttagtcgtaaccagtagactcttttattttacttccatatatttagttattggctacttgttgcatactcacacaaaggagtcctttattctgcaacgtgtttatgaatgtgtattcattgctatagatcaccgctcaatcattctgtattcattactatatagatcattccctaattttctgtgaaagatgctaaaaaaatcttttttattatggattttttttcatcatatttctttgttttttcaggttctcgttgaaaagatgggactccctgaagggttaaatgctggttcaacttcaaacggtgatgctctacgtaagtttcttagctgagccactcataatttgatacttttgttttcttggatgctaagctactttttgttggtacttctaggctgttgccaagtatggaagaatgctgaggaacggattgcaacccttgagtttgaccgtgatcgtaaatccatgggagtcatcgtcaattctaggtcaggaacaaaatccttactagtcaaggtatgctatctactgtctccttggtcacttgtattgactattgatttctcatttagtttaaatcatttattgatggctaatccactctatgtattctcctttaccacttaaccccctccctaaatagtaaaaggaccttaaacatctcactagtatcttgccaaacgatgaaaatttaaccctgattggaactttaactgtttttttctcctgacatgacaatgtcacttgttaatgtttggggatttatttttgaattgttttgttttgtaattgttctcgactttactgcttgtttgattctattcaattattgtggcagggtgctgtggaaaatttattggaaagaagcacatatattcagctggctgatggtacaataaaaccattggaccaaaacataagggatcttattttagaaagtcttcatgaaatgtcaacaagtgcattacgatgcttgggttttgcatacaaggaagacctggcggatttttccacttataacggtgatgaagatcatgaagctcaccagcttctacttaatccagcaaattaccctcaaattgagagtcaacttacttttgttggtcttgttgggataagggtgagttcgcactgtgtttagctgttggaaatgtatttttaattttcgctacattttttcactcaaaataatgaccatttaatgttacttgtgactttaaaggaccctcctagaaaagaggttcgtcaagcaattgaggactgcagggctgctggaattcgtgtaatggttattacaggagataataaaaatactgctgaaactatttgtcgagagataggtgtatttggggctcatgaagatattagttctagaagcataaccggaaaagacttcatggagcatcatgatccaaaaaactttttaagacaaagtggagggctcttgttctctagggctgaaccaagacacaaacaagatattgtgaggttgcttaaagaagatggggaagtagttgcaatgactggtgatggagtaaatgatgcgcctgctctaaaattggctgacataggaattgctatgggaattgcagggacagaggtacgtttactcagatggctttgtttttgttttttggtcttttaattgtttgttgctcttttaatgttgctttgaccgttgctgaaccactaattgcaggttgcaaaggaagcctctgatatggttttagcagatgataacttcagtactatagttgctgctgtcggtgaaggaagatctatttacaacaacatgaaggcctttatcaggtttacttcttctctatttatgtctgacagatttcctcactctataattcaacccaattgccaagaagaaattgttttaaaaaatctacatataaactctaaaaaagagtattcattggctcttggttttaatggaattttctgaaaggtcagagctctaacatacactcgtgacccagaaaaatcgataacgtaaaacataagcctcttttgacacattcggagatgactagtattttaagacatctcccgtagaatcccttcatgtgcttagcctatgaagcaaagacagaaaaattgataaagtgaaacataagcttctggatacatgtggtatagggtaactttttactagataaagcatccattcggtggttgaattcattaatgatacatttatgaagtttgattttgaaggacctcactaattataaaattgtcattattactgtattgattcccctgtatcctcctttttactaaatgtcacgcaggtatatgatttcctcaaatattggggaagttgcttcaatatttctaacagctgctctgggcattccggagggcatgatccctgttcagcttctctgggtcaatcttgttaccgatggacccccagcaactgctttgggatttaatcctccagacaaagacataatgaagaaaccccctagaagaagcgatgactccttgatcagtgcatggattctattccgttatctggtactaataaactagctcatctctcttgcttagtttacttcagttgagtttggaattagcttgtacttaccatgaaaatcttttcaactaatgcattctttgtcgcgttgcaggtcataggcctctacgtcggaatagctacagttggtgtgttcattatctggttcacacacagctcgtttttgggcattgacttgaggggagatggccatactcttgtcacctactctcagctcgcaaactggggacaatgccgtacatgggagggattttctgtctctcctttcacagcagggtctctggagttcaactttgactccaatccatgtgactacttccagtcaggcaagattaaagcttcaactctgtccctctcagttttggtcgccattgagatgttcaactccctcaatgccttgtctgaggatggcagcctcgtcaccatgccgccttgggtcaatccatggctgcttctggcaatgtctgtttccttcggcttgcactttctgattctctacgtcccattccttgcacaagtcttcggcatcgttccactcagcctgaacgaatggcttttggtgttgatggttgcgttgccagtaatactgatcgatgaaatcctcaagttcatcgggaggtgtacaagtgactggaggtattccgttacaaggaaaactacaaagcgcaaagcggagtgagtttttgttgttgggggaaaaaatcagacaatctttgaaataggttataatttgtcttggtcctgttgtaaccttcattattttgaatctgagggattatttggacttttaaagatctagctagaatttagatcgtcggagatataattattaattaaagttccgtttcactagaatggtacactgaacgaaaaccaaaaatctgttccttaaatttgagacattttatataaaaatagcatgcgctgacatcgtaacaaaacaaaagaacactactttattaactattcagcaatgctatcaagagaacctcaaaaaaattttatgtacccatatcataatattgacacgaaactgctttaaaaaaaaaaaggcagtccatacataagaaaaatgaaagagatgaatatttttattattattattattattattttctatggtgaaaaggtggtatttgggtagaataaatgaaatcaaatttaaaatacatataaaaattattattaaatttttttttcttctattttaaaatgtactaatcattttattgaaatgatattctaatactttaaatttaaaatgcaactaaataaaaaatagaataaagttattttctttctattttatttcatttttttaccttcaaccaaacatcattgctgatagtatgaacttgtcaactaatttttttggtcgaaaaatcaaaatctaacttcaaaactcagaaataagatcaaaatgagatttcaaagcggagagaaaactatctttctattgctttcaatgtgtggattacaaaattgattttccaatctcttctcagatttataagctttaatggcctggtagataataatgctttcaaaagacatagtgacatccatggtctgccaattgcaggttgcaggaggtggccttgtactgtgtacctttatctagtgttaggtggtcctgggtcgc

SEQ ID NO: 294911 - DNA, 2368 bp, Cannabis indica
tgtttatatgttaacataactttatacatatatatttagtatagtatatcatatggaaatatttaaagaatgttttattttattttaataatgctattttaattagtagcctataacagaatttgtcactgtttaagatttggaagtttggtgatgatggagcaatttttttttttatcttatttacttataaaatatatcaatttggaagttttgtgtatatttatgttaatattattattattattatattattatgaaatattatttatgaatatccaaatcgctaaattaattaacacaagtaatgtttggttgtatttttctttattatattgatttagttttccattctttccattctcattcactttctctttatttcttctttttcttttcttttttatttattttatattatttataacatatattttatttttgaaagggaagtgcttcttcattcaacaaactaataagactattacataaataactaaattcctcaaataaaataatttattgataaaagtagcaacaaattcagctaagctttcgagaggctaaaatctttaaaatacaatctttggagaggattctatttctaagctaatttaaatgaagttgcattatagccttaaaatagacttaggtcacttataggatcactagaattaaaatactaagacaatccaatctatgtacataaaagactaaagtatttcatctagtcttaggcttaccattataattagagtcggctctatgttaatttaaaccttaagcaaaaataaaaattaaaacccaataaaatagtgagaagttgttgatttgaactctaatgctcttagttgttaaactaattaaattactattgagctgtaacacatatttaatattatgagtattattatttattttatgactaattattttctcttctgcatccctacttgcaacaatagagtttgtacaatgttttacaaagtattttctcttgtgaaacctaatgtttgaaccctttgccagcatggtggggatgaggtcttatttataagaagccatgcactttgggcgagcggatctgggcccaatggaaggtcttaggtacaaagaatatattatagggaaatttacatggtatactaacttgtgacattttttttacaaaaatactggcagatgataattttacttttttattgtgtttttttataagtttcatactgcagtataccgtgttaagttttcactggtgttctactggtgttttttagttattctactgttgttttgagtttttcttctttgtgctttactagtgttttttaaaaatacagtattttcgaaaagatttctgtgtgacaatatttttgtaaaagctaacccaaattccagtatttttgtaaattttcctatattatatagtccactaataaatgacttcacattgataaatagcaatattttagtggaggcaaacaaagaaattttaagaaaaatataatttttattaaaaaaaatgcgaattttatgagaataaaattaaatatatgtgagaatatataaatatgtaaggacaaaaatgaaaaaaaatttatttttatggaatcaaaatataaactaataaaaaaattatatacaaaatttataagaataaaaaattaagggaggtggggggcaaataacctcacatgccctccctttcctccagctctatagatgaggcctaatcctttaaaagtaggacattgttattgttcactgtactattaacgtcgacgagcaatgcatgagctgtcgtttatatcttggaaaaagatatgttagagtagttgctgctacaatcccaaatctagtttgggattgttggttggagcctcatgtggactctttagagccataggtgagcccataacttgttgggcgttcttccgaaggccacgtgttaccagagtaaaagtacgagcaacaactgtaaattgaaaaactattttcatagaatcatgaaaagtgtaattttttcgtaaaaaataataatttggagtatcataaaaaataatcatacaatcacaatgttgtaataattacgggtaaaaatcatttttattctacttaagttatactaaatatatggttttcattttaaatttggtatatatcaatttgatctgatatcatccaaatattatacatattctaaaatatgggccatgatgccaaaatgcttctaaaagaattgtatgtatatgaaacttgtctttgacccaaaattaaaggacagtccaaaccatattaaacttaaagggaaatttacaaaaatactgaaatttgggtaatttttacaaaaatactgtcacacggaatt

SEQ ID NO: 294912 - DNA, 5250 bp, Cannabis indica
gtcttttttttttgttgtttttgtaatgtgtattaggtagaggagggaattggaaaattgcatgagttacaacagcttggtgatacatcagtggctttgtggtctaagccaacagtttcacgcaagactaagattgtttgtacaattggaccttcaacgaatacgaaagagatgatttggaagttggctgagtcaggaatgaacgttgctcgaatgaatatgtctcatggagaccatgcttctcataagaaagttattgatttggttaaggaatataatgagcaaaacaaggacaacgtcattgcaatcatgcttgatacaaaggcaagattttctttactttttattgcaccacatcacattatttatggtgaattttgtttatctcggattttattaaaaaaattgcagagtactagtttaattttcacttgtattccttgtattggttctttagattttacgggtcaaattgtgtgatgcttttggtgaatgcatattagaaatagtttaatatgcatgtctgtcatgcctgtataaatttcttgtccatgtatttttaggggttgattggtttgtgattgaaaaattgggtttttttaaaagagtgattttgaatcaaaattttgaattttgtatgtaaaaattaatctttgaaaatgtgattggttgtacagtattatttaatgttttggggttttaaataattgaatctggttgggaatctccaaacgaaaaagtaagagagcagtttgagaatttttagattcaatgatttgaaaacatagaaaacataaaaactcaaggttttatttagatttagtttttaaaaactctccaccaatcaagaattgttatgtggaccctcacattagtacaatttgttggtttatttatttatttatttttcttgtcattaataacagggtccagaggttaggagtggggacttgccacagcctattaacttagaacctgggcaagaatttactttcacaattcagagaggagttggaacagcagattgtgttagtgtgaattatgatgattttgttaacgatatagcagtgggcgacatgcttttagttgatggtaagtcctgtaccttgccttttattttattttatttatttttggtattctaagctcttattatctctgtactgtgcttcataataatattggagtgaacattgtgtactttcaatttacgctcttcacctgaaacattcttgtcttgactctggtatcatttgatcttttacgctcttgagagatatcaccataccttttcgtgctatgatctcattaagtttcatcattgactttggctcctgtgttataggtggtatgatgtcatttttggtgaggtccaaaacaaaagattcagtaaaatgtgaggttattgatggaggagaacttaagtctagaagacatttgaatgttagagggaagagtgcaacattgccttccatcacaggttggatcctaaattattttcaatgtcctttgattctatattttcatgttttcttcattattgttcttttactgataattatctttattaattactttatatttaaatcaaggagatcatgtcttcatgcttgtaaaatgagctaagtgtttaagcttgtctattgcagaaaaggactgggaagatatcaaatttggagttgacaaccaagttgatttttatgctgtctcctttgtgaaatctgaagaagttgttcatgaattgaagagttatctgaaaagtaaatagtctggttaccttttttattttcttttgctagaatcctttggttacatgaatattgtgtgctctaaatatttatgtagaatgcttgttgatcagacactagatttttattttactcttttcttttttatatcacaggctgcaatgcagatatacatgttattgtaaaaattgaaagtgcagactctatcccaaatttgcattctatcatcaccgcatccgatggggtgagcttttgaattttttataagtaatatgatcaataattttctcttatctgcttgctaataatcagtctgtctagaatagtgattgtaatctcaacattcgggttacttgtaagactttgcactaaatggcatcacgtactgctctttttttaggcaatggttgctagaggagatctgggtgcagagcttcctattgaggaggttcctcttttacaggtattttcctagtttttaatagaagtaaaaaagaaatcagttctgattagtgaacatgtgtggtggtaacgtctttatgagttgctttgatcgttcttaagatttttccttctctcctgttttaggaagagataatcaggatctgccgtagcatggggaaagctgtcattgtcgcaacaaatatgcttgaaagcatgattgttcacccaacaccaaccagggcagaggtgtcagacattgctattgctgttcgagagggtgctgatgcagtcatgctttccggggaaactgctcatggaaagtatgttcctacttttactataatgtttacattttgcttgacactgccaatatttgattggtgaagattgttagcaagcaacaattgcacagatgcatgtcatcttggagttgctcaaagcttgcaggcatcttttttttttctttggtttttgttttgattctttaaggtaaaaataattatacctcatgcatcgtaatctcacttctatgtaggttcccgttgaaagctgcaaaagttatgcacacagttgcattgaggactgaagcaaccataccaggtggtacaatgccagctaatcttggtcaagctttcaaggtcagtcataatatgctttaacctttaatgctttcgtctaagtcttcctttctcccctattcaatttatttctgagttccatttgattgttgagtctgataactaactggacctgttttattctgcagaaccatatgagtgagatgtttgcttaccatgcaactatgatgtctaacactctcggcacctcaattgttgtctttacaagaagtggtttcatggctattctattgagccattatagacctactggcaccatatttgcctttacaaatgagtaagttttctacgccataagcataaattctctcgacgagacattctccttaatctattggatcttacaatttgactgaccctctacttaattttgattgccatgcagtaagagaatacaacaaagattggctttgtaccagggtgtgtgtccaatacacttggagttctcggatgatgctgaagagacatttgggaaagccttgtccttacttcgggtaagaatttgaaggaataatataaccatatagaacttataatgtgacagacaatccactgaatcttctagtaatttatgccgtgtatcgctcatatcttgattttctggattgctcaggaccaaggaatggttaaggaaggagaagaggtggcacttgttcaaagtggcagacaacccatctggcggtttcaatctactcacaacattcaggtgaggaaagtcttgtgatcactgctctgaaggtgagagagaatcgacgcaagttgaaagcgtctactaaagttagagaactctgttttcctttagtgcgagtggtttcgagtattgtcttgtttgtcctctgctcgtttacctgctctaagagtcctttatccttgatccgctccattactctttcttttcgtttttatttattttatttatttttatttaaagaaaattgtatgtttattttaaattaagaatatagcaggattggtgctgtttttgtttggcattttgaatcaaaacaattttagataagtattgtttagtttatatcctgtgtcgaatatactatttagtgttcatctgactttgtaagcccgtgatgagaatctacttttcaccctttatacttcaaattttctgactttgttttctatttgctatgtgaagtcgctttcaattgtaattgttcacagaattttaactaaccttattttcatcttaaataatactgctgaattcttaaatcatacttgcattgcacatgtaatggacagtcctgtgttttagacattaataacatccacgggattgatttcgtttggcattatttatttattgcttgattaaaataatgacaagacaacattatctttgattcccacgactctgaaaccaatgtcgttggtgatcaaagcccaaagcgaaatagaaatacagaaatacacaaataataagctatgttcacgaatgtctgtgctgaggttccctggttgccgttttggccccaatttagatgagtagtagaagaaatgtaacatgaaactactctaccaatgttactaatgagaaatttcttttgtttggcttctttatgagttgaacttgagagtaagattgggcatcccatctaatttttttccttatttgatctaatttaattagtaattgaatttagaaaattattaatttatccaattcaattagacctcaaaattcaatccaatctaattattaattagattggattagttttttaattaaatatataatacttaaattttaatattcatttcaaaatataaaaaaaaataagtaaaactaaattttactatttatttaagtttaacattacataaacatactatcgttataagtgttatgtaattaaaagtttaaaataattaaaaaaataatattgttaagtaataaaataaaacaaacatcatgaaaatgaatacacaaaacaagcaagtgttacaaacacacaaaagaattcaataacatatattgtatttttttattatataaataatttttaatatatataaatataatttgattggatgattttaaaattgatatccaattatcaatcaaattcaattagagtttaacttttagcatctaattcaattcaattataattggatatctaaattttagtaattgaattagattgaatcgactcaattcaatcagaagagattagatgttgctgacccgtatttaagaagagagggttgcttctagtgagttagtgattacaaatctcaccgattaatatagcttcattgataagatattgcagcataatacaagtcatacgcataagagttatgttatacactaaatctaaactcattgttaggtattagtcttttttttttttggctattcatggtgccttttttttttctttttcttttcttatgta

SEQ ID NO: 294913 - DNA, 4065 bp, Cannabis indica
aaatatatataattaaattaaaatttaacatagctttatataaaaatataatatataatctaattcaatacaatacaatacaatacaatacaatacgatctaatacgacgttccaaacgaacccttacaattaactaggccaattaaattagtcacaatcgatgataagagtatttttattgagtgtcagtagtatttaatatttttagactcgataattaattacactaataataatattaataagagattgctaagtatttaggatcccttttaccatttttcaaataataataataatcttgaggtgggtcgggttcccactgcaatggaaataaaaaatgctgtttggagcttacatcctctgaaaagcccaggaccggatgggttctctgggattttctatcgcaagtattggaacatagttgggggtgacttttgtgatatggttcaggagttctttgtttcaggaaggtttgtcaaggagctcaatcatacttttatttgccttataccgaaatgtgataacccgtcctcttttgatcaatttcgccccataagcttgtgtaacttcgggtataaagtcattactaggatccttacggatcggttgaagccgatttttgacaagatcattagcccttttcagagcgctttcttaaaggggcggtggattgctgaatgttcggttttagcttcggaagtgttggataccatgaggaaactgaaaggaaggaagggttttatgggtgtcaagacggatatgcataaggcgtatgatcgaattgaatgggggttccttgctgcggtgctcagggcaaatggattcaacactcatgtatgcaatctgattatgcactgtgttacaagtgtctccttctctgttctggtgaatggtgctcctggaaatgtgttctctccaggccgtgggctcaggcaaggcgatcctttgtcgccatatttgttcattttgtgcagcgaggttttgtccaagttggttcgaaaagcggaggattgtggggaacttactggcatcagaattggccggaactctatccctattacacatttgttttatgctgatgatgccctgttcttctgtcgtgcaaaccaaatggaagctttaactcttaatcgatgttttgagaaatacgaatactggtcaggccaaaagatcagcaaagagaagagtggtattgtgttttctccaaaaatttcagactctgatcgaagggacttgacttctactctgggaatgcatgtcttgaaaggcaaggaaaagtatttgggaaatcctttctttgtctccgctaggaaacgagaggatttcaatttcatcaaaacgaaggtgctcaatagactggaggggtggaaagcaaaatgtctttcacaggcaggaagaactactctgatcaaaagtgttcttcaaagtattccttgctacacgatggcggctactaggttacctgtggctttatgtaaggaattagacagtattgtggctagattttggtggaagggttgtaattctgacctcggatcatgtagatatcttgctttgaaaagttggagccatctgtgccaacctttgaggaatggggggctgggctttaggcgctttaaagacattaatatggctctggtggctaagttagcctgaacatcttggttcaatcggataggccctgggtgaaagctttaagtgctaagtattgttctaaaatgagttctgggaggttgaaaagaagaattcagactcttttctctggaagagtattttatcggctagagatctctgtgtctcaggagcgggagttcttgtgggagatggaaattcagatatttggacaagaccttgggtccctgggtttactcctgaagaggttcgacagagtttcacctatggaatcacccatgcctattcgtctatttctgaccttttcatgacaaactctcgagtttgggacgagaatttaatacggcaatgcttcacttctgagattgcaaatgcgatattgaggatcaggcctctctctgatgaaggagacagagttttctggaaagctagcaacaaaggaattttttcagttaagaatgcatattggctttcgcaaagtaaccgatttcatcctgagaaagaaagctggaggaatttatggaagctgaagatccaccctcgtcataagcttttaatttggaaaattcttagttactgccttcctctcaagtcaaatttgggttttatgcagaatggggataaggagtgttatctctgcaattgcgaagtggaatcggaactccatctgtttggaacctgcaattttgctagatgcctgtggtatcgtgggcagtggggtttaaggtcaaattttctaaatgtgcaaagtttcgaagacttattccatcagatgctccttatcaaggatgattatctggttctgtttgcggcatgtcttttcgaagtcgtttggcattgcagaaatgaagttagaattggaagcagtaggcctgaccctgattcggctttcaaaaaaatcatcctgaggtggcaggagtttagtcaattggtgagtttggaaagtgtatctgaacctgaacgtcaaaatgcagatccaagcccttctgctatcttattcatggtcgatgcctcggttgttggaaatgaggtggggcttggaattgttcaaacaaatgttcctagagaggttgcaatatcggctcaggctttccggactgtgctgagtgttttagaagcagaatttgaagccattctactatgtttggagttgtgtgctgatttggggttggaagaggtttgcatccactcggattcttcgactgcagtcaaagccttacaagctcagtcactaccctatgcttggggctcgtatcctagttttgctaagtgtttgtctatgttaaactcttataaccagtggtctgttgtttacatttctcggtctgaaaactcggttgcagatcagcttgctcatcttgctcgagtgaatcgtgtttgtgtttcatctgtttttagggaagcagctccccttgtggctgctatttagccttagtgctttgtgaaataaaaatcttgtaaatacaaaaaaaaaaaaaataataataatatataaatataagctggcaatatatgatagtatgagtgaaatgtaggattgattttaaatataatatgatatatatggatatgattttgtttcgttattgtacttttacggattgtaattcgtgatgtacggcagccgtcagatgagggagttatttgatttgacggctgagattgctctagggataattagagttaaaaagtagaaacgtaccctaagactcatctaatgtaccacagaatacattccgtgaaagtacgagatatatccctatataatatacataggacaaataataataagctcaaaaaagagatataataataataataataataataataatactagacatcgatggatccaagtccattacgtgattttctgcgtaggatttccacatttagctaactcatataatataatatacacctaaatttatttggcatatatatatgcaaccaaacaattatatatattcaaatctcttattctacagcaattattcatggccacatatatattaatattttattgtttttgaaataaaaaaaaacatatgtgttctgtaattttggctttgaaattaaatgtaagctagttttttttaaaaaaagttaggtaatttatgatcatactttttttttttttgagaaaggatcacaattattgaatcatacgattttgttttcgaaaaaaattatacattttggataacattattgtttatttatttattttttgaagatgagaaagaaaataaagtgatagaaagtatgattagaaaaattatttaaataaattttaagtaatttaattttgaaagtttcttattttaaaaaagtaaaattaattttaccaaatatattttcaaaattattttcacttattaaaattaaaaaaaaaaaagtttaaataaatatttgaaatttttacatga

SEQ ID NO: 294914 - DNA, 2206 bp, Cannabis indica
tttattgatatttaaaagaatagagattacattgaaaaagagttttatttagggcacaaaacccaacagagttgacattgaggaggcctgttattgaagttaccaatactgttacctctgaaggtattgaagttacctctaccagaggaattttggttaggattcgagccagcttcattaaatctaccaggacttctgttgttgaatttacatgcatggaccattgttatactgagcatttccattggtaaagggtctgaaccttcgaaaggcaacattggctttagcaacagggtctggttcatgtgtcatcagattggcacttagatcgatttccttgcttaatttcttaattcttgattctgaagcatgaagcaaggcttcaatctcaccaacagtgtagatttctactctggtgttcgatgatatgacaacggtgtcatattcacttgggagccccttaaaaatggcagctacatgatcacgatagagagaacttcaccacacctaaagtaagaagatctacagtttgcttaactttgagaagatactcatttagactcatcgttcctttttcaggttttacagcttggttcgaaactccaaaattttttatgagacctataatgagaagtgtttctccaagaaattctaaatctggtgtgatgaattgcccccaactattcttgttagcaaactttcagtcatggatgagagtaaccaggaaacgagaagctagtcttgtacttcccattcagagtagatcggattcactttgttagctagtcgatcatcattgctcaagaactcagtaggagggggttctttgatgtatttcagtaaccgatcacctctaattgcagcaagaacttgttgcttccataaaagaaagttgtgatcattcaatctgatcgagatgttgtggttgaacatgataggttcttagtttgggcaatttctaataggagctccattagcagtggtaatgtttgaagagttagcaccagagtgtcgtagcaacagggtgtcgtagcaccattacctacagtcgccatgttagcaactaaaagaggaaagtgctccgataccatgttgaaatgtttagccattgatgaagtaaaacagagagaagaaaagagagaaaggaaagagaagacaaagataaaagaaagggctaaagattgcattaattaacaaaatgagtacagactatatatacaactgaactgaaacaaacaccctaacaaactcagctcaaccaactaacataactaacatgagctaactaacactaacggccaacatgacagttggtgaaactaattgtctctaatagtatatgaatatgaagctgataagaagaaaaagaaaaagaaaaaaaaaaaaaaaaaaaggaacaaaaaaataattatattttttctttatttttttgatattttaaattattaatattatgtgaaaattttgtcacgtgtgcacttgtgtattgtggcaatctactttggcatttaacagaccaaagtggacggaagaagtacagagcgaaacgattgtagaaatcgaaaaacttaactataatttttctaatttagaaatttgtttgtgccaaacttcaaattaaggaaatttagccgaaaattaccctaattattttcgttatccctgaaagaaagttcaatttatttttgtactgatttaccaaaagttgagtgaaactgcctaagttttaatcgtgtgtttagctatcaatagtcacaaaaaatattcccatatgggtgggggcaaaatgattgaaccactatataagttttcataattattcttatccaaaatagattatacataatatagtggacattatgacttgtacactaaatatcttctgtcaaaatcggcaaaaagtttaatttcccaaatagagaaacatactattatttgccaaaacataaaaatagaggaaattatctataatatgaattttttccttaagtttcataaatatagaaaaattagaaatttatttaacttatgactttttttttttaatttaagttaattgtgtagaaaaatatttttatatttataaatttttattaaataaaactacatctttattttattaacttatgtttagagattagtaatattttttttagagcaaattattaatgtatatacttttatattttttcttaaaataattgtt

SEQ ID NO: 294915 - DNA, 3448 bp, Cannabis indica
aattaattaataaagaaaaagagaaaaaaatcttatcctttttttcacttatctttttatctctttctttaaaaatttgaaattttcttattttttttgttatgacattaatcctatttgaagatgtcattaaaaattagagagacaaaggaagaagggaaaagacttttggtcttttgcttatcatttatatttttcctttaattctctaatttttccttagtcccaatagcattaggaattgttgttaccttttaaatttgtattcatattcctagttgtatagggatttcaaaattggcttaaaaaaggagaagagaaaagattaaactatatcttttacttatcatttacctcttccttagaaagccttaaatttaaaagactcccattagcttgtatgtagttggtcggacgctccttcggaccgtactgttgccctctagggggaatgtaaggatcttttccttgagtaggatctcttctgagtggagggttctccaacacctttcacccgtttgttggtgaaaacgctttatcaggtcgatagcttcccttgatcgaaagttaatttcttctttatgggcacgcatggactcagcttgtctgtccatccactcttgaaattggcatctctgctgttcgaacacttagttcaccacagagcgcgtttctttctggttgtggtgaaggacattagtatgagtctatactttccccacaacttctcttagggtttccaaattagtgttgtccccaaatcaacatggggttctcccatagaaggttgtccggtacctggtccagtttctcccgtatatacttggctggtgttcctagtctctttcgtgccgggagtgaacacagccagaggggttgttactccaagcctcactggtgaagctcgcggaggcagccaaacattcatatttgggtccatcactgttggatctctctgatcaatgggaacttgcacattgggatctttcactattggatcaaatggttcagtggattaagaccttcttgtcaaaacattgttcgatgatcaaaactacttgatggtcgtgttcaattactcttaatgaaagtatcaaaattttgacatcacttttagccaacgacgttgagtctttaaagcgataatataatgaataataatagaaatataattatgagcaataagaacacaaagaattttatagaggtttggccccatgattatggtaatagcctactcctctttaatttgtattacttcgaagattatcaagatcacaagaaactggccaagtgaatttcttaacagcttggtgaaagcttataaaatattttagcatcgtaagtgctctcttgaaagtttgaactcgaccccttgataatggaatgtctcccactatttatagagaatatgcaatgaacatttttactataaataataagaaaataatgggaaatttaaatataaaatctcttgaatctctcggttgtgcaaattaaatcccataaatgtaggaatttcatcaaaccaaaaataaggagatattcacgaaaaatattttttaagattctaaattcactacatccttctaggcggaggattttgcttagctgagaaaatgcaatcttctcagaacaccccgcacagattccaatctagatgtttgttgggtattcagacgcaagtgttgactcttctagacagagcattcgaaggcgaacaaatcgtccaggtcgtgaatcaatctccacatatcaccttgcctaatgccacattaccttgtgtagaaattgagataatatccatatttttttttctttattatattgagcatatttgttttgcatatttgtttttctttttttttaaaaaaaaaatattatttgaagtgtcaaaaggatagatcattacaataatttaacacacttaaatacaatactactttaatagtgttttacaaaatatgccaaatttttcatacaataaacatatattttaattaccacatatttttataaatatattttaaaaagttattatagtaattaaaaataaaaatagaataaaaataataataaagatgagatgacttaatcaaaaattgagcaaatattgaagaactaggctaaataagattttatttatttatttatttattttttttggaaaaggtaaataagattttatttaaaagttcattatatataactttattatattatataaaacatatgcaaactaataatcatgaaaaaaataaaatatctaactatattttccaaaaagaaaaaaaaaacccacaaaaatatatatggataaaaatttattggcgtataattaaattatataaaccttggttattatacatagttcaattttattatctatagttatttttatttattataaaaacggtgtgaaatgtgaatctatttatctatatatatatatattacaatatttaataaatatgattttatctttccaataacaattaggcgtgaaatatgttcttctctccttgttgtgtttaatatatttgtgaattggagagtctatttctcattgtcttgtcaggtattcgtttgttgttgcttgctagcagatggcgagtattttggtgatagagattggtgacaatttatttgggggtagtttcatgataaattttattgttgggattctggtatgaaacatagagttctgtgcgcaatgacaaggtgtggaatggtaagaataagactgttaaagaggtagttttattagctaagggtagttttatcaatagagttgtgctcaagataaaaaaatttggttcatcgttgtttctttacaagacgacgaagggcatgagcactggattacaccgattggtaatacgatcaaaatcaatgtcgatgcagttatctttagcaatcaaaataagtatgggtatggttggatagcgcagaactcttctggtcagcttattatgacttggacaataagttggatgggagtggttgatcttgttcttgctgaagctatcgaggttaaagaagtgttgagatggttaaaagaaatagggagacatgatgttgtggtggaatcagatagtttgctcacaatccaagctatccaaaaaatcattagatatggattctatttttgagttttgcatttctgagtgcagacggattctttctaatttgaataatgtctatttaatttttgccaaacaatttacaaagggaaatttcattaattgaccctaataaaatatcccatttcaaaatttataccctccactaatttatacaaattaattccactattactcatttctacccaaaatacccctcaaatttaattttcctattctctctctctctctttccgtctttccctctctttccctctctctttctctctctgtcgtttgctattcgaacgctgccccacgacgac

SEQ ID NO: 294916 - DNA, 4269 bp, Cannabis indica
atgaaccctagaaaatctctctaaacccctttgcatgaaagggtaacattctatttacaggtgagattcgagtatgggcaaattcgaacctggtagggtttatatgtatcatctaggcctactaatggggcaatataaaatatatgttgactttgggccacttgagtgaggtcgtattcacgatgtgaagattgttcgtacaagtgtggaccgtttgaggatgtcaggtgtcgtgcgtagctgcgttcgtaaggagaatgtcaaagaatatggtgttgatcataaaggtgatcttcttttagtagcgtgtgcactttacgagtctgatgtaggggaaaatccttgacactgtggggctctgtgttcggaaggttctgttttggatgatgttcgaaagctatctaagcgacccttcgattacttgctttcggattacctcatgaaggtatctggattggtcttagcagactcttcatcttctggtctgaaaggcctttcctagacttgggtggtccgaccttgttaggtcagtgagctgggctcgtatctggatctgaattgtagcgtgacttggtcactgggctaaatgattaatttgattgggcctaggtttgggcctgccttagctgatattgggctttgaaattatacacgccaccattccagaaactcagataacatttagcccctaaacctccggggctcaggtgtcgcggaggcttgcagccctccatccacattcatttatggatgcagtcaagaacagatgcgaccttttgaaatttcaaagcaatgagtggcgaaagcttttcagtctcttcactttccccacagcagaagacatgtgtcaagaatcttttggtgtgtgcatgttacatgccttgagaaggtgtgtgacatctggggacgcagattgatgagtagttattgtctgtaagttttttgaggcaaacgtcatcattaattgaccttgattatgaacaaggcattaagggcaacacttttgtattcttagaccgttagatctgctttgtgttttctgaagcttaatctggattgttggattaagaagcacgcaaatcaccactttagtataaatgggttgaaaaattgactgtttacccattttaccaattgcatttttgaattcaaatttttttgagagataaaaaatatatgcgagacaaaacttccaagatttccttataaggaatgtcctgcattgcaactaagataatcaaccttcttcttcaagttcgagcactattgtatctagaagcaccacccccgatttcaaccattgattcctcaaatcgactaatttccaaagggaggtcgacgagcttttgcaatatacccaaaaatttcaggcgagactcgaacatcttcatcacgttcctccaatcgacatttatataagtaagtgctcttgacttcaccccgatatttttaatttccatctaaactcttaatttcttgtgaaggaaataagagattggttgtgtagtttaggatctatgaataacttctgttgcatgctccatcgtgtagagcggccttaggacattcgcggggctagtgaggcttgcaggtcgattaggatgatttaacttagtaatttaagactgtattgttgatttagcgtctctgtgaaatctaagttttctaccgtttgggtctcttttggtgtcagttgattttactgtaagcttttattcttccctttcatgttcccgatcttgccatccaagatgaagttccctggagaacttgcttccaaatgttgggtccgtcggggaactctcccaatagttatcggggaggattcttccatacccttactatgttcattagtgtagggtgttaagtgcttgattttttctttctttctttctattacttctatggctgacgcaaatagattcatagaagaaatgatattggattaccaagaggagccaacttgggaaattagaggtgtagaaccaactacaacgaccaatctatctcattaagagatggatcaatacacaaataagttccgcaatttcctaatattgcggtcttatgaggacaatactaggctcaagagcattcctggctgttctagaataggctagcacttaagaatgaatcgccttgctattgcacggacgaatttggagcctggagttgggttcacgttgaatccagagcacgccttcctatctagagctatttttcacgcttttgcatgaaagtaggactggctccatttccactcatccctaggtgtacaaattactagtgggatggtacatcttctgtagagatcaggatgtggagtttccatctctagaagaaattatgtactacaaggtggaattaaatcccatgtggaagaataagtcaaaggtttgcttctatacgctgaagaagtgtttagatgtgacatgtccggtcagttcctgcaagcatactcacaaggaagtattagttctttacttctgggcttctcttggtttgcatcgtgggtaagtgataaaacttttcccatttggtttttgtacatgttctgtcaaatttagctaaatctaatatgattgtcccttttatcttatcgatgatcctccccatctggtgctgactcctttcttgcatgagagggtgaagctttactataggattgatccagaaaccttacaagttgaaggtttggttacgaccgaaaagcttaggcaggtagacctaattgctcctcatcaaagcatagatgatcttgacaaccgttgaatacgctccgactatgctgttgtcaaagaggtcgttgctgcaattatggccagggtggcaaaacaggccataaggaaggaccagtgctggctggaaggttggacgaaggcccatccagagcccatgaacaagaacaaggaactaaaggttctatatatgagcatgtattaaatgagatgtgtggataaatgataagaattatgcgttcaagcataactaggttagactcggtaactaaaaccaactctaatatcccaaatacccattcgggaggtcttagttacctcttcacgtctgaataaggtttggttccaaatctagagacatccaactctagagataaatatcgcacacttcagatgggcttgaagcccatccctttatgtagtcctggcccatcatcttggagggtttttatgtgagccttgaccactcgatcttggactggaaatactacgtgtcccatgtttggaaacaaagataacaggaagcataaattttataattagaaataattttgtgaaataaaaaattatatatttgaattatatttgtcaagccttattatagtttaaaagaacttatcatgtagtcaattctcctaaaattacgaattatttttgtggtagagaaaataaatcaaatttgaattatgtttgccaacccttatagtttgtacttaatttagctaatttctaaataagtcccaaatatatagacttggttactaaaaaaatcaagaaacttatttataaattgatttgttaattgctttaaaaatcaccaataatattacaatggaatcatttcgtttgttagtgggaatacaacttattctttcagtgttgattttgaatgaaagtagaacatgtatagcccaaggtttgaaaacagcaacaaccacagtgaaatgttctcgaaaacacagcgcggttttgactgagtttggtggcgttggcgatggagtcacttccaatactaaggccttcaaggccgccattgatcatctcaggcccctagcatcggacggtggagcacaactcatcgttcctcccggaaaatggttaactggaagctttaatctcactagcaatttcactctcttccttcataaagatgctgttattcttgcttcccaggtatgtaaatatgtatgtttatatagcataaataaaatctattcaacaaacagtttttataggttatttaaattttgtaatagaaagttcattaaaaaaaaaatcaaaagttgtaagagaaaaataactaatgtttttgaaattgttgcatatctatatattagataagtcaattttattttagtttttagttttttttaatatcataattttaaaattaataatattcaatgtagtgataattattaaaatttgaaaacataatagtgatttaaataaaaataaaaattactattatactttgtaatagtaattaaaaaaaattgttattcgttctaaatttatcttcggaattaat

SEQ ID NO: 294917 - DNA, 2768 bp, Cannabis indica
ttttttagaaatgatcttaattccagtctcttaaatagtgataatagttatgctaaaaattctaattatgtttttttttttctctaatctataattccatttaaaaaaacaattttttttaaatactaaaaaaagttatttttattcatattattttcccgaaaccatgtcttaaatttgagtgaatttttcgttattctttttgttgggcttttgggcctagaaaagcttatccattttagtagcaaaagaaagaacagctgagcattcgtctatgctgagagatgagcagagcaatggcagccagcatagtaccctctttctcattctccttcattaacaccaaagccgcagcactacttccggcaaaacgagtcgtttcttggttatcccctccgttatttcgaccatgccagcttcctcatccaaaaatgcccatttttgctgttgtagatggagaagcagtggcggtagaggtaccggtggaggaggaaggtttagatgacaacagtgacgaagaccacaaccaaaacgacggcgtttcgacccgacaatggaataatcgattggtaccgtgcaagttatatgtgtgtaatattcctaggagctacgatattccagacctcatgaatttgtttaagccttttggaaccattttttctattgaggtagtcttcttccccaaccccaacgctgaaacttaatatcaaggcaaaagctttgataatctgcagttattttcttaatttttatttttcttattgtgaaatgtgaaatggggtttttctagatttgtaggaatcttgaaacggggttaagtaagggatctgggtatgtctcaattgaatccattgaagctgcaaaagctgccattgctgctctggatggcactgtgagtttcaaacctcagttactctcttttggtttgctttgattgaagtttttttctttctttgttgaatgaagaactaataaaaacttgttcttcacattttgttttctcaaggatgttgggggaagagagatgcgagtaaaattttcgactcacatgaatccaaagaggaggaatccagagccactggactctgttccactagagaataaaatatacgaaagcccttataaggtctatgttggaaaccttgcatggtctgttcgacctgagtatttgagagaccactttagccaattagggactgtaaaaagtgctcgagtgttacgtgatcgtaaaggaggcaagaacagagtttatgggtttctctctttctcttcagctgaagaaagggacgctgcactatcattaaatggagaggtatgaatgaaatcccatacaaaccatattcttgccttctcttcatcttcatcttgttgtgtttcttattcagttttgtttcattttcttgcaggagtttcatggtcggaaaataattgtaagacaagagttacagaaaaagattggcccttcaatttaggtaccaaaagaaacatagtagtgaagaagaaatagaatgcaaggctagcttaacgtagttgtttacacgtccgtccattcccaacccaaccacagttttgtataacctattctatattgatgagttgagtagttgttgttgtagcctcttgtaaattaacgttttttaaccaatattattatgttaagctgagacagaaagtgaagaagatggtttcttactgttgacgtctcttaaacagtttaactcataagacacatcattaatgaaactagaaaagactgtgcaatacttctatgaggataatcaagttgcaacttcgtgcgtggcctaacttaaggctcccaaagcaaagaaaagggtgtttggaaaacgaagctagcccaaaaattatacatcaaacaagtttaatgaagatattttgatctgtaatgcttgcaggcaatcctacaatgaaagtcttacaataaccatacagcattatatacatataaatacccctttatcttcatctcacacaaaagcttaaatggccctcttagctgctgcttcttcctaaaactgttcaataacttggtataggccgagatgactagtcacaatattattactgaaaattaaaccaaaaaattccctttttctcatcagactgttttgtggccaattaattaaacaaaacgctgagaaagattgaataaaaaaataaaccatgtagacaaattttataggtgttgtcgtgatttttcctttttagtgtgaaaatggttttagttgtttttcttggttttaattaggtggtatgtattattgacgcaggtgcttgtttgtgttagacatgggttcatttcattaggataggtacactctgtagcgtgtaattgtttggagactgggaagtcggaaatggtgttatggcttgaacaaaatattggatgtggatgcatattatgcattggaagggtagtgatattcttgcttgcttgtcaatcagttaatgtcttttatgttgatgatcttaatattgtttgttttgttggtgatatttagtattttctgtgtatttctaatgttggctcttccttctttgttctttctcagggaaacaaagttgttggacccccataacttgtattcacaccagcataacgttatgtgaagcttgattgtctataggaagatggttgaaattctgattttatgattaccaacttaattatttaaaatagagttttttgcaacaaaactttgttaattgtcgtttcacttgcatttaaccttctaagttcaaattttggc

SEQ ID NO: 294918 - DNA, 8218 bp, Cannabis indica
aaaaaaaacaaaacaaaaaaacttccaatcaaagtgaaaaaagtatcatttatcacaaaacactaaaaaggaattactacaagaacatagacttgggactgtgagcgaaataatgagtatcacacaacacaacaatacccgcagactgcagtgaccggtgttcagccttaaaacaggttaaaggaagatgtagtacttagattgcttgtgccttgttggtttgaggcactctgcaaacactaatgtttgagttagttggttttgaccaaattgttatttcagtttctggtactgattattgaatatatttcatggtctgtttcacatattgggtgattttgtcattctaccttatacagaatatgtggtttttgttttttcctgtaattttacaggtattgagcctttgaattttttctattcgtcccttttaactaattatacctttgttttcaaaatggtcctcggcaactttggcctttgaagaaaacaatttgtggttgtttgaaataaaataacatggagggcaagttcagaatcaaaaaagatgttactgaagtaatttttctttaccagaaattaattttatgaatttatttattttttgttgcttttatgccgttttactaatggtcttctcttttattttggttcgtgtagttgattggtaatacgccaatggtttatctcaacaatgttgtggatggctgtgtagccagaattgctgccaagctagaaatgatggagccttgctctagtattaaagacaggcacatacatatataaatcctcttctatttctttgaaactaatatcatatttctaggcaattggtcaattttagagttttctatagattgattaacaatgcatttgaccttattgttcttctggtattcagaattgcccacagcatgattcaagatgcagaggagaaaggtctaatcacaccaggaaaggttagtcgtgatagttttcaatgtctagagttatagttatatttttgaccatacatatttcatagcatggtattactgtccagcccatttgaaagcttttctagttcagcaattatgtttctgtaacatgatttctttctgaatttaaacaaattatctttgttctgattttgcttaatttattgggattggggtttgattgaagactgtcctcattgagcctacaagtggcaatactggtattggattagcattcatagcagcacttaagggttacaagcttaaacttaccatgccagcttcaatgagtcttgaaagaaaaattatacttcgagcttttggagctgaggtgtatcttacagatcctgcaaaggcctttaaagggggtctagataaggctttggagttgctaaagaacacaccaaacggttatatgcttcagcaatttgaaaatcctgctaatcctaaggtaccataatgtaattcttagtcttatgagtttaccatatttggtcagattttgagttgggttcttatgttttttctttctttcttccagattcattatgaaacaactggcccagaaatatggagggactcgggaggaaaagttgatgcattggtttcagggatagggactggaggtacagtaactggagcagggaagttccttaaggagcaaaactcagagatcaaggttgaattttaatttagttgtgaatgagaaaaatggtgttcaaagagagagagaagttaatgtactaatggtatattttcttgtttgtatgtagatttatggggtagagcctgtagaaagtgcagtcttgtctggtggattgcctggtaatttatcagtttaaatttatgtggcttaaatttattgttttagtttgtcctaatatagatatatctgttgttttcttataaggaaaacatctgatccaaggactgggtgctggtataattccagatattctagatgttagcctgctacatgaaattttccaagtaagttttggagctacttatactggttttgaatttgacatataatttgtatctgcctcatgagtcattgttccaatttcctaatgaaaacatcaccactatgagtgaagtgttgcaacctaagctaaatatgtcatttggtcatgaagttcaaatgggaatatctttaacttgattgttagaaacctaataatgaagtcatttcatattcttttcgatgctgtcaatgttttcagatatccagcgaggaagcgattgagatggccaagctgcttgccttgaaagaaggcttactggtgtgtcattcaatttcctaatgatattaaataaagaataaaaagctctagatttcttttgcttttaatatatccaattatgatgctcatttaggaagatgtatgttttacaggtaggaatttcatctggtgctgcagctgctgctgccattaagcttgcgaaaaggccagaaaatgctggaaagctcattgtggtaagtcatattcttctcttaaatttacttctatattgaaagattattgtgtgcgtaatccgattatattttcatggattaatatcatttaattttgtcaatgttcaggttgtcttccctagttttggagaacgttacctttctactgccctatttgactccatcaggcatgaggcagaaaacatgacttttgattgaagtttatttttttttttcgttaggactttgactgaagattttaaatacagttgtttgaagatagttattttgtaagatttaatggttaaattcataatagcaatcccatcaagttgactattttgtacgaaagaaacagttcgcacaactatatcattttgctttcacagttaaaattcaataactaaaattgcaaattaaaaactaaaatatggaacttaattggagaggggccgcgcgaacgcaggcccccgctgacacaaattatgacgttggctctcccacttggggagaccataagcaggcacccctcctaagtgcaatggaggtcaccagctcaggctatgggccttcttgatcacccattaaccccgtccaggtaagtatgttatgcagtttcctatctttcctatctatacatccaattcttcaaccaatttctatacttttccaatgtgggactcttatattgcatcctacacaacacgtgaaaacaaattaccaatatcaagttaggctcttgagaagcgacattctgatttggaggattaaggacatgaaaatactaatgagtaaccagtcttaaaaattttatagacttttccctttatagatttttatctcactaaaagtatgaatgcaagtacagaataacactttcaaaatccattgcataaaaccataaaacagcttgaaaatttggctgagatcaaagcaaactataaaacaaagaaatcaataagcattacataagaaagaaagaaattgcatttaaggtgaggtctacttcatataaatatatatatatattgctgttgttatgtattgaattggtctctgctctttttgttttgtacttgtttattatgttgattggattaaaaaagattatcccaaagatttgattatctatagattcatgtaccaaataccaaccacaatgcagaagatgaccataagatttaacaaagaaaatattggatccaaatgtggaccccaagcatggagaaaagtacaatcttgctttccaagtaatgccacttacctaaaatcattaagataaagaactaccgttaaaacttaaagcatagactcactcaactctgagtatatcaaaggagcctgagtcaacactcaaacataaagtacaattaagctgcaactttagtcacaaacaaaataaaatatgtatatagtagagaaaaactatgaaaccaacaattaggtgttatttatatcatgatgaactttgtatataaagagatattcatgatgaacttagtctcataatcttttttctttgttgttggttctgagttactttacttcagatcagatttgcaaggatttggaagttccacaactgagtatgactttttattgtttccataaattgattgttcatgtacttttaagttgaagcatgttcgatctaaatcattagattgtctcttatgttttagttttcaaatcctcctaaatttctttttgagctttattgatttttgacaagtttattatatcaagtagttccttttatcagatactggatactgagcctttgactttgacttttataccataccttgcactatttgtgcttttcttcgttttttctaacaaaatggtatgctgctgttttagcctttggagcttagagagggagaaaatagctctgtagttctttgaaatagaataagatggagggcaagttcgcaatcaagaaagacgctactgaagtaatttatctttgtcataacttaatcttatgatgcttcttttgcttgctatatatagttatatactactttactaatggctttctttttttaattttggttcatgtagttgattggcaatacgccaatggtttatctcaacaacgtcgttgatggctgtgtagcccgcattgctgccaagctagaaatgatggaaccttgctctagtgtcaaagacaggcaggcacaaattatataaattttagggtaaatagcggcataagtatccaaagttttatgtttgtaagcggcataaacccaatgtttatttttagtggcataagtacccaatgtttgtgaaactgtaattttttttcagttttgtcaatacagactctattttgaatttatttaaagaacatttggaagtaactgatcctatatatttctatttagacccaatgataaaaaatttaggccttatatgtaccctgtttaagacaatatcagagtctatactgacaaaattagagaaaaattacaattttacaaacattgggtacttatgccgctaaaaataaacattgggtttatgccgcctactaacataaaactttgggtacttatgccactatttaccctaaattttatttcaatagttctttggaatctacattaattttaatcgatgttatgagaattctaaccttttgtgtttgtgttagaacttttgattgataaaaaaactatgcaattggtctcactgttctggtatgcaggatcgcatacagtatgattcaagatgcagaggaaaagggcctaattacaccaggaaaggttagtcatgaagatttcctatatttaatatatggttatataattggccatacatattctatagcatggtattactatatatcgagccattgccatagtacatatacagtttttatgcaatccaaatctagtaaatgttttatatatatatgctaataattttcccgctacaagttcaaactaagttcagtttagttcttttcttctctttatttcaaattttgttaagcctcaaaagcaagtatgttcagtcagtcatacaagggaggctaccacacatgtaattgatttgttgaatttctgaactctgaactaacatctttttctgaccggctatgcttgaataatgtgcgtgtggtggggtgaaagactgtcctagtggagcctactagtggcaacaccggcattggattggcatttgttgcagcagtcaaaggttataaagtaaaattagttatgccaattataagcagtctcgaaagaagaatggtgaaccgagcttttggagctgaggtgtacatcggaaaccctgaaaaagggattcaaggggtttttgataaggcctttgagctagtaaatgagacccctaacagctacatgcttaatcaatttgaaaatccagccaatccaaaggtattatgcagaaacaatggggtctgtgatgttgccatcatgatcagattatttaattaagctgtctttgttcttgcagatacattatgagaccactggccctgaaatatggagagattctgaagggaaaattgatgtcttggttgcagggataggaactgggggtacagtagcaggtgcagggcagtttctgaaggaacagaacccaaatatcaaggttcatactttatatacaacatgtgtctagtttcgatcattttttgttgtttgaaaagggagatggaaactatttttaattatgttaattgggcttctctttaattatgtataggtttatggggtagaaccagcagaaagtgcaatctttaatggtggagcaccaggtgagcaattattcttaaatcacttggtatccatattcatcgttgtgctttgctctctcttatatttttggatatttagttcttgtaaaaaacaaaatcttcagcttgtcatttttgttgcatttatgattaaattattgaattttctaactagacacgcatggtttggacatgtcttagggaaacatgctatccaaggacttggagttggttttgtcccagaagttcttgatgttaagctacttgatgaagttattccagtaagtttaaaaccattttgcatatttctcaattctcaatagtagttgttaaatgttagaccaaataaattctcctggtcaacaagttcaatggaaacttccatgatttaattatacaaagctgctaatgaagtcatgccatattcctttcaataaccaggtatcaggccaggaagccattgatatggccaaacttctagccttgaaagaaggtctgctggtatgtcatctaatttacctttttatcatttgacttaattgagttaatgacttaccttacttattttaagaacatatattttgcaggtaggaatttcatctggtgctgcagctgttgcggccattaagattgcaaagaggcctgaaaatgctggaaaacttattgctgtaagtcttgatgtgttcttttaaagattattatctttgtggtggtggacaatactctaatataatggactaatatatttagttgattctgtttaaaaaaattcaggttatattccccagcttcggagaacgttacctttctactgaactatttgactccatcaggcaagaggcagagaacatgacttttgactaaacattattcagagtttgcttcatcgtaattgttatgtattggatttagtcatccaaatatcagatctttcttgtcacttactcagcaaccagatttttacaaaataaatttctcatcttcacttgtgttctaatgtattgaattcagccataatttaatcagatcttgatagctgtttagttagtttcaactgcatagagaagaatatgagtatgatgagactagagcaatattgaaagactaaattgacaggggccgcgcgaacgcaggcccccactggcacaaattatgacgttggttctcccacttggggagaccatgggatagcacccctccgaagtgcaatgaaggtcactaacccaggccatcgaccttcttgatcacctattgaccccgtccaggtaagtgcctttagccgtgggctactgttgttatctatagatctcttttcccaacctaatcgtattctccttcgatgtgggactacgctattcatgctattcttcctaattttgaacactagaatagtgctgacaacaatggaatgaaaataaaatgaaaggccaagagttttttttttttcaaaccaatagcctatgatgcatgcagcaaatattttgtaagcagataatctctaatataattgtttttctttttaaagaatagtctattaattggaaaattagaccaaatggtcattacaaagtaagtcattcgagagataaaaaacaagaaaacacccatactagtggtgggcgaaggtccaccgagtcatattataagcggcaaaattacatgatttacgaatacaggaaaacatacaaccgataaaactattagagagctcataacaaaaattaaaatagttctcaatctaccaacacgacgagaaacacgattgatagagttgatgacgaccctagagttgaggcggtggcttgttgcacatttaatagttcatttgactaaattaaatgaacatttattaataatttctacattgttcatttacgcttcaggctttttcaactcattctaacttaactttgaataatattgatttacagttggtatatatcattttgaactatattcgtttttatatactttgtgcaagaattattttcaaaaattatcatcgatcccaac

SEQ ID NO: 294919 - DNA, 1548 bp, Cannabis indica
gaattttgagacttgtgggatacaaaattagaagaagaaaccgacttgagagactacgaccattgtttatcaatgagttgtttatcttctattaattttatgttcctatttaatttaattcaattcaattgttcactgtgacaatgaatagctaaacttctaattagagtgttaatgtatatttgtttgatatttctctttggttttaatgtagttttagttattccccaatttcttatgtgcatctatttcatttatgtttatggctttgatcaccaattatttgtttatgatttcaatacaaaatctgaaaggtgagtattaattatgccatagtgaaaaagacataaattttaatatttgacgaaagtacctgtatggtttgtgtagcaattaagatttctatataattcagattctatataacctaataagaatatataatgaagtagttaatcttttatcacatgaaattagaataaggaattaaaattgtattaggcaataaaaaattgatacaattgaaattaattgccctaaacttttatcaatgttattttcttattcttttattgtttttaatttagttttaatttcacatcttaaaaaaatttattttcatcatatcgaactaataatttaattatttagtacttaacaacagtcattgtaagtttgacctcacttgcataagtatattacttgtagcaatatgtgtacttgcgtacttaaaaattcataacaagtttatgacaccattgctagggaggctaattacaacatgatatttgagttcttcacaaattttttattctaaaattaaaaaagatgacatttatatgagaggtgtgtgggtgcctttgggtattgaccagatagatcgtcaattcaatctttatgaagttcctcaagttagggatcaaacattgaacttaattcagtccaaaaagtgttaatgatgataaggtggcttaaactttaagcatggagggagctcagttttcaactacaaataatgaccaaaagtacttgtctagatggaaattaaacttgattgctcgagcttaggtttgttttgttaatgctgacttattattaacttctcatctttccacaattgatcacgagaggtgcttggtagcttatgccatcatgaagaatctgaacttcgatatatgtctactcatttttgacaatttcaaacttatagctcaattcaaaaccactctcattactgccttgtgttctaagaatggagtttgaccaatggagggtgatatggttcgcaaactgatgggcatgattacccaaaagtacttttatgattttctacaaccttctctcacttttcaagatgagacatgtaagcatcgtaaggcacatgaacctgaagacggtgaatgtgacagtcagtagtcctgtgatccgtaagggaaaatatcaggtaagttatgcaatcctacattgccaggtgtcacgggctcacacttttaggtagcggaacacccgtgcggcaccttgacttctctaagccaaggtcagccttcc

SEQ ID NO: 294920 - DNA, 2980 bp, Cannabis indica
tatgtattttgaggtgtcatctgtggccaaaccagtaatacataattaaacaacagcaaaaagtaaaataatgatcaagtgacatatttgtaatatggtccaaaaaatctgtttggtgtgaaagaaaactcccaaacaaatatataaagttcttgtttgggtccctcactcactatgaggctttggaattgaaatgaaaataaggctatttagtcaaactcaaaaaggtatgaaatccatagttgaaattgaaacacataaagaagtatatgagtgagtaaccaaagctgttcaattccattattaagtataataaaaattaaagctttttgcataaaatgaatgaatgtttaaacattgaaacaaattacaacacaaaaagctaagctagaaacttggattatatatttcattctatcaaacaatgagtcaaaaagaaaaacaccccattacaaggtaacaaatgagctacaaaaaaaaacctgaaacaatggacgtgaaggcctgtgaatcagagtgcctaaagtgtatttgatgttaaattgcctataaaaaaatttaaggaaaaaaaaattgaagaataaccgaacaccatgttatataggcgctgtacatgttgaccgaaaatggccagtctgattacagcggctgcaatgcacaactcgtttcatccgacccccatcttctgtgcgaactcgctttttccttggctgtgcaggtggcttcaatgactttggagggtttataataacctttgcttcaacaagatcacctccattcagtgagtccaaatctaatggcgtttctttccaaagggttttgtctggaatcgggtgtattgtctgtgagtatgccttgcgataatttgccacggtgaaataattttctgtaaagcgatgaacgttctgcctgcaagagagaagagctgctacagcatgagcacaaggcagtccagagagctgccatccacaacaagtacagcagcgagttctgatgtccacaacatgctctccttcgagggatagaacttcgaatttagcatcgtcttctttaatgacatgacaagaattagcacgctcgattgcatctgaaacgagcttttcagcagatggaactagtgttcctgtccactgcatactcaattctcgacgttcattgaaccaagtcatcagctgtcgtcgtacacactccatcatttgaataatcggaagcccagaggcttcaagtatccaggaatttaaagactcagctgaattagaagtcatatgaccaagccttgttcccttgaaataagctgtggcccacaagtaaggaggtactcttcgaatccaataggcagcttcctgtgaaatctcttcaatctcaataatttttgcttcaaactccattactgttaaggcataagcagcctgccaaagaagattgataagcatggaatcgttgaattctttctgaaaactgtcactaaggaaattcaagcagaatccatgaaaagcagctgggaaatttgcttccactccctctacaatacccttttgtcggtcagacaaaatcgtaagtcttggcatgttttccacatttatctcaaggaggatgtgcagctcggacagaaaccacatccaattatcatcattctcttcatcaaccaccccaaaagctaatgggaatgtggccccatctccatcaaaaccagtagcaaaaagtacagttccaaggtacttgcttttcaaatgagttcgatcaagtcctattagaggccgacatgcattcagaaatccatatatagaagcttgaaatgagataaagaggcgttggaagcagttatcagcaggatttccataaaccagagcaatgcttccaggattcgtccttctaatctgctcacaatattgaggcagtaaccgataatcttcctcaaatgatccacgaagagcagccatgaaccgttcctttcccctccatgcctgcttgtatgataaagtgattccgtgaactcggtgaatctcttccagtatctcctttggtttacattctggattttccctcaaacgttgttccacagaatctgcaacccactggactgaggcttgctgatgaccaagatgagcaactccaccacaattatgttcttcatggatggtcctaattgtgaaggtcggtacaccaggaagctttgcagcatgaattctccaaggacatccttcacttgcacatttagcagtaaaacgagttttgtcagatttaactgtctgcatctcaaaccgaagagcaatagctgcatctctcaacgcccttcgacaactctggacatcagaaaactcttggccaacagagagttcataattaggggccacaactagggctctagactgagagacaggttcactaactatcatctgagaatgatgaagatcaatatctgatgacgaaacaatattcatttcctgtagctgatcctcagatatactcatgctttcatgaaaatcatggctctctcctccaacagtcaattcatgattaaccgataaacccaattcatgtgtatcgacattgatagaaagtctatcatcatgctcattaacatcatcaatatggtcttgctctggttcataattattacttccttccgtgtctaaattgttagcttgaagattcttcatatgttcatgtgtagcagccatttcatcctcgtttaactgtccaagagctaaaccatgatcgtggtcatgaactatatcaagctcattgtcatgatgggaatgtgctaaatctaaattttgatcatgagtcacaccaccaacatgttgattatgcccaagtcctaaactttgattagccccaaatgataaatcatgactttgcctcataatcacattatgactagccattacaaacctaaaccccaaatggttcaatcaaaacaacaaacacctaaagttcttccaaactgtatgtcatgtaaacctgattcaaaattaaa

SEQ ID NO: 294921 - DNA, 5403 bp, Cannabis indica
gtctttattgttattttttttttcgttcactttgtatttatttctttcattgtgaatatgaatagaatgagaataaaaaaaaggaaatttattaattaaacccatgaatatttaatttcaccgtactaaatatatgatatgaataaaaccatatatttttgtacacttcttgatgttagttctgataattttcttaggggcgggaatgcttcgcttgtgctccaactgggtctggcaaaactttggcttttgtttgtcccatgcttatgaaacttaaggtactttgtatgtgatttgaattgtgtttgcagtgttttgctcttaaattttgctgattttatctttctgtgtaaccagcctgcttctaaagatggtgttggagctgttatcctttgccctacacgtgaattggcatctcaaacaattagagagtgtaaaaagtttgctgagggaagtaaattttgtaaaagttaatgactaagcagcttatacgaaaagctgatttatcgaagttctcttgtgatatattagtatctactccacttcggttaaagttagctattcgaaagaaaaagttgaatttaagcaggcaagtgatgattttcaatgtttgaacttatgttagcttgctgcaatttgtctgtattcagtagtcaaacgacaacaagacagtaataatagatatctctatatatcaagatctcttagattttgctattgttcgtagtaggtgtattctattattcccacttcgtaattatatcatttggaagtttcagaaactcagttttagtgatcattgcaatggaattagatgaatactgagcatttaagaattgtccatgaactcatgaattattttgtggtgctatgcagggttcaatatcttgtactggatgaatctgataagctatttgagcttggcttgttaaagcagattgattgtatagtcaaagcatgctcaaatccttcaatagtacgttcattatttagtgctactttacctgattttgttgaggagcttgcacgtacaataatgcatgatgctgttcgagttattattggcaggaagtaagcttcatgaatttattgcaaactagagtttgacatgtgttacatgttgacgagtaaactgatttatatcttttggtttaaacaggaatacagcttctgaaaatgtcaagcaaaagttggtttttgctggaagtgaagaagggaaacttttagcacttcgtcaaagctttgcagaggtatattttgcagatatgcaccacatggggaatttttgtttgactaagatggcgaagctccttctccctctctctcaagtagagaataatacccaaggagataaattatggttatgactggaggagtctgattaatgatatagatctccattgagataaatgaactagcatgcttgtttgctgtgcaatattattgttattgtttattgtttattgtttattgttattgttattgttattggttattggttattgttattgttattgtcattgttattattattgttcacatcagtattttcatttggagcatctttcttaatatccttccaactcatctttttttgtttttccttggtacttgtcagtagagtttgaatccgccagtgttaatcttcgttcagagcaaggagagagctaaagaactgtacgcagaactgttagttgacgacattcgagtggatgtcatccattctgatctgacacaggagcaggcaagttcttgttatctttaacatatactacttaattaattacggtaaaggaaaaaatattctagtgaagcatgcaggatccttctctacttcataactctcgccaatcaccatctgacttaaacaatttgactaaaattgaaacaaaatctagaataatttagttgggtgcctggtaaaaaatgagagagatcttaacttttggatgcccttcattttgacattgctgaagtaactcttcttaatacttagtaatggtactgggaaagtgcgtaagtgtatgaaaatgttttggactacatccatgtgctaggtcctttggaacttgtaatatctcttttgaactttctgtggacctgctcatgtgctgaagtaactgcttttgggattattcttttcatgaacttacaatctactgtgtgttgagtgctaacctattaaacggcatacagcgagatagtgctgttgataacttcagagctggcaaaacatgggttttgatcgccactgatgttattgcgcggggtatggatttcaaagcaatcaactgcgtgatcaattatgattttccggattctacttctgcatacattcacaggattggtatgtcattcaaactcttctagcatgtgtttgagaccctagtaaggaaatatagaaatatagatttgtattaatttattgttggtgtgccttgcaaattaatatttagtattattgaaaaactgcttgtcctggtctcttctaaaatgaaactaaactctgagaccatgtttgctattgttctatgaaggtcggtctgggcgagcaggaagaagtgggcaagctattactttatacactgaggaggacattccttttttacgaaacatagccaacgagatgaaaagctccggctctgtgtttccatcttgggccattggcttgcagaaaaagaagtggaagaagcaccggcctcgtagagatacaatatcaacaaccccccgagataagggagaaaagaagaaataaacaatgagttttccatagttgtgagttcttgactataatgtatcggttttaatttatttggttacaaaattttgcacacccgaaatgttataggtcgatttttactttttctttttagttctaatgctccatatcaagctggtgtgcttttgaatgaaatttctgtcgcttatacccaaaacaatgtgattgaatacaacatgcttccatattcttttgaactaagaccatctccgcaaaattagctaaatttacttcatatttggttcaaattttgtaattgctctaacgtataaagtgcaaattaatttcaaagtcaatatactcattaaatttttattagaactatatatataaaagtatttaaatagattaataaaatgttagttgatcaaaaagaataaatagaaatcttttaattaataaaaatcattaattagtgggaattgagtaaacaaaaaaagtaatatttattgatgtgttaatttatttatgttataatttgtgctaaatttgactaaatatagcatgtaaacacactttttacaaaacaagtaaagcttcattttgtttaactatggcaatgcaccgctagctccattggaaaatgaaccaaaggattttaatctttaacttcttttcaacaactttaacatactattatactagcaacacctatttctacttcaattaaatagtagacttacactctacttaggattttgaacaagtgcatgttattaggcactagtagtacctatcaccacctaaagatattttgtaaatggttagtaatattttatgtgagatttgatacctaataattctaatagcaatacgacaatttaggtggtgccactagtgccttttctctttgaacaaagttgtccagtaattgagcatattgtgatcatggttgctgcaaacgtagagccccttcccttgaacgaaatccaaagtagggaaacacctgaggaaaagagggggaagatgatgaaacattttcaaagatagataactatctaatttctattgttttaacttggtttgaactcatatgaatcaagccaactttgagcaaccaattgggttagggtcattgtaaaaacacacacaaacaccacatcaaaatatttcaaaagtcagccaaatttggactaaatgcatgtaaaatatcatttgagcatctcaaaatcaagaagcaaacctgtcatgatcatagccagcggtaagaggcagtttagtttcattgaggctggcacttggtcagtgctcgagtggctttggggtttcagtgaaacttcttttgctgtaaaaagcctatgccttagagtggatcacaaccttcatccaacatctgcaaccacaattcctcaagcttttcatataccttgtccctctctggatgcaaagtatcgtcagctaaaaacacatgggttctacccttaacttcgatccagctctgacctggaatctttctaacacccctttctttcatcaagctcctcagtctagctacttctgcccaatggccagaagaagcatgtatgttgcaaagtaaaacatgagcagcagaattagagggatcaatttttataatgttctctgctgcccgttttcctatatcagaattcccatgagttttgcaggcagctaagagagtcttccacaccacaatgtcaggctcaaatgccatttgcttgataaattcctctgcttcatgtaagcgtccagcacgagcaagcaagtccaccatacaagaacagtgctctctagttggtaaaatcccatgctcgatttcaattgttctatagatgttttgtccttcttctactaatcctacatgactgcaggcagtaagaaccccaacaaaagtaacttcgtttggctttactcccgaacttttcatttttctgaagagttcaagagcttcctttccatatccgaactgagcataacccacgattaaactactccatgagactacatcaggactttccattgaattgaatagctttgtagcagttccaagtgtaccacactttgtatacatgtcaattaatccattgatgacagaagcatttagtacaagcccactttttatagaaaaacaatgaacttgattccctacctccaaagatataattacagcacaacctgtaataacattacttaaagtgatatgatcaggtctaatttgagagcaaagcattaacctaaataatctgaaaacttctccagcttcattgtgctgcgtgcatgctgttaaaagggcattccaagataccgaatcagcactactctctatatcttcaaagacactaaaggcatcacaaagcgctgaacactttgcatacatagatagcaatgtgttgtgtacaggaacatttgaatcaaaacccattttaattatgtacgagtggacttgcctaccctggtggattgtccaggagtttgtgcaagcagaaagcactgacaggacagtcacatcattaggtttaagccctatacatctcatcttattaaagagtactatggcttcattggcgtctccactattagcaaatcctgatattattgcattccaagaaactaaatccggcctgtctatatgattgaaaaccgtttttgcagactctaaaaaccca

SEQ ID NO: 294922 - DNA, 8386 bp, Cannabis indica
tatttttattttgagttgtttgcggcataactacttaatattttagactaataacttgtaaagatctattgatttatgcctattaatacgctaaaaaaatcaatagatcattttttattttttaaataaaagcatgtttgataagcttaagaagtagatcgtgcatagtgtaatgcatgatgttatatctgaaaatgaattaattatatataccatatataatttggttaggtatatactaacatttcaagagttgttagaccattttgaatcataatcatacatgtcttatattttgttctacaagtaaagatgaaataatagatttttctaattaagactagttgtgatgaatgtaattagctagtaatgtaaaatttcaatattggaaagttacttaaggaacaagagattatcattgctttagttaatgattatatatatatatatgtattatctttatttagacagttagcataaataactttaagaacttaaagccctggttgttgtgagaatacttttcttggcttcattgagaattttttcaaacacttttatttggtattatatatacagaggccggtctaagtttgtgtttggacccattagtctaggtgctcaaaaaaaaaaattatcttttaaaagtatataatatatattttttactaattttaaatttataaataagggtcaaatttttttattattatgatctactaaaatttatggtcggtcctatatatatatatatatatatatatttatttatggatattgcacttaaaagcaagatggggagcaataagttgtttttcactcaactagtctaaagtaattctaagcaagtttacttaatcaaatattgaagttgtgacaaataattaatgaaaatgaagaaaaaagaaaggcaaaaaaaaaaaaaccatgccgatggcttttatagtactaattaaagaacaatgtagaattctttgtttagtacattggaagtgaagtttttaaatgtagggtccatggtattgattagtcttgtgttagagtggtaggaagattttaatgtaggaggatcccttttttatctcttccataaggatgtttattgtgatatttgcggcgaaacacttttaaaatagttgtaattattacatttatgactaataaagagaaaaaataacgacaaaagtaatttattttatgattttgttataactgtatcattttttatgttaagtgtcaattaagctcgttaaatatcaatttaaaaacacgtgacaacatattattgaaccatgtatatttagttaaagaactaattttgtttttctattcaaatttgtatatttttaattaaaaataaactaaataataatagtttaatagtcatgcgtttttaagttggcattaacgggcttagttgacacttaacatccaaaaagagtacgactgcaataaaactgtaggataagatacttctaccgccaattttttttattagggtcatgtgtgtaacaattgcaaatactaaaagagtttcgccgcaaatatcccttattcttttattttcgtaattgggagaaattataaatcaatttttctgtattgcatagtgttatctcattttttagaaaattctaaataatttaaggtgcttgactttttgtatgtgtttttaatttaatattgtaaattattcaaattttctaaaatgaagaaaaatgtctatcataactatatcgtaaacataaatgtttatatttatagagataaaagtgacacttaatccctaaatttacaaccattattattaggaatcagcagttctcatatatcattttgtggtgtatttatactaatattttattatggtagttattaaattaaagtacatgaaataataaattgtaataaagttatatgatacttctatatttataggtatattgaataactcattattgatatatttgtttttattggtgatttattttggtagatgtaccggatagtgctcttataataagaaagcatggattgaagagcaacctattctcttgcctaatgttcaatgagttggaaggttttaaccctagagaccaattggcttttgcatttgtgagagaccaaatgagaccaaaattggaaatgaacatgtttgaagtggaagtgtttgagcaaattgtagttgaatataggcataacatcataaagtaccatacaagtcatcatcatgatcatgataatagcaccattcttggagggtctcaatctcatcattctcataccaaaaactcaaaaataattaatcattctcttgatttgatcaactatggaagcaacaagtgtcaaaagtatctttccaagatgtgggatgaatatcgttaatctcatgattgatatttttctcgtatagagtattacttttgtgtttattattggtagggcgtttaactttttatatttagaaaaattataatttatttttttaaatatcagtgtacattgtagtaataagtattttattagattttaagaaaatttaaataatttataatactagaaacataattcaaaataattgattgcgcacatgtaactcaatatttaaagttttgaactatgtttttcaatactataaattatttgttttattaaaacaaaaaatcataatatacttgctataattaaaatgtttaccctcataacaaaaaaaattatgataaaatttcttcaattttaaaaggtaaaagtgttcttagaaccaaagtaatgtctctaaaatttacctacattgaagttaaattaaaagtataaaattgagtatagcttccttctttttttgtatattagagactagtttctgctttttggtagttcccaactatatttatttatttatctaattattattattgtaaagagagaaagaaaggtcatgtattatttggagatcaaacttcaacaaaataaataaataaatggtctaagttgaaaccacatagctaagaagtaagaagaggcttactacaatattatcaattacttaatactcttagtggaatgggatatcaaagtgtataatttaagagtgtgactaacattacacataaatgacattttatgagttactgaatttaattatttgatattctaaatggaacccagtttcaaatgagttgcaactcaaataatgttggggcacattaagaaagatgattattttagttattttacaaagatgagttttgaaccttagtacacaaaacagtttcaggtccaaaaaacactaactttttaaataatataataatggctgcaattaaaagcagacccttgaagaaaattatgaacctttttggtatagaaattttttatctgtatcaatctattgatgatgcaaggcctaacaatggcaatctttcctcaaaattttgcatagtgaattttcatgtgaaccattgccattttcagcattttccagaggattttgcaatatcttggctgatcatgaaactccacttctggtcccatgtcattgtactcttctgatttctcaagaatcaattctaacccgaaatcagtttgattctccatgctctccaacctaacattcttccattcgaacgcctcacgtcccaatgtagaattactttctgaattcagtaggacaattatggaggatctcccatatcaaaggctaaagaactcttgacatgaatgttgacactgccaatccaatcccgagttcacggtgcagtagacatttcatgagaattatcatttcttgtttcgttgttttcaacacggcgttgatgattcttaaccccaagggttttaaaatgccacactgtgtcagctatctcatcttgaggcaaactcaaaccatgtttcttaattgatctatgcagctcacaaaagaatttggggttttcaagcttaatatattcatgtaaaaccctctcatgatcaggcacccaattcctcggaaatggagtgtaatcacacgaaggaatcaaagacatatgcgagaattgaacaccttcaatggcgtcgacaagtcccatcctcaaaagatcagagtactctggtgcagcattgttgctgctctccctcaatggacgactcagatcacgagaagctattccataaactttagctcgagatttcaatctgtacctcgcagcatacaatttagccaacgagctacgaatcacataagcacaaaagccaacaactttcttacgattatcagcatatctataccaatcagccattgtctcaagaaacttattcatctgagcattggtatgagcttgacccgagtaaagcataggagtacaaggcaacggctcgggatccttatcacccttaacaaaccgaagcctcctaaaatggcgtatacattgttgtaagctagcagtaacagagagcaatgtcccaacacctttctggctcacaatgttaccaccactagaggtgtaccgaagcgtcgggtgaatcaccctccggcatatgatatgatccaagaactgaattcctctactaatatgttcaatctccaatgttgaattatctaatctcaacccaaatctccattgacaaaactcaattatcttcttacgcatatcaactgcatcttctctaggacctctaatcccaatcaagaaatgacccccatatcttaaataatccatttttctagtcttttccttcccacttgaaggaacaaattcaggccaagatgggttatgacaaccatcaaagattgaatctttccatattgaatcaacactagatggcttaaagaactcaactatcttatcttcaatcatataatctaattcactaagacatatattagcaagtaaaggactaagaattccacaataaccataagaaggtaccttagaagcttcttcaggagcaaaatcaaagaatgatctaagccaataagggtctggtttaggttcattctcattaagaatcttcttcttagtagaacctttcttagtcttcttcttcttccaagcaatatctgcattaaaatctcttcttactgaatttggattatgagttttcaaagctgatttcatcaaacccaagattttcttatccttaacaactttctgtaaacaacccataacaacatctctctctaaaccatacaaaatttcactcaaatctcctctcaaaaaccagagatacccagcaaaattactcctgattgtacggattacagtatgagcattcctaccaggtcgaaacccatgagatttcttcgagaatcgtgcttcgaaaacaggctccaaaaccatcaacaaaacctcctgaacaaccctatcttgaaaacaaggctcgtccgattcgagcaaagctccaagtttcctttttgacatgattttcgcagtgggtttctcgttagggttccgtacatactgatcaatcttcctattccacgagaattgaccatgaacgacggcgtttcgtagcgaaagaagggaatggaggatttgggtatggatggcgttccgaggagggaatgttccggtcacgtgagcgcacgtgcgctggtaggccaagacccagagatcgaatttggagaggaagccagtgaggttgggaatggtgattacaggtggagaagagaaggctttgacccacatggctgaacatatatcaatggggtcttctttgaggagtgagtatgggtcatgatgctgagactgagctggtggtggagtggagaagaaggagtgagagagtgagcgagtttgggttttgaataacaagcttgaggttttgcactccaagtgtttgatgaatgttctcatatacattttagactgtttttgtttgattcagagctttggaatgaataaatgaatgaatgaacatgttcttcattaccttcctcctgtgagcttcgccatggaaggtttgtgtacagttacagcagcaatccaatccaagctttggttatggctattggggttagtcttcttcttcgccatgaaagtgtgtttaaatttgtttttgtatgaaatggaattgaacctaaaatgcaaaaatgtttataatgctggataattttgtaaatacgtaaaattatttactgtttttgcaattcaatccctggtaattttattcctgcaaacaaatccttaaagttttttttttttaatgagaagagaaaacctcgatcgaatagccaaatctatcattacaacattattgataacagaagcaacattgctactaataaaagtacaatttgattaataacaagccccacgaataagataatgagcgacattattagtaaattatttgacaatacaaacttaaaaattaacaaaagagtcaattaaaactttatctgaaactataaagaaccaaaaacagaaggcataacgatagtactttcaatcgcttaaacaaccacaagagaatcagttcaacaattgtatcattccatcatttctttttaaccctactcagggcttccttaacactaatggcttcggccaaattggtttaaactttgaacacaactatttttaatcaaagtaaaagcctcaatcaagtggccctcatcatcactagcaaggcaaccaacaccaaatgcttgacttgctgcaaataaagctccacaatattccccttgattttatttagtttcgatttattccaatgcggcattttttattatttttaacatatctcgctactcacaactctgattggcacaatcttggtgtcgttaaaaagcttattcaaagctttacaaaatcatgtttcactaggaaatccaaattcgaagtccttatagcctaaattcaagttataagtataaaaatttaggcatcaaaatgataaacacttccctacttagtcaaatttcaactatttgtgatataggaggttttgataccaaatcaatgtttcttgttaaatctcaagatcagtggtcagcattgtatctcaagatcgcaaacctcatcattcaaatataagatcaacagattgaagactagcactcaaaagtatcttcaaataatatatattataatatttaattttaatattattttacatttaaattagacttaaccatggttaagagagccacgttcgtaattaacttgagtatcaaatctataaataattagctttgtttattcatttatttttataatttaatttatctcatagtttgctatcaaacttaaaagctctcaaactctaataccctttgtaatttccaaatcttgcttagtaggacaaaagcttaagtagattagcttattattattaggggatgaactactataaaatatttgtgttcatttattttatttttttcattgctaacttcaacaatacttcagctttaattattttgatttaatgttattaattttagtacttaagaactcactctttataatagagaaactataataaaatttgttgcttccattaactcctctaaataggatttgcataagggcaaaaatagttattattgtttgaagggattttcgccatgcaaaaaaaattgagaagcaaaactttaaaatgacaatagttgaaggagaaaagtagttgtgtgggaccaaacatttggcagttgggtccttgcccaaacccaaagcctcattttttgtgactttgggctaaaccctatattctttacactataagtctataacaactacctcctatgtccaagctacactccagtttgcaaacatgaggtcgctattaattttattggagaaatgctaaaaagcactaatagtgtctagcaccctcttatgtatcaatatcgttattggttcaactaagtatcagatcttatatagcttaatgtaataacttttaaaaaatatcgctagtcattcgtaagagcatctccaatggtagcattctttgaagatgctctatatctccacatcatccaaaatttaatattttattttatttttctttcacatcatttttggtacttttacttttaaaaacactccaatagtataataccttttaaaaatactataattatgatatcacatattattatatatataagtttttttctttattaaactattatatagagtaatttgcggcataaatacctaagttttatgccgagtagcagataaatacctaagtcgtatttttggcggtaaaaatactttctgtcactagtgtggaactttcgtaggtagttggccgttatgtgccaggttagtggccacgtgtcattctttgattagtccacgtcatttaatttatatattttatttaaaaaattaatttaaacatttaaaaagtattttaatattaaaaaaatcattaaaaaatataaaaattatattac

SEQ ID NO: 294923 - DNA, 2477 bp, Cannabis indica
gattgcacagcttacccggtgtttccccttacggatcacgggactactgactgtcacactcagaagaaaacttggatcaaggttcccttacctcctggtagaaaagctataggatgtaagtgggtctacaaataaaaataaaaatttagatcgcagtgtttaaaagtacaaagctaagttagtggccaaaggattcctccaacaatatggctttgacttcacagagacttatagtccagtggtgaagactgctacagttaaaattgtcattagaattgatctatcctacaactggtctataaggcagctcgatgtgaataatgcctttctaaatagggagctctaagaataggtgtttatggctcaacctcttggttttattgatccagaagatccccatctagtctgcaaattgaccaaggcaatttatggtctgagacaggctcccagggcctagttcaacaagctaaaagatgctcttatgtcattggcttctcttgtgccaaagctgatacttctctgttctacagacacacttccatccattcgacattccttttgatttatgtggatgatatttttatgactggcagctcctaagcaactgttacagaacttatttttaatctccatcatatgtttgcactaaaagacttaagttctgttaattactttcttggaattcaggtgtcactgtagaagggttgcacttgtcccaaaataaatatattatgaacttggttgtaaaagctaaaatggacaatgccagaggtgaaaaaagatctgcaattggtagtgattccctttacagatcccacatactacataagcattgtgggtgctctgcaatatgctactataactaagccagaaatctcctatgcagttaataaagtctcttagtttatgcaaacacccctagaggctcattggaaaactatgaagaaaattttaaggtatctgaataggacactagactggtttacatatgaagccatttgcctcactcaccttaacaggtttttgtgacgcacattggaccaattcagatgacaggtgctcaacttgtggttttagtgtctatcttaattggctctaacattatctcctggtcctccaagaaacaaagaacattttctaggtctagcacagaagctgaatatcgaggcttagctcaaataacaacagaggtcattaggattaagctcttctatttgagattggagtcaagattctaaagccaccaactatatggtgtgaaaatcaaaatattgtccttttggcaaccaaacccattcttagaacaaaccatattgaattggaccactattttttttcgagaaagggtatagtcaacaaacaactgcttattcaacacacaccagcctgtgatcaaatagctgatattctcaccaaggcactatcaacaacacgatttcatatgctttgatccaaacttagtctggtttctttattcatactaagtttgaggaggtgttactgatgttgttagttaagtgtgtggtcattaatttgttaactcttgtaattgtatatagttatttataaatgtagttagttatttatgttagcatctcttttcctttctctcattgtatattaatcgagctactgctccattaacgaactgagttcattttctccattcttttctctctctctctcttactcaatctaacaaatcaagctaatcataatggcaaatcttttgtgtgtgatgttaaagcattttgttaattatgtaattaattaacacaaaaactagtaattaagtccaaaaagctaataatacgttaattgttgaaataaattcccatattaactgtacacaggaaaaccagaatattacaaagagttttacaaagcaataaaatactaggtggcctttggcctctaaatacctaggacagaatagcagttagttacaaagtctgataaactttgtaactaactcctctatctgcattccactactacaacacataaaaggccagaaaatgcaacaacaacagggataacaaaaatagatcagtatatacaacaaaatccagatcagatacaaagagagaaaaaatacaaagatttgaatacatctccagaatcaacacagagcaacaaaacaggggagttcgtggtagaggcttacagcgggtttgccttgaaaccctagttagggtttggagatccacaactcaggaaggtgttgttcatgcaacaaagaagaaatacacaactgttagtactgattttgagagaaacagagagaaaaatagaggaagaataacactgtatatatatattcggattaccactcttaccggtgtgagttggaatccaagctttgtaactcttgaacattgaagaatcatagtggaacgaggcgagctcgaagaggacgtacccagatttctttggggaacctctataaaatctctggtgcattctttcctttaatt

SEQ ID NO: 294924 - DNA, 1848 bp, Cannabis indica
tacgatataaatatatgtaaatttaatttttagttgtagataaatatttaagtttaattttttatgataataatatgtactttagttatatttttaaaactaccttaggtaactagcctcaaactatctcataatataaatatatttaaattaattgctaaataaaaatattaaaatgtaatgaccttgatactattattatttatctacaactgagaattaaaattaaatatttatactttaaactatttatttgtgaaatataatattaaaatatgaattagatcaacaattatttgacacgttgatgtacatgcatgtcttttttcttttttattcttgtataacatatccgtaatttgagcgtcactataggtaatatttaattatccaagaaatctaatgtatactaattaattatgttataatgaaattgctaataatagattaaattaagttagataagtatagtactgatcatgggtttgtgacacgtattatttttaggtaataccaacctcacatgctggcctaattagggcaacatgggaccaaatccaatgttatttgattatttatgggtaacaagtttagtcatccctagattaggtttaatcaatgtgtaactttaattattttttctttccaaatagaacattgcctttttggctcttctctttagttaaattattaagaatatattctattttttcaagtcatttggggtaagatttacgtctttcaatgaataaagaatcaaaataatattatatttatgagtcttctctctctctctcaaggtttatccaaaaccaggagaagtcatgcacatcacttactatttttattttattttttactaacacgtcacaatatgtgttcacaataataacgttgtttatttcttttaaccaaaaagaaaggtagttctaatatgatttactaaagcaaatgaaataattaagaaagatctctcatctatatggattatcatagatatatatagaaagttgaagctcttaggcttaactttaattattagctttgtaaatcagagagaaaataagaataattagttgtaattctcattgaatgaaatgacaaagagtattttatagagctataagttcagtatacacacgatatgagcagtagtgattctgttataaaaacaaaatcatgttgctttaacaataaagatgccacttgtataaataacactaacaacttaactatccttctaacatctaatagctctccttaaggtaggtggagtgtaaagttctttaacaccaggatcggctctgaacatagatgggctaggcccgtgcttaaagcccaccccaactcaaggtccaaaaacagtcatataaagaaaaaaaattaaataagtcacagtcatccttcactcccaaccggcccagctaaacattaaatggagtggtgcaactccaacttacactacaaaacgtgtgggtgcaatgcaagcaaagaaaataaaattatatacaaaaaaaattacatatacaacagggaaatttcttaaaactgtcttagacccaatttttttcaaggtcgaccttctttgacactcttcttggagatggtgtccttgaaagaagctggaaacaatgctttggtaaagatatcgacgaatgttgagtgtacaaccaaaccctaaatatgtattgtcataaacatgcattaatgtattaaaagaataaatactaaagattatattatatggatagtaaaattcaatttgtgctagggttaataccctaaagtttatatatgagcatgtaccgaatgaattaagtaaatgtatgtcaagagttatgtgtacaa

SEQ ID NO: 294925 - DNA, 4033 bp, Cannabis indica
taggcgacggttttaaaccgtccagaagtccacattagtgacgattttaaatcgtcgcctattttgcccgttttacgacggttgtataggcgacggttatagaaaccgacggaaatactttaaatgactgtttaaaaatatcgagaaaaactatttttgtagtagtgagtcaattcttttagagtgctggagatcacccagggctcattttggtttcctccgtcctcattggagctaattaccaatcttggaaacatgctatttcaatatatttttcgtccccaagctcgagatcccctccatggatcctggtttcgttgcaacaatatgttcatgtcttggctcctcaatgttgtttcccctgtaatttctcaaagtattatgttctacgatatggccactgacatgtagaatgatctttccgatcgtttcaatcaagcaaatggtccacgaatatttgaattacagaccgatctcacccatctgcaacaaggagaccttgatatatagtcttacttcaccaaattaaagacctactaggatgagctaaaagaatctcaacccgtcgctacttgtacctgtggtgcgatgaagactctactcgcttactataatcagaaccaagtcctccaattcttgacttgacttaacgattcttttattgcggtaaggactcgtatcctcttaatggagcctttaccttcattatttcaagttttttctatgattgtccaagatgaatgccaaaggagtatcgattcttccctaccaattgcttttgttgcacatccaacaggaccaacaccgctatctaacaatccctctcaatccaagaagccaagaccttcttgcacctactgcaaaaaacctggtcattacattcacaatttctatttccttcatggatttccactcgattatggtgacaataaaaaatatgacaaaggaaaggtctttccaaataaaagttcctcttcataagaagcccctgatgatcccttttcatcatctaatctcaccaatccatgttaataactaatttctttaatgagccaacagctccaacagaatgcaacacacaataatccctctactcttggtcctggaacatcgaatatatctggaaaatcttcccaaatctttccttttattgggttgtcgacagtggcgttactcaccacatatacttcaataaagattgtttttaagattttactaactccaaattttcgaaatatgttgctatggtcataaagttttagtcactaacattggcaatgtataaattaattcttttatcactttgcacaatgttctatatgtataacagctcaaattcaatcttttttcaatacacgctcatctcactaatacaactaatcaaattttttcactccaacttcttgtatttttcaggaacctttctagaataaggagattgggatcgctaggaaatacaccaatttgtacttcctccaacaatctctttccaattatgaatgtaataaattagctcaagcatgtactgtcttagataactcagactaattgcatttcttcctaggtcacccatctttgtacatttctaaaaaaattcaataaagagcttgaattttttattttagacaacttgcattctcattgttttatatgtcacttagcaaaacaaaaaaaatttgtcttttattttcaacaacaattttgtagcatctacctttgaattaattcactaagacatatggggttgcttcaccccataagcattgatgagtatgataagtctcgttacacttggacaaaccttctcaaagctaaatctgatgtccaactcattatacaaattttttcatgctggtttgcactcagttctcagccaatatcaaagttgttcaaacagataatgccatggagttaatgtttcttctttttacgcgtctaagggtgtgttctccattattattcatgtgttgagcaccgccaacaaaattcagtcattgaacgtaaatatcaacacctatttaacattgctagagcacttatatttcaatttcatgcccctatatgctactgatcctatctcctacccataaccacttacctcatcaatcgcatttcctctgccactctcaaaggtcaaattttgtttgcgattatccatggaaaaaaaatctcctacgaccatttgcatatttttggatgcttggcatatgtctccacataatctcagtgccacaaattctctcctagaagtcagactttcatattcattgactaccccgatggaatgaaggcttacaccttattggatattcaaagcaaccaaatctatcattctggagatgttttatttcataaaaagattttcccattcaagaacaatatctctaccatttttgtgaatttcttcgataatcatattatccctacccacaagcctttatccccctagcctacttcaacaacacctatgatacaccccaattctactatcatcaaaagatttggtagaatatccacaaaaccaatatgatttaatgacttcatatgtcatttatctgctggcccatctaccatagacaaccccatcaactctcaccttgattattcaaaacttcccactaatttcatagcaactttcctttctgccaattcaatagtagaacctacatcatataaattgcatcccaggatcctaaaaggaataattcaatagataatgaatttcatgctttagttaaaactaaaacattaattctcacaatccttccctctacccataaatttataggatgcaagtgggtttatacaataaaatacaaatctaatggggaagtttagtaatataaatcacacttagtagtcaaagactacacccaacaacatagagttgactacatataaacttatgccttatggaaaaattaaacactataaaaatcatgttggcacttcctgccattaacaactagagcctccattaaatggacataaataatgtattcctccatgatgatctccatgaagaggtttacgtaaaattttcacctggatacaagcatgatacttcacttcttctttatttagtgtgaaaattacagaaaatcctatatgtcctcaaacatgcctctcaacaatggtacaaaaaattaagctctactcttcttaaagatgggttcacacaatccccctcagacaattctctttttatcaagaaacatcctaccatgtttcttgctcttctagtgtacgttgatgacattattgttcctagcaacaatgataaagccattaatgcatttaaaaccacagtagacaataaattcaaacttaaagatataggattactttgattcttccttggtctagagattttcagtgactctagtggtatatcgatttcttaatgaccattcaccatccaattactcaatgaaactggttttcttgactcaaaaccaacctccacttctatggaaccaaatcataaattgagtaaagactttggcgatattcttcctaaccctacttcgtatcccatccttattggccagctcatacaaaaatacaactcgaataactttaaaaaaaaattcaaaccgcccaaatgaatatatttggtgggtttaatattatattaacccgcctaaataacccaaataaaccgaataaaccgatttacatatttttcactaatattatttataacataatatataaattacgtttaatagttaaactattttacatttaaagtttgtattttatagtgtttaatttgaaatttagaatttatagttgataattttgattgtatttgaatattgaagttagaatttagaattacatatgagcatatttttttttattctagttttgaaaaatattgtttagtaatttaatgtttattcaattcatatttgttttcttaacattaatttaaactttaattattttaatcttgaaagccatatattatacatttatttttttaaatcaattatttgaacaccaaaatctaacatcaatgaaaaaa

SEQ ID NO: 294926 - DNA, 7039 bp, Cannabis indica
agatcctggtaaaataattcccaacacgttcttcttcaggggagaaggtttctcttgataatgaatatttaaaagataaaatttttgaaattatttctagtcaaaataaattgtctaacgatttggttattttgagagtttttgttgaggtgaattttaaggaggtattaactgtgattgatgatcttaagagaaaattgactgattattgtgatcgagtttctgtttgggtttgtttgatatttgtttttaagtttctttgatattaatctactcaagacaaattttgtgtcttttttcagttgtcataagtgtaaaaagaagtttaatttttgttaattatttaaaaaattattataagaagagaattttaatttgtgtaaaaagaagttaatttttgttaattatttaaaaaattattataagaagagaattttaatttgtgtaaaaagaagttaatttttgttaaaaaataaattttattgtaaatattataattaaatggcttaatggttaaaataattagaataaggatttaaatataaataaaaaaattatttataaatattaattgttaaaagaggtcttattaaatatttaattaactatttttaaaaaatagttacttataagtaattaattctagaaatgaatgtttacctattagtagcctgctattacacgtcaaagaaaaatataatcatgatggttacaataaaaatgtaacaattgaatagtcactctttagcaaaaaaaaaaggttaagtttaaaaataccttttttaagtatcaattaaccaaaagtacctgcactttaaatttaattgaaatatacccaattttacaagtacattacccagtatgccctccacacaagtctccttcatgtttcagccatagactccttaacgcacacaactccagcttccgccatcgtacagaagctccatcatgacctctgccaccaccaccaccaccaccaccacacatcggcaaccacaacctctatattgtcctttgatttgaatgtatgtaacatttcactttcttattaaaatttgtattaatctctctccttagatctagtttctccctccaattttttggttgtattgcttatgcacatatttatgtgtatttgttaggatcattgtatgagattaatataatgcattttaaaaaaaaatttctgtattttactaaaaaaaaaaattgaaatccgtaaatatatatataaaaatctgtttatcaataaaaatccctaacggctaacgggagtacagtatagaatcacatggaacaagaggcccaatatatagaaattcacgaccccattacccattacaggcccaacgaatgcccgaaataccccaactcatccgatgtcactgcttttgttacaagacaaaagtaaaggaggctcacgagacatgatgaagccgttaaagagttgaacttacccaatgaaatttaatggtagattgattaatattacattgccagcagtatcattattctatttccaatatgagcttaatctagctcgaacgaacaatacacaatttggttaaaaggtccttttgccaacctcacaagggtaaagataatcaccgtttcacatgtaactttcaagttttaaccaaagcatcacagtaggtcagagtaccacaaaagaaagcaacttgactataaatttacatatttttagatcaatgcatggattataataaaaacaaaataacatatccataccatatcaccttatggttttgaacaaggatcggatactaatcataccaggtaaaagtttaaatcttcactcaattcgggaaatttgatattctaattttaaatacaaccatctcttcaaaaatttgcaccacaaattaccacaaatcacacaattgcaacacaaccatctctaatattatatgcctaccatccataattattcaaaaccaaaggatcaaaaatattttaacaatcttcaacttgaaatttgcaagaggtgcaaacttgatgagcagtgggggcagaggaaaaaagtagtacaaaaatcccatggagagagcaagaatatatcagcttattattcttaagcaactttttttaacataactaagctcaataatcagtaaatgtatgtccagggatcaaatccttcataccatgcacaataatttaatcaataaaagtgaagaaaaaaaaataaattatagtaccttttcaactacaagaacgtatatctctgtaggaaacaacaaccactattcccgtcttctcaagccggtttaatttattcagaaaggttggaaatattttgtattgcaaatgaagtggcaggcatagttatccaaataaaaaactacataggataacgaaacaaaacaacctgtatcgaacaccatatattctgacactggttatgcagctccaggctcaaaggtcctatcttcagctcatccataatataagcttaatactcttctcctcattcaaattcttcatcaatgctgtgaccattgaatgtccttgatgttgatcccttccttaaccatttcgtaaagtggactcatttccctcaacttctccacctggtggacggtaagttctactgcatgatcaatttctgcctctgttgtaaaccttccaatcccaaacctaatggaggtatgagccatgtcttcatcaacacctaaagctctcaacacataagatggttccaaactggcactagtacaagcactcccactcgacacagccacttcctttaaccccataagcaagctctccccctcaacgtaggcaaacgacaagttcaaattcccagcataccgtctatccatacttccattcactacaaccccatcaagttttgctctaatcccattaagcattcggtcctgtaaagcagtaattctcttctcatcatactccatctccttcttagcaagctcacaagcagcccccattcccacaacaagaggagtaggaacggtgccacttcggatacctctttcctgcccaccaccgttcatctgcggttcgaccctaattcttggtcttcgtctcatatacaaagccccaactcctttgggtccatagaccttatgcccacttaaagacattaaactaacattccacttatcaacattaacgggaattttacctaaggcctgagctgcatcagtatgaaatgggatattgaattccttacagatttggccgatttcttccatgggttgaatcacgcctatctcattgttgaccgccatgactgaaatcaaacccgtatcaggtcgaattgaagacctgagcttctccagatcgacgaggccatcagaaccgactggaaggtaagtgacctcgaaaccctcttgctgtagatgacggcaggagtcaagaacgcacttgtgctcagtctgggtggtgataacatgacgcttcttctccttgtagaaatgcataacgccctttacagaaatattattgcattccgtagcgccagaggtgaaaacaatctccttaggcgaagcgccaatgagatccgccacctgggcgcgggcggtctccaccgcctcgtccgcttcccatccgtacatatgagttctggaatgagggtttccgtattgagacacataaaacggcagcatggcatcgagaaccctaggatcgaccggagacgtggcttgcatatcgagataaagcggccttccggcgattttcactcctttcatggtaaccccatcagtttccccatagggttccgccggagaagctaaggcggcggaagcggcggttgaattggagcgtgcatgagaaaagattgaagaggttctctttagggtttggcggagatttgaagcgattagcttcgaagccattgggttttagctttttagggttttagtctcttcctttgcgtagctcagtgggaaaggagattagaatagattaaggaagaagaagacgaagatagtggagcaaatagtgtacacggctacgattcaccgacttagcaaagtgggaatctcgagacgacacgtggcatatctcaagccatgaataataactgaaacggctttagtttttgttttcttttttctaaattttaatctggtctggtcatacatgattgcaacctttgcagttaaaaagtcgtaggcttaaaacgacatcgtatcgatccttaagccaaaccccacttcttcaactttaagaaactattttttttattctcttttgtttaattaaatagatcctactgataaaactgagggctttgagtgttaaattgtgctgacacttctctctctcttcttccttttgtttcgggtgatttgtattttggcaaattccagatccaacagtttcagacaaacccactatttgatctctcttattaacccatttaggggttcatttcttcgaactttgttttggtcccaattctattttcagacattataactgttttactcttatttgttattttggttgtttaaaccaccgacacccattaaaagttaaaaagcttctgtcatcgaagaatctcttttccacaggtatgtatgaacatttaagttcctttctattttctctaatgtgccaagttttttttcggtttgttcagatctgtgtctacaactatatctttttcttgcttgttattatatttggtattactttcttaatttacattggttgactgtaattgggtgcctttaaaaaggcaagtgtgagatttggttgagcaggaaattggcatttacactctgaaaaaatgggtgaagcataggtcttttgaaataatttgcctaaaaatagactgatgagtttttaaccattctggtttctagtctagttgaaaggctattgttacatttacattaatgctgggagaatttgcaatgtttttcatgattggttttgttttaatgtggtgaaaaattaatttgcttgatgaagctagacagaacttggatctatgttcttttctttccctttttatgagattcaatccatttgttcaaaccacacatctttgaggtttttataggtgtttgatctgtaatgtaggtattctgtttgaaagggacccccataaaagtttagcttgcaagaggggtcatcatgttcaagcattcacctcgccggaatgggagatctcgaggtgtcaaagtgaagcatgctgttcaactccttctcttgctgggtgtgtgcgtttggctagcctatcaattgaagcagtccaataacaagagaacacagctcaatttgaacacaaggacagggagtgaagttctcaagctggggcgaaaagatcccaatcctaatgtggaggaaccagttgttaaagatgtaaggcataaggaggaggatgaagaagaacacaagtccgaagagaatgaaaatgaaggaaaagaaggcggtgaagatgaagaaatacatgaaaatgatcaagataggaccgaagagatgactgagcatcatggtgattctgtagatacacagaatgagaatgaagagagcaaaaacaatgttggtgatgagaatgagagtgtagagggaaaagagaaggaaaataaagagagtgaaaatgaaatcaatgaaatagacggggagaaaaatgaacagcaaagtgagaatgaagaaagtgaggacaacaagactgaggagactaaagagcaagaaaatgtagaaggtcagagggaggatcataaagaagatagggaagagaacaaggacacagaagagaatggaaagaagattgaggagacagtttcaagtgatgatcaggttcaagatggaggtgatggaaataatgaggccagagaagaaaattacaagggagatgatgcttctagtgctgtagctcatgagactcagaatacaactgaaaccgagcaacgtggtccagaagactctgaagaggtaaagcaatttgaaaacaaagagacacaggacattgttgagaaggagaacgatacaaagagtggtgttgatgtcaaccaaaacgactcagcttcggtctcagaaattgagaagacagaaagcaatgatgctaactctaaaaccaccgaagatagtggcaacgagagtgatcatgcagatactggacatggtacctttcatgattcaacagtagtttcatatgagcaccagaaaatggatactaacactgaagaaaatcatggctcctcacagcagaatgggacagatacaactcaaaatccagatgagaatgcagagaatattaataccacaggggatgagtctactcagcaaaatgctgtaccagagcaaactgaaaagtcagaaccagctagcaatgaaaaagattctggggagacttcagcagcagagaatgaaaatgctgctaaaggagagttcacagatacctctggaacttctcaacaatcagcaacgagtgaaaatattgaagttgttcagaagctagaaggcaacagcaactctggatctgagggaactcaagaaaatgtgctaatgatgaagaccgacgataatgatggatcctcgaataaagaaaacaatgctgatgcaagccagaacgatgcccagcagaacacaaatgataattctgataataatgctggtgcaggccagaatgagaacaagaacaacatacagcagaagacagatgataattcaggtcacaatgctgatgagggccagaatgagaacaaaaacgatgctcagcagaatgcaaatgataactcaaatgcagaaaaaaattctgattccaatcagaatgcaaatgagaatggtgaccaaagcaatgcaaatggaaaagaaggtgcaggtcaaggagaacaaaccgatgcccagaaggagaatgaagcgacaccaaatacagataataatgctgattctagccaaaaagcaaaggagaagggagaccagagcaacacaaatggcaacgaaggtgcgggccaaggagagcagactaatgcccagaaggagaatgaagctacaccaaacacagaaaacaatgctgattccagccaaaatgcaaatg

SEQ ID NO: 294927 - DNA, 3637 bp, Cannabis indica
aaaatattgtatctagatccagtgcagaatcagaatataaagctatgagatagtgtggatttattaacttttgactgaagtcgggtttaagacttcaactctagcaaaattgtagtgtgataatcaagttgcccttcatattgcctcaaatctcgtattctatgagcgaattaaggacattgagattgattgtcattttgttcgtgagaaaattcaacaagacttaatctccacatgatatgtgaatactgaagaacaatttggggatattttcacgaagactgtaaatagagtgcgggttgattatctttgtaacaagttggacatgattaatatttatgcttcaacttgaggaggagtgttagaatatatattagctgtatattagttgtagatttataattaggtttccaatttcttcctagctttctattttagtcttcttagttttgtatataaatacttgctatctattaaataaaatacatttttgatccaccatttaaaacaattcttaactaagaaagatgtctcttcttatcaggcgaacttgatcagaactgccgcggcaaactatttgttggattctggggttcagtggggtggtgcacctgcagtcaaagtaagatgtagtgattttcatgtcatattagtgcttttttcttacgtcccctgtcactttactattacattttctttttcttttctttttcctttacctctttcccttagaagttgttagaagaattggttttgtgcagggtgtccgagatgcagctgtggagttactgcacaatttagtagctgttcatgcagaggtacttaatgcattccttctctatgatacttgtttagtttagtttataattatcttaatcctaagaactaattttctctagttaggcttgtttggtagaatgataaaagtatttgatttgccaacatctgttcttacaaataagaatttaagctgtctttcatgctccagttattttttatgccataagattattaatctctagcggacttttagattgaggttatactatgtttagttgagtttagattctctaaggaatgacatctactttacatagagagcgactccgagacaattatcaaggctttgcaaaagaaagtttctgtttggagcattgataattatgttttgaattgtattagactctctaaacaggttttgagttgtaattttgcctttatccttaaacttggcaattttgcggctcataatgttgctaggtgagttttttctcaaaacttaactggaatggtagccgtgccatttatttcagctgatgttatttgtaatgaccatgaggtttaacttttattttagtaatgaatgtttatttcagaaaaaaaagacatctactctacatagccaacttatatgagaaacctatttctttcttttaggttttttctggtgccaagccccttctggataagacactcggcattcttttggaaggtctgattgatatctttctcagtctttttcatgaaaacaaggacaaacatcttaggttgcttgacatgaacggattttgccagctcatgcttgaggtaaagttgtcatctagaagtttgtttatgtctaaatataatagcattgagatgcctcaaaggttaattccctcaccttgcagcttgaatatttcgagaatatattgaacccttattttacccctgatgcgagagagtctttgaagtctctacaaggtgtgattttggagaaagccactgagagtgcaactgaagctgtggataatccagtgcatcaccgacgacctacccgtggaagtgaagatgcacttgccgatgatagacagcaaggaatgagtgtttcaccagatgatctaattgtaataactctctctgatttcttagtgtagttaattattattgatattgggtcttattggcgacttctaaattgtctttgcctttataacagtgtttatttatttgttatgttttcttaggttcttgctcagcagtatagttccgagttgcttcagttagaacttgaaaggacccgcatcaacacagcatgctttgccgattcaattccgatggagttgtttccggaatctgttaaatctgcttatgcttccttcaggggtccaatggactcacccagcagaaacttcagaggaatacctgcaactggatccccaagcttttcccgccaaagacgacgatgattttcccatgacagatttttctagtgtattctaaaagttgtggtttggatgattgagtgaaacccaagttgttttttcattttttagtggtagattctatatgagttgctttcttcatttatgtgttcctttgcctcctttctacagatttattgtttgtatgttttttttttgggctttgtttattagtatatattataggaaaaaatttccataatagattctgtgaatagtttttttaagactttttatctgttttgatatttaagaaaaaaaaaaaaattagtctatttgttttttttcatgattgcttacgttgtaactatttaggctatttgtaaattttcataaaattctgaaattgtttaaatagatttacgtagttaccacatgataagaaaaaatagtcgtttgtgcagcaaaatatgtgaatcttatttttggcactgtaaactattcaaaaaattttgaaaatttacaagtagtcctaaataactataaaatatacgatcatgaaataatttaatcaaattttttttatgtatgctaaaataaataggggatctaccaaaatatcttcttaaaaagtgtactatagacttattctatactatataagctaaaaaaaatactataataacacccaatatttatattacattaatttatatatgtgattggatactaacctttcttttattagttctttatatatattaaaaaaatacattgaatggacaatattaactattacaccattgatctcttgtttcaaccttaacaaatcaaaatcatcccttaaatgacactgaaaaatgcaatcttcaacttgaaacaattgaaaataaatataaaagtatacaacattgatattaagcaccaataattagtgttgtttattggattaatgtatttgaactaatccaatctattatttattggaagttggattttgcattcgatcaaattcaattgaattcagtccactattttaattcaatagatgaattaaattagatcggctctaaccactggatgcatggttttctattggattagatccattcaatcttttttagtcatcattaagttaaatttcattaaaaaaaatatatataaaaatcataatttaaaacctaattcttatactcatagtaataaaatacaaattcaacatacataataatcattagttaattaagtacaacttaattcttatgatgccataactaaaatattacaacacaatcaaaacctaataagcataagtcttaactcttaatagacaagttcaacacaacagatgtaaatattaaatattaaatattaagtacaataaattatttattttttaaaaaatataaataaataggtaacttgttagtgacttgttgtatggatagtaattt

SEQ ID NO: 294928 - DNA, 6204 bp, Cannabis indica
gggcataaaacccaacacttttccccacggcttcccttcaccatctaggtttctttggttcggatcatagggccctcaaagtggttttcgagggcaactccatgatgttttgacgtgactctacttttcgtttcgaaaaccattagcttcttgaacctgatttctctgatcttgtcaaaagtaattggacttcggatactctcacggctaaccctaatgcccctctccaaagttttctctcaaagcaacataactgtattgcttcaatgacttcttggggacgaaatcaaaatcattttactcgggacattaaatgtatcaaatctgaccttgaacaccttttggttggcccagttatttctccttctgaggctcaaaaagctaatgaccttcaacgtactatggaaaacatcatgctcaaggaagaggttttttggaaacaacgatcaagagccaactggctcaaagctggtgataagaacaccaaatacttccataatagggcttccactagaaagcgcactaatttcatcaagtcccttactttggatgacaattccaaagtcactagcttaaatgatataactaactcttttgttcagttttactctgatcttttcgcttcccaaggtacggatcctaaagcaatggccttcacccttcaagggatcctaagaaaatcactgccactcaatatgcttttcttaccacccctttggactttgcggaagttaaaaagcccttttccagcttgcgggggataaagcacctgggccagatgggttgaaccctagctttttccagaaaaactgggactctgcgggcattgatctttgcagtgctgctttatatgccctgaacaccaatggggatcttgctcctatcaatgacacgactttggttcttatccctaaggtcaaaaatgcttctcgcattaaggactatcggcccattagcctttgttccactttctataaggttgtgtccaaaaccatcgctaatcgtctcaaatccatcattccggatcttatttctcataatcaaggtgcttctctcagtgatcgcataattttttgataacatcattattgccaacaaagttattcatgcgatcactagccgtaaacatggaaaagttggctgggcggctttaaagcttgatatggaaaaggcttttgacaaagttgagtgggcttatatccaacacatccttcatcattttggctttcctccctacttcatttctcttatatttaagtgtatctcctctgtttctttccatctccgtatcaataaattgtctttcttcccagatctttccttcccgtggaattcgtcagggggatccactttcgccttatctcttcctccttgttgttgaaggcctctcagggattattaattttaaatctcgattgaactcttttcagggtatatctattgtcgctctgccccctccatatctcatctcctgttcgctgatgacagttttcttttcactggagtttctacctcctcttgttctgaaatcaaagacattttgctcatttatcagcaggctactgggcaatcggtcaatcttcataaatcctctattcttttttctcctaataccagttctcttgatcgtgatatatttcgggactccctgaatatggataataagccatttattgacaagtaccttggagttcctcagtatttttctagatccaaaaagccttcctttatctttcttttgcaaaaagctagctctaaattgtctacttggaaccaaaacctgttctcgagagctggtaaggagatccttctcaaatcggttattcaggctataccttcttacgctatgtcttgcttccgaattcccgtctccatttgtagacatttcagtggccttatgtctaaattctggtggggttctcttggtcataaacataagattcattggaaaaaatgggacaacctgtgcacttctaagttttttggaggcttgggttttcgcaacattgttcatcataaccaagctatgcttgctaagcaagcttggcgaattttcacttctcctgattctttggtggcccttttgttaaaagctaaatattttaagcgtaatgatttttggcatgctccggttggtcactctccttctttctgtcggcgcagtatcctttggggtagggaacttctggttaagggtcttatatggaaaataggggacgacacctcggtcaacatttctgaatccaattggctttctcttcgggaaagtgttattttcaaacctggcctatctcctccttctccaactgtttcttttttcattactgaggacaggcattgggatattaccaaactaaaattgtattttgacgaggggatgtgtaattccattctatctgttcttattgatccttgccataatgattgccttatttggaactatcatccttcaggttgctttactgtcaactctgcgtaccatctggctaattctaattcttctgctcttggtttctcaaatcctgctgtgtataaaccttggtggtcttctgtttggtcgtctaatataccccctaaaattaaacattttgtatggaaagcttttaatcatattctcccttcaaaccttaatcttttccatcgtaattcaatatcttcccccttttgttctatttgtctttctcaacatgattccaacacccactctctagttacgtgttctagagcaggtaagttttgaaaaaactcttcttttctcagtttttttactaacaaaaattgtgatattaagaaattcatgcttcgtggttttgaacattttgacaaggataaatttgcctgttttctgggtttgttatgggcaatatggaatagcagaaataaagccattttccaccctactcatgatcttgatttcagtttggaagtttctgtccgtagttatttgtaggagtacagggatgctcaatctctaatcagttctccgttcccgcctattcaactgatcaccacaaattcgcaggtcccaaacaatatgtttcagcttagtgtagatgcagctctttctcccacctctaccaaacatggatatggagctgttgtcactgatattcagggtaacattgttgctggtttttctgttccatcgacttcaggcctcccaccaatttttgctgaagctgaagctctcaatcgtgcgttgctttggtgtcaggcagttcagtttcccctaagatctattgtctctgactgtctgactttggttcgtcgacttcagaagcattcccttgatcgatcggctctatcgggttttattgccactattgcttcctctttgtcttcttttccaggtgcctcaattggttttatcccaagaacagagaacacaatagtccacaatcttgctagagcaactcttggaacagacgaagagatggtttggaacaacctcagttcctttttgtgaagatcatttgtaactgttttcttgtctttctttggttactaatctttgtatttcaaaaaaaaaaatgttgttattaataaaaaggaattgcaagtttaatctattttaaataattattatgattgttttaaaaaaattaattattatgattaaggaggtacgaaaatattattgtgtggctaaaaatattttaagcactaagattaaagtcttaaacctttttgttttgttttttttttttttgtgctagttcgctcgaattttaaacaaaatcaaagcgaagaacctcgaaatttccaccgtgcagcagccgcaatctaacggtagcgattggctgaaaaggatcatcaagccgattattctagaatatttgccacgtggcactacctaaccctcactctctttcttccccaaaaaccaaaaccctctctatattattacttccctctttagccttaagcttttatagcgtagctcagcttattagcttcttctcttatcttctcactatttcaccacacaacacaatacaaaactccctactttcatattatcgtttccttcccttcccaccaaacttttcttcttattcttccactcagattagggttttcttttagggcttttcccaatcttctctccgataaatcctacccatcatggcttcctctacagctcaaatcaatgttctcggagctgcagtgcctggtggctcctacaggaagcccaatttcagaaaccccaggactctcttcctgggccagggactcggaagtacggcgtcgtttggtggcttgtctcgctctgtatttttgaaattcaataccaatggtaacagagccaggagtatcggaccccttcgggtggtgaacgagaaggtcgtgggaattgatttgggtactactaactctgccgttggggccatggagggtggtaaacccactatagtcaccaacgctgagggccagaggacgacgccgtccgtggtcgcgtataccaagaatggggataggttggttggtcagattgctaagcgccaagccgtcgtgaacccagagaacacctttttctccgtcaagaggtttattggaaggaagatgtcggaggtggacgaggagtccaagcaggtatcttacagagttgttagagatgacaatggaaatgtcaagcttgattgtcccgctattggcaagcagtttgccgccgaagaaatctcagctcaggtatatacataaatatatatatatgtatatatatatagaaattgggtggatatgttttacattttgccaggaagataagtcataaaaaccattactcgacttgccttaccttaaagttattatgcgggtggtgttaccttaaaggcccttcaacccaaataataacataagtggtttttaggtgtaccaaactttgtttttgagagtaattggttgcccaatactgatatttattgtctgaattggttgttcctgtgcaaacctacttgtttggttgtttaacatagtatgtaaacttttgctaaaaccgcatagcaagtttttgtgaaagcctctgactatctacttagtgcattaaactcagctatcatgtctagtttcaaaacaatgttgaatttcaaagccaatgcaacctgattttctgctgttcctttaataatgacgatcttcattttcgttgtggtgtaaatggtttaggttttgagaaagcttgtcgatgatgcttcaaagtttttgaatgacaaagtaacaaaagctgttgtcactgtccctgcatacttcaacgattctcaaagaacagcaacaaaagatgctggtcggattgctggtttggaagttcttcgtattataaatgagccaaccgctgcatcattagcatatggatttgaaaggaaaaacaacgagacaatcttggtttttgaccttggaggtggtacctttgatgtgtcaggtaaatgatttcttaagtaatctgctggtctaaaactttttgtgctctacttatcactttcaagaaggaattaatcttctacccgtgatgatattctgttgacccttttcttttgttccagtgttggaggttggtgatggagtatttgaagtcctgtccacttctggagatacacatttgggtggtgatgactttgacaaggtatgttactgtgtacacgtctttgagcttaaagattttttttgtccccttcttcttcctccttagtctccttttgctgtgcattgagtatgaaaagatgattctcaattatcatgaaatctgtgcagagaattgttgattggctagctgcagacttcaaaagagacgagggaatagatttgttgaaggataaacaagctcttcagcggctaacggagacagctgagaaagcgaaaatggagctatcatctttgactcagacaaacattaggtacattgatcatgtttcaataatttttcttattgctcccttcttctcactggtccctccttcctcaaaatagattgttggtttttacttacgttatcttttttgtcttgcagtcttcccttcattactgccactgctgatggccccaaacacattgagaccacccttacaagggccaagtttgaggaattgtgctcagatttacttgacaggtatctaatgctgtttaaaactgagtgtatgaattttggtgttttaaagttttgatttttgcacataaaattttaattaagtagaaggtctctctctctct

SEQ ID NO: 294929 - DNA, 4898 bp, Cannabis indica
tgagatctaaatgtgtttagactcaaagcttgaggttgttcaagcacttggtaactttgtataaaagtcaatttagattacattgtttgatttgaagaatcagaactggttattgtaattgaattgattgtttagtgaaagttactgtacccggttcaagggaacccaagcactactcggttggaatgcgtttccaatgcagaggaagcttgtaaattctgtgttcattgtttttaatttctaattcacaacatagaaataatctgctaagaatcatcaatttgaactggtagtaattaggacttttataacaaaataaccacataaaactaaaaataatagtggaacaactaaaaaccaaccgtgaaataatactgaaaatttaacacagtacatagtataaaatttacatagtattgttgaaataaattccgccccacattaaaaaaaattaaaaaaaattaaaaatttctgtgatgtaaattatcctaaaattatttggtaagtgtcacttgcatgtaaatataacagtgtacacaagttgtttattttatatacttgttttgaaactaatttttgacaccacaaattatttaagtcacacaatataaattggtgtgatgtcttcttaaataactttcctatatgtatatattgatgaactttcctttatatgtgacaaatgctaactttttttaattttcttttactttttccttcttacatatatcttaaaaacaaaaaataataaaatcaaagaacaaacaaataaactcaagaaagtggtccataaaaccatgcagatttgatgattgtgtccccatgtacagccctaagatcctatcacgggtttttttcttattcctgaattaatccactttcactatttctactttaatttgctttatcacatttttcacttacaataatataaagcatgtatataaatatatgtatatatattaatcactatatagttaagtcattttcaattgtatatattaattaaatgctaatcgactcaactatcccttaattttttttttctctaataagtaaatccattcaacatcatcgactacaaaccaactaatggtagtgacatgataataaattaaagatgagtttattatgagaccattggtagctaaaagtgtagtataagttttttaattaaaatatgagggctcttagatataattttttcttcaaatggggagatttttcaaaataatataatgtcaatatctttataaaattgtgaaaataattagtgtggatcaattggtacaatttaatgtggattaaacacatatattttattctaatttaaatatttgaaagtagaaaatttgattaagtgaatgagatggcgaatttttacgtagttcaggtttggaagagcaaattactaccctgaccaagtttgtccggaagcaaaccctcacagacttggaggacaaggattcgaagccatgtgttaggcggatcatcaatgttttattaccttaaatttcaagatgccacaaatagagttgtatgatggttagacagaccctaggacccacctgtccaaatacaatcaagtgatgcaagtggaaagggtaagtgatgacgccaataagtgcatgtgcttctcactgacaccgacgaagttcgtgaaagagcttgactcctggatcaattttcgaaaataatttgtagcaactagagactatgacatggagaggttgaatcattaaccaatatcaaacaaaaatcgaggtgaatttgtaatccccaaacaagtcattccttgaattctaagatagggttatgcagaaatatgttaatcaaatgcataaagtaaaagaaacttacttgtaataggaaatgggagaattcaaatgtcgcgaaggccagtgtgataggaaaatgaccagtcaaggatcgcatcaatgttgcatgaatgtttaagggctctggtgactgggggccgattataatcgggtttgacggaggtgcgttagggtgctctcataatttaatgcacagaaggtggtggatggcaatgtcaaagagatcgaacattcacaaagagcagtcatggggttttttagtcttctctttgatttcaaagcttgaatttgaaatgaaaaaaaaaatgatgaaagagtttccccctcttatatttttattataaagccggtgatctgtgtgctttttgaatcaagagcccagatcttatttgaaaaaatacaatgcctatccaacggatgggaaatcgtaaaaggctgcattaaatgtactctacagtattcaaggtattttctcattattactattaccctcgatacatgcattagcattagattgtcgtcgttgcaacatctcaagtcacacacgcttttcaaaggcgcgtgaagttctcaagttaggtaaatgacaacacgtgtaaaatgtaagttgtgatatgcaaaaaaaaattacccttctgtatccaacgatacaaaaaatatgaacagattatttttttttcaaaaatatccacgtgtctaaagtacacaaaatgattcagaaggaaaactacaagcttccgccactcataagtcccgaaaacttggggataactgttatccacgtttttagaaggaagacacgtgacacaaattagaaggtaatcaccatacaaatttgggctcaagcttccctagtcacgcaaggccaagctagatatggaatggacccaagcccagtggaggaccagggccttcctttgatacacaatgatctcctaagaccataaagtcttcccagcctcccggaacacataaaggacaaaaccctccaggcgtaccagagggtacgtggaagcctattaaagaattagaatttgaatgatacaggatcagatcttgtcccctatgtcagatcatggtagtgtgcgcacctcctttgcgtacactcattttgcccgatggctcctctaacgactttgtctgccaagtgtgatttctgcccgacatgtgccctgtgccaaaagtggtccgagctgtactgaactgtcatcctacatgggaagatctcctaatgggccctacagtcaagtatattttgtattttgctctaatagtggacctacttttacataaaacctgaacctgtcacatgtatgtccggactcgaactctagcctatataaatacctttactccctcatacaaagggacagaaaaaatcctagaaaaagcttggcataaaatactttctaaactttcttcttcctcaagaggaacttacaaagtttactttactcgcagagttaggatttagcactataaatcttattttgtaacacatttctaaagcttaaaaggccaatatattaactacgtggactagagtactatttacgcgtaccgaacctacataaaatttctccatctcatttactaatcattatttaatttctttaagtttctaaatatctataaaccgttgtacagtaattagatatcctataaagtgctcatgaaccatacaccatatactatatagaacactcgaagtctcacatatatattactctttgttataatgacactagggtaactaaaagtattgtcacaaaacaacatggagtatacaaacaaagacaaattaagtactacgatcccttacatacaaataaataagaaaacattggaccacattcttaaaacgtatctgtgaagcttgtttgtgctcaagggtgaaggaccacaccactactctaactcttacggatccataaaccgtactcaagtagtagtaatagtattttgtgtggtttctttttgtccaagccacacttccaaacaaggcacaacatcaatcagatatattttatattttattgtattctatttctttgtcacctatcatagcttaatcagtggctgtaaacaccactctggtggatatcataaaccacgtgaccatgcattttctatatactataatcataatatataaacacatatgtatatatgtacatatatatatgtatacacatgtgcagccatgcaagatttgatttggtaagcaaagtcggctaccttagtagttagttcacattacatcttaatatacatatgatttctcattaaaaatttgaagtgatacataaagtaagagtgcataaatattaactaaatttttattatttcatatgtattaatatatttttttttttgaaggataaaaatattctaagtttgttatccttaaaatatattgttcgtgtatatctttagattgtatgacaagtcgactaacaattattgagctctaggataaaaaacgaatttgggacacttttaattaaaaagttaagaaaagtgtatgatattaaattatcatttaaaaaaattagacccttataggctaaaagggtcctaggcgggatgtgatttttttttaaaacgtttatatattataatgtataatttgagactcgaactcataactttcaacacagacgcattctcctatagtcacttgagctggtctcaagtgctctaagggcatggacttagcttgctttagtggaagacaagacacattaatattatgttattttaataatattattcattgcttataacttcgtgtgtgtcgtgctagttcggcccgtatttatttgtacttttcataaaacaaatcgtgtcatgccatgctataaaaaaaatatgggtcgtgtcgtatcgtgctaatatttttaaaaggtaagtccagcactaccagtaggcccagtattttcggtttatgctttgctcgtgtcggcccgtatttcttaaacaggtcagttcattttcatatccgagcttaaattcgtgctttactttttcatatattttttttttatacaattactaaat

SEQ ID NO: 294930 - DNA, 1687 bp, Cannabis indica
gttttttttttttttcaattaaagtggtgtttggttgaaaagaatacctattatattaacatcttgttaatgaattccttgaccctatttgcttcatgttgttgaccaataagaatgtagggttttctcataagatgaatattaaacaaaatgaacttgaatggagaccctttatttacttttaaatatacaacaagtaaaataaaagtaataactcaaattaaaaaaatccaagcaaatgtcataaaacaaacaaacaaaacaaactaaccaagcatgcatttgtgacaaaatttattcaacaactaaaaataaaaataaaaactttctttttctttttgaagagaacaatatttgtcatacattatgggttgttctccaaaacacagttaggattaggaggcaaccattgcaactcaataccataattccattgataaatagggtcttgagggttgatattaaccacagaagtataagcagtacatccaccagacctgaccctaatgaaatgtgaattcatgcttgaatctttcaagtaatgacaacaaagcctacttttacaaccacttccttcctccatttcatcctcaaactgcctgcaaagactgttgttagaacaattaagcggggatcgaagaatggattcggcgcaattcagcaacaacacagtgttgtgttttgatatgttgaaaggtaatgtctcatcaagccttattcctccttgagataaatcagaagaggaacatgtgtctttaagtatcataggtggtctaatgatgagtgagttagtgtttgtgtcaatgctaaggattttgtagtgaaatccttggagtgatgggaattcaaggttcccattgttacaatagattttgtatctaagattaccacagttatcattagtgctaaaagggtatggaacttcaaagttaccacattttggacaaccattatggaaagataatacaagggaaactaaggtgaataataacaaacataacatgacaagcattttcagttttgtgtccattatgaggactagagagaaaaaagaaaagaaaaaaacaagaagaagaagaaaaaaggactagagatagatgagcaagaaatatggtatgagctaaggtgtctatttatagcaaaaaatcatataattaagttactattttgtaattagatatagttattatgagttacttggttatatttctgtgaatcatcaaaggtggcaaagcaggcacacctgtcagtgtatggactagaataaaaaggtcaataaacaatatccaatatcaaattttttaataacaaaatatgtatatattattggttttatatgacaatgacacccccatgaatgttgaagctaattagctagattaatattcctgtaattgtttaatatgtgccaaaccatagaatctagtagtacattttgtagtagatctgcttctacctggcatccaaattatatggctactagaatatacatgatatggtttgaattaagaaaatatcaacatgattcaatggcatctttgataatgatacatatactagacaagtgtcaatctataaaaagaagggcctaacccaagggcagacccacatagaagcaaagtgggacagtcgttcttctaaaaaatcgaaaaaaaaaaatatatgcattttagttagttacaatata

SEQ ID NO: 294931 - DNA, 4962 bp, Cannabis indica
tcaaatcctattctcatcaaatcaaaccctttttgatgaatttcagattatactattttcccaccacatgtctcttctctgattctcaccacccacaccccctttttcttaatttagggtttcactttgggggatttgcatctcaaactcaactcttccactttccccctaccctattcattcctttgagcagagacaaataatccagtccagggcaaaagggttgaagttttttgaattgaattggatggaaaaggatatggtatccgctttgccaaaagaggaggaggaggttaagggggttggcggtggtctgatagaaagggagaccgaggaagatgatactgtaaagagtcaaggagtcaaagagtccagactaaacagtggttccggttgcaattgtaatgctacgaaactgaaatctactagtgtggctgtcagagagagagactattttcaatcagggcatccaaaaaagaagctcactcgccaagaaagggttgagttgggccgcttgtttcagggtgcagtcagttcttacgattgggacctcgctcagagcttgatctcactcgctgatccacaagctcttaatgatgctttgtgcattacattggattccatctggttcttgaccacacagcaagagctcgatggtgtaacaactttaattcacaacatcattgctaatggtgcttatgatttcacaagagctgctcttcgaacttcgtttcttgcctcctgtgtctctgcctgccacagccgaacaatgactccagctgccacagtcactataatggcgcagaggtaataagcttacgctttcttgtctttgcagaatcaatcagtcaatctttcttctttatttttatttatttgtttataccatttataatggcgctcgatatgctttatgaagaatttgtgttgtggataagtgtacttgcagatgcaagcctggcctgtaattcattcaattctgtcttttgttcttttgtttttcaataggttgcatgagcgtctgcatgaatgcaatggagatgaaatcttgaaggcggaagccggtgctaagtttcagaagtttactgaatgggcactaaaatgtattgattgccactcccgttgtcgggagaataatacggatagagttgggcacagctcagctgttgagatacaactccagttaagtgctttcaagaccttcctagatcttgctggaaatcaacttatagggaaagacttcaccgaggcctttgatgctgcatgtttccctctaactctattctctagctcatttgatcctagctgggcatctggcatctctgcaacagccatccatggtttgctgggtatgttagtagaaggaggtgcagacaacgtcagtcagtgtttccttgaagcttctcgctttgggagtacggagctcgtgcggattttattgcaggtaatatgactcgtatgtctataaatctctaataagaaactttttattcttctttccctattttctccctttttttgggtgaatttctatgaatttaatactctattagttttcaggcataatagaaacccttcactttatctttttggaacaataaatgattgcattaattgtttcattcaaccttacaaatacaacggaactctgcagtataaattgctctagaaaaatcaggtctatctattgccaagaacgaaatagttgtggaagcctgctggcaacaaaattaaacatgtctcatgattctataagtgaacatatatgtcttgacccattttcttattacctgctttggtggagtgatttagcatgtcattattttcttgactaacatagttgtccaattgaaactgtgaccttctgatgctaaatcatttctatcttattttgttttagctcctcagctgataatctcatgctaaagatgtagtgcaaatagtacatagtagcaagaatttaaaagaagaaaaagaaaagtattgtatttgatataacatatatttaatatttttggaaatattgtttttgtagattgctcaaagaaacagcttggatattgatgttgacctagcattgggttttgcttctcactactgcaagattggcaccatggagtgtctcgtggaagagggtaatgccattgctttcttgggccctttgatgagagcggcggagaggggttgtatgcaggtagttgagtggtttatgaaaaggggttgtcgagacatggagctatgtcttgccctgacagctgcaacctctagtagccaagttgatgttgctgcatttcttcttccgcatgttcctcaacatgtccttgaagccctgagtactgaaattctcaaggctgctggggaacgaagtggtggctcgctggatggtgtggcatttctcctccgctctgacttcttaggtgatcccacagccacttatgctgttgctgatgccattgctaggtcagacgatgaagctgttgctcccgagttaaagtgttttctgcgggagcactggtctgaggcagccttcgtggatggattgaggctaggacaagaacactacatgaacattgtgaggattttgaagtggagtgggtgtcctatttgcttaagagaccttccacccccgcttagggtcacgattgcttacctgccactgtacagggagtgtgttgaggcaggtggctgtttgttatcacaaaggttaagagggcagcttgttgaagctgtgagaagactcgatggaagggtcttaaaagaggtgggccagggaagagagctcgtggctgctttagagcatcatcttcctccatttttgcttcattcatcctttcagagttgcttattagcaagaaatttagcttgaggtgttttggatttttgcggttacccactgatagtatatgtaagaagagagaataaagttatagggtgggttccggtggtggcaaaagcttaagtttgtcagttttcttcaccaatgttttacatactgcaccttttatatatcatatatatatatatatatatcataacatggatgtgcttgtaggagttgagttgaaacatgatgtcatgacaatgatgatgttgatggtggatttgtatatcgttcttcttcttattttaatcttttctcaatgttctctttttcaaactttagtagtcctatcaaaatgcaaaattaaggaaattcttttaagatgtgctgtactcataaaatatactcgtatctactaactttgtcataagaagttaaagaagtttggagtaacatttggtacaataaatactaggtgctaaaatttatactagaagaatcccagcaataagtatcactagcatgccctccctgaagcctattgtatgggataaaaatgttgttcttcattaaatgtgacgcctgatgagacaataaggcgacgagtgagagggttgaaacatttgtatcccttttttgtggaggaatactcaaagaaactacacttttaagaatgaggatcaaatttggtatgattaggtcttaaaacataaacatcgattatacatccaaatgatttcagtggaatataggtgagtattgaggataaatcttaagaagagaaaacattagcgtttgatattgtaagacacgagaaggtgattaaataagttgtccaaatagcttctttctaaaaaaatcttagcaacagtagtagtaaacacgagtcttagtaacttttaaggtatgtggattttttctttcaacaattccattttgttgaggaatactaacacataaactttggtggacaaagccattagagataagataataacctaagattgaattaaaatatttgtgtcattatcaatgtgcaaaatatggaaattagcttgaaattaatttttaatcatggaatgaaactttttgaaagtggtagcaacatcaaatttatctttcagaagaaatttctaagttaaacgagtatggttatctataaatgatgtaaatcagagagtattagagatatttgtaacttgagataaccgccacatgtcactatgaatgagtgaaatgatgagataccttataagtaaaagaccaaaatacacttggtgtatgttttgaaaaatgacacttcacatttaaacatgctcaattgtttgtttgtttttttgaaaataaagtagctttattcaataaaatcttccaaaactatggaagaataacaagcagtaaagaatccccactaagaacacgatcagccttataaagagaagcttgcgctaaagcatgcgcaagcctattagcataccgtttaacaaaacaacaatcaacagacactaacgaggttaacaaacctctacaatcttgtaaaacaaaaccataaggagaagctaaaattttagcgttcttgatatcattgatgagcgtaagacaatcggttttcacaataacatggtgccaacccttctcctttatccaactcaaagcttccttgagacccattgcttccaccattaaaggcctccaaccaccatgtttgcaaatttggactgccttcaaaactgtgccagcactattccttgcaaccattccgaatccaaaacgaatatcatccgaaaaaatagcaccatcaacattaacttaagaaaaggtaaaattggttttgtccaatgctcaataaatctctcctgaccaccaagatcaaatggagagttagagaactttctttgagcatcatcccaagatttaaagttaagagaagctgtagataccacttcttctatggaagacaactttgaattccaaacagtattattcctactattccacagagaccaacacaacatagcaacccccacttgttcatccttcttccacacccgaagaccctcctcaaaccaggctgcaaaactatagataatactgcttgcatcgctcaactaaaaagatggtacattgaaggagatagagtt

SEQ ID NO: 294932 - DNA, 1668 bp, Cannabis indica
ttaatcattaatagcgacggggcattactggcggaccccgccgctaaagcccaataccggcggatttaaggatttttaccagcggactcattcgcctctaataacgttaattgttgtagtgaattattgacagataaaaatataaaaattaaaaaagagctaggggagaaatgactagacaagaatcgaggcatgatatatttagtcatataaacatataacgaaaaagataatctaaaggaaaatttagtttaagactgaaccacctaacatgcatgatctttttcaagatcactttttcttttttctttctttctttctttactttatgaatatatgtcctgattgtaaaaagagtttctccttgtataagtcaaagaataaggtctctactgtctccatattataattgtaaaatttgataacctcgatcgtaaggaagattgaagaacactcattactttatgccttgtcaaataatcaatgtgtgctaactctcccactctcgtctctatccatctggaagaaataaattccctctgatcgacaaaagtattgaattaattaatgcttattggaccataaataaacctttgatattgttttccacattattgttttgggaccttaagaaacttcacctcagtcaagccctacgacttaatttgtaggtactacaatacaagtcaatatatatagttattataacttatgtctaagtcacctaaaataaacagctcatgatgtttaatttatgtttgtaaacattaaattatgtgattataacaacctaattaatatacagggtggagtgatgtgttcaaatactagctacatgttttaagagattgagttggagatgaaaacattaaaataatgtaagcttataaaaattgtaggatgtattaaggttttatctcaaaaccaattgataataggatgagtaattcataacttttatatatattttaatttttctatatattaacaatatgcagattctatatgggttggagatgggttaaggggcaaattataagtagtcaaatcttttgcaaaggtaatcaagtcttctccaatgtaactataaaacaaaacactatttttgtgcaaatatcgcacataatataatccaattcgactgcaaaatgttaactatatgtgatgaggtttacactagcacatcaaatttgttgtgcagagattgtgataaaacattgtttattattaaaagtagaggttagttgattaggttccaaatactctataaatagtaaaggttagcaaacttaattatctaggtgagaatagcacgatcgagcttaatttaggctttgactaccatagtcaacaaaaatattgttaatattagggcgattgttaattttggaaaacctctcaggggacaattcaaattgattagattcaaatacttctaattggtcaatgtttgatatgggaacatgatgagtcaaatatcaccataatacttcatataaccttattaaagaaacaaattaagtgaatttatgagtaatatattttaattggtaagggttagcctcctagggcttctaggtgtcatgcttgcagggccaactttaggcatagacgggctaggtccgtgcttagtgtctacacttttcgagttacaaaataaaaaaatta

SEQ ID NO: 294933 - DNA, 4744 bp, Cannabis indica
aatcacgtaatacgcctatgttagttagggtgttacaattattgtccagccattttgttattggtgtctactatgatgtcatcaacatatataagtaatccaaggaaggtgtcttgtgtttgtttaatgaaaaaggaattgtcattcttagattgagtgaatccttgttgcaatagggtatggcttaattttgcataccactgcctgaaggattgtttaagaccgtagaggcttttcttctatttgcaaactgcatttttaagaatggtgcctttaggtttgtaatcttgtggcaatttcatgtagatatcttcatgtaattcaccatggaggaatgcattgtttatatccatgggtgtaggtgccactatttgatggcagcaagggcaaggagatgtttaagtgtgttgaactcagccataggggcatatgtttcaaagtagtcaacaccttgttattgagtgtagcctttaacttctaactgagctttgcatctttcgactgaacaattagggttatattttattctatagaacaatttgtagcttatagtgtgttggccgggaggaagtggaacaactatctaggtttcattagcttcaagagcatcaatttctgtatccatggaattattccatacttcttctttgcaagcttctgcataggaagtaggttcaaaaaacttggtgatagcaagggcagttgctttaaatttgggagaaatttttataagagagaaattttattatggggtgagctgtgctggatgtggcatagttgtaatcctacagataggcaggtttgtttatttgtctacctaattttgtggctggtcggttgtatgctgattgttattcaattggttgagttggtgattgtgtgatggtttgatcatgagcatgagtacgatcagtattatttatatgagtctgagaataatttcaatgttaggattataagtactggtttttgaagggtaaataaattcataaaagactacatttattgattgaaagatatttttagttttgatgtcaagtagtgtgtaggctttcatgttttcagggtagcctatgaatatgtaggccctagctcgatgtgcaaacttatgtggagtatgaacatgagatgcacaggctaggcatccaaagttcttaagatgtgcatattcaagtgctttattgtgcattaactcataggaggttttgtcttgtagaaggacagaaggtgttcgattgagcaagtatacaacagtttttaccatgtaactccaatagggtaatggtaagttggattgaaattccaaagctctagccacttttaaaatgtgttggtgttttctttctaccacgatattttgttgtggtctgcccacacatgaattgtaattgataacaccttgtttagcataaaaactagttagtgttaattcttttcattgtctgttcttatagatttgatgttgcttttgtaatgtatatgtacaaaaatgaaaaaaaaaattaatgataggaggagcatcagattttactcgaaggaagtataaccatgtgtaccaagagtggtcatccacaatggttagaaaatatttatagccttcaacagaaggtatatgataaggtccccaaatatctagatgaattagatcaaaagtagttttggtaaaattgttatgagatacagaaggtaatttcttttgtttggaaagatggcaagtagcaccaatatctataatccaagaaataggagataaaggatcgggtttaccaaaaaaaaattgttgatggttgggccatataatgtggaagcatcattggtaggttgcaactgttgggtgagcattgaaattaactgatgacattgagcatgagttaatgaagaagtggggttttattcatttgagattgtggaaacttgtgaagttttgggaatactgggagatgtggatggaacatctggttttcaaatgtttgaagcagggtgttcattggatcctagttttccatatctcttgtgggaaaccatgaagaaaataacatttgtctttataaagtcctggcttttgacaatgtgtgcaatggggtcgtggccttttgtttcttgaagtttgattggcagtaggattaacatcaagtgtagaagtggcagatggattatcagtagttgtagttttagtgagaggggggtaattcgatatcctaaggttctttgtctttcttggaggacaaccatggaaaacactttattaagggaagaacagtgatcaagaagtaatatttgatcatgaattgcatgataagattcatttaaacctttaagaaattgcaagacttgatcatggttgagatggtcttgagtttgagctgctaccgcacatgtgaaattgattcgaggcctgaggtgattaattttgtctcacattgctgttaacttggtgacgtaggaactatcagattcatcactgttaacacaaattttcgttaactaaattaaagtctttttcgtgatggatttgcacagaaacaatagtagtaaaagaaaaagaaattacacaaagcttttttacgtggttttgcagttaaaattttgcatagtccacgagtctatcttattagatattcctgataaaaactatggttctttctctaaaggactttttgtccctttttcaatgtatcctgcccctatttatatttacataggaaggcagttaattacaatcaaattgatattccacaacaataatcccctgaaattgtgggatttgattacgtcccacgcaaaataaatgcagctattatttgaaaatttcatagctgtgatttatccacttttaccgagtcaatgtatacgtggattaaacatgctgtaaagtgtatcttgctggggcatctcactaagaacatagcaacaacaaccctggcagcgagctggagcttttccgaggttgataatgtaaatctcatcttttctgctactaaagacataacgctccatctgataattgcagttcttggtgacaaggtgatcttcagcagtcaacatcatttgaatgccaacttctacctgagagagttgactcgacagagcagtggatctcattgaaagatgtctgaagatgattagtgaaggtaccaggagtatgccttcctatagtgagatggatgcctcgctattcgttgttaagatccattcaactgttatgcttagtttgtataatgtatatcatacgctaagttttctaacagtcaacatgtctcgtctacatctcttcatacgtagtgaggttggtgcctcgttttgtactactgatgtcatccttataattgtgtcttctgatgcagaatggtttctcgtcaacgcatgatacaatagtttgtacattcttatctcacttaagactttacagtcagcgagtagtaaatatactctatcaactccgcattgaatgagttattctattttaatatcctttaatatcatcatcattatatttgttgatttgtattctccctggttacacatgtccttctcagaagtaccagctgaatttcgggtataacaattgcccctttaatttttttttaatgaaaagtactttttaaatgattacaaagggtgtttttgtcttaatcccttttgaaaaaatgaatgtcctctcattttggcagttttgtgatttcgaggtatatcagcatttaatgaccatcttttccacttctttttcaaatttctacccgttcgattaattgtctccctgatctaacagaaattaacccaagattataaaatgaaaaaaggaataacccttgcactacctttgccatttcagaaactctaaaaaaatttcaagcttttctgcaaaaaaaccagtccctaatttgcccgaaaccgtgcatgctatctttgtcattaacatttttccttcgagtttcatctgatttagtttttgtcttcaagcattcgaagggatcttcacgctgttcgttgtttcgcaaattgcagagccgttcatcgtcccaaaaaccaagtctaaatagtaagtgacttttctccttattttcttacatgcttttaatgttgtgtttctgggtttgattactaatttcttagtcagtacctttgttacttcatttggttttagcaattttaggactgaattgtatctgggtaaatgctagggtttaggcagaatgtagggttttgagattctccaatttaccaacttctggtttcataaatttcttccaggaattgggattgctttctctttgcagcaatgtcccaatctggttgagaattttatcgtctagaagaattcgaaataccgtgtcctattgaacttgccatcccatacaaaccaagaactatagaacccaaatccaaattacagataaatgatgcaaaaattagagaacacttagttaaaattcacaaagaagatattgctagtcgccacaaattctttttgcaggaacttacagaagacagacgccatttcttgtgagatgctgcttggcctaaacccccagtttgtcttctattcctttggctaagcctttgtttttacctaaggtcacaattgctttgaaccaggtgacttggattttgaaattatgtcttccaagccaagtaaatcaaagactccctaggtgcgagcctttgtttttaccctaatgtcactttcgaggcaaagctaatagagtcgaaggtgcgagccatcggaggttatgtaggtgataca

SEQ ID NO: 294934 - DNA, 4260 bp, Cannabis indica
taggtgcgaaattgcccctacctacatattggtttctgttgatttcaataatcttttttaattgaacatacattttgcatttaagtattgcataaacttcataatttacataacaaatgtgttttttggccggtggaaaaataatactgtagtactagtcaaacaatgaaacagacatttccttaaaaaaaaatgtatgaaacggaaaaacgtgattaagtgtcaaatcacttacacgtgtatgatttttttttctttttgttgccaaaatttaacaaagaaaaatatagttgtgtttaatttgttttgttttgtgggggattttgtttggttttggtgctgcaaaatctgaaatgcccatttttctttttttttgctaatgtcaaaattaaaataaataagattgtagtcaatgaaagaacgtggaatcaacattttccgtacactccaagcacattattttatattattatttcttttgtttttcttggccggaaactgaatatttttacttagttcacttcaataaaatattctcctatactttagaagatattgcttaaatagtataaacagatcttagattcattgatttcgctatgagtgatatcttagctagttaatgattatgtagttcaaaccaaattttaacaaaagctttcattgcttgatttaattttttttttagtttgaatttatcatactcacatataattattaattttatttaataacttgacaacttagtgggttgattggtttatatatctacatacattcgtaggattttgtcttcaatactaaaaacataattatttgagcttatcttggctaattggatgaaatcataatatccttatcttaattattaaattaattaattaagaatggaaaaagagagagagagatagaattagatcaatacacactaatcttagtcagcacaaactttttttatttggatagatcctaaaatggagtcgggaagttgtgattgcctacatgcgatagtaccataagaaacggtaaccggccaaaccattagtttgaccggatctgatttgacctttggcaaaagaatatgtgagagtaagaatcttgggatttgacaccagtacggcacgtgacgctcccaagtgcttgtcattcttcaaattcattaaaacaaaggagaatcagatttttaagcagagatcactgaatttattaagccctttacgtttctaaaagtgactgtcactgggagtcacgtgttccccttctctctcttatatatttctctctctgttactctgtgagctagccaggtcacccatagtgtgttaagtccctcgttaacacccctaccccacagccattatatgagattctaaggtgggattgggaccactcgactccgtccacttccttattaggacatgtcacaatatttaataagggccacattctcaccgtccatccaaaccataaaacttgatactattttagaacaaatccactaaccttaaatcaatgtcaaatcacattaacgaaatgtcactcactcactcacaatttgattttgttattttctttaattgttacatttgattgtagtctactttgttatttatccaaaataaaacatatgaaaatgctagagcttatgtgcatgtcttcataggatttatttaaagtgttttgtcttacttgatgacgttacctcagaaaacatggatcctctatttcaggcctgctttaccgttcgagtttttttaatctttttttactaccttatatacctaccaacttgttatagctctgattctatgacgacaatattttttattgtttttagggaaaaggagaaattttatgtttaaaccgagaatgtatgaacaacttttcagaaaatatacctttctttttacctcaacactgaaaaaaaattcatctgtagttttgctgatcattcatcaaaaatagaaagttttaaaattttcttttaagagaaaaggtcgggacataataaggagagaaactttatacatgaaagggtgcaaaaaagtacaggtgatctatctttttgtactattggatttttttaacgatgtgagacgtggttctgtactgtggtcacgcgagtcgctacaactactcattacttttattttttcttgattagtataatagttgtatgcatcattgcatttactgtcaaaataagttagatattgtggttttatttaggccatttttacttgttacaattttattagtactgctcattgtttatagtgtcatatgaacaaggccaacattactaggatggtccaaagatttttaatttgatttttattgacctaattaatttgaattaattgcagagacgcaagaagaagctgcggcagcatatgacatggcggcgatagaatacagaggagcaaacgctgttaccaattttgatatcagtaactacatcgaccgaatcaagagcaaggccggtgaaccaatccttattcccggcgttgaagccgaagctgaaccagaagctgaatttcaacccccattcaccaccgcaaatgaatgaggtctcctcccggggagaatcttcagtgttctcagcttcttcattgcatggactcttcaacaatggcggccgtcatgatcgacactccagacgaccacgagctcatcccttggagcttccttgacgccggatatgttcatcatccggtaccggatctgccgatcgagaagccagaggagttactggacttgttcgaaaacagtggatttgaagataacattcatatgatttttgaatctggatcggtcgattccagtgaagacgatttctctaccgtttttaataaattggaaaataaccaaatctccggcaagggcggatcgggaaacgttgaggacgagagtaacagtggccggagagatcagcttgagctgttttcttcttcctcctcctcatcatccttaccttccttttctccgtcatcgtcgttgacggaaactccagtgtcttgtatgtaatttcaggttttggtactgctgtttggatgtttttcctggatgtttgggaaaatgttcaattttctttcttcttccttaaaaaattacatttttctttgtttggcttgggggaaaattgttcgtttagttagtttattcatagaaaaaaaaaatgaaaagaaaaatagaaagaggacatgttgttgggaatctagatgaaagaggtaagttaaaattttcttactttaatatatagtgtttatcggtttaagttaaattacttaatcccttttttatatataagcacatacaaaccaatacattgacaaaaataaaaaaacaaaaaaaattacacatttgtagtagatgcatagttttatatatatgtttcgtccatttaataaaagtataattaataatacatatacttttgaagttaagtacaattaataaatttgatgtgagtttttgttgcaattattataaaaaataaataaaaaaagtatgaaattatatttgtataattgttttgggatatgaaccgagaaaacattaatgtaaaattaacaaactatattcaaccaaagtgacatatatgtattgaaatataaaaagaggatgattaattatgtatatttacggtagaaaattatatttatgtaagaatttttacacaaagtgtgatattcacatatttttttttaggctaattatgatttttgactctgaacttgacatgtaccaaatcatgcccttgaatttttaaggtagataaaaatgtcccttgagctattgagatggttgtatttaaggacttttgtcaaatttcattcaattttactatttcagtgattgtttatgtactaaaccatgctcctcagactttgatatataccaaatcatgcccctcgaattttgaaatgtactaaatcatactcctaaacttttatccatgttagacttttttactaaaattacacaaaagtccttaaattcaacaatctcaatagtcaggagcatttttaacgaccttaaaagttcatgagacatgatatggtacatgtcaaagttttggggacaaaattcctaattagcttattttttattgacacggagcctttgattattgattaagtacaaggttactactttttgttatatatattttatgattgttgctatttacttttgcattatgtaattagtttatagttagtttttatgatacataaaatataaattttaggatcgttt

SEQ ID NO: 294935 - DNA, 4960 bp, Cannabis indica
gagagagagagggacagagtgagagagagcaaaggagagggaggtcgtggtggatcagagaaggagcgagagaaagagaggacgaaatggtttaaattgaaaaattaagcaaatgagtgaaatgatggttgaaatgttaaaacaaaatgttacttgtgactaaaacatagtatttagatacaagttgtcactaatttagttttagtcacaataagtattgtgagtaaaaacacatttaatcacaacaaattatgatttttgtgactaatacatttagccacggactttttagacacaacacaggaattattatttataattagtcataattaatttttttacttttagtgacaagttttgttgtgactaaaaataaaattttttaccaagctaatatgttataaaaagtcagcaaagctaaaggaaacagtaagatatatgtggaaattaacatgaaattttgtatattaattgcaattgtattaattggtattacacatttctcatactgggagctattttacaactccacaaagtaaagagaatgatataagaataaaagaataatttcaatatttcttgctttacaaaatgttgtgatattgaagaaagaatgtgccacttttacttttataagtgaacctaaattatatagaagcattgagatttgatatgagatcaacaaacatatcttctctgcatggaattgtaaggcctcccattggatgatcatatccatattcattttcagcttgaacaagcaattcttgaaacaaagagtggcttataaatgatactggaatgacaaaccgcttcttttcgctctctccaacataaaccgccaaatggcctttcgggacatttactgcgctcgatgatgctttagagttggatagagatcgtagaagaaatttcttagttggtactactcctggcaaatgaaaacccatggtatataatttatgaataagaaaaaataggacttttggaaagaaaagggtttgtttgctattgagatgagtactagctaattggcttgttggtagagctaacactataagatgcttttatagttgaaagaggttattggattacaattacatggggctgtcttaaaactcaactcaataaaagaaaagtcaatatttaataaattaaacacacacatattaccccaccaacttatctgaacttggtttgttacttagcttaataattaatcttttttagaaacatggtagaccctactttagaaacaatgtacatatatataccgaaacaaacttctctgctacattaaatgaatgttgtagaatatatgtgattgagaaattgattgcaaaataactttgtataagcaatgtgtgatctaagaaaaaacaaccctaaagatttgttttgcaaataaaaataatgtgcatatatagacatgagcatgttggggtgccccattttcaagaactatgcttgaatattagaatattaattatatatgtatcctcattatttgagcctatatatataggaccatctttgtctcaagttcagcaactacttgaacatatataggctaatatttcatttttttatctatcattatttgacaagaatatgtgaagatcatataataagatatattaatcttattcataaatatttacatatacataatttaattttctaaaatagaaataaagagagaatggtgacaaaaaggaaaggaataatatgatatgatatttcgtttatgtttgttctatatactaattattcattagtattcatgaaaagatcagaaaaacttaattacatagttaaaggaaaagacaaccataaagattacgtttgcaactgaaagatatggaaattatgcatatgcatatgcattatcatttgctagttagtagtttgtatatttaattacttgaacatataggacaagactagtacctttaattatatatcattaattattttattatacaagtttaatatgggagaatcttttcaagaaaaaaaaaaaaatttacagtataaataaatattttaagtttaattttttatggtaataaaacttaaattatatttttaaaactttcatagatacttgaccgttaagtgcaaagttaaaatctatatgttattttctaattggtatatttaaataaatttttatctaaaaaataaaaagttaataacttacaccaaacaggaactgtcatgtggccattgacttgacacttaatgatcaggtacgtacctacgaacattctagaaatataaattaggtattattggaaaatcaattaaatactttttcattagtaccttccatcttcctcttgaatttctacacagtagttgtcctagcataagtccattattattgcttcaacaacaatcctagaaattccttcttggagttagcataaagatgcctaacctcagatcattcatacactattcccacaaccttttccaaccccttctgtctatccgaaatggaagtgagttatgttgtgccctccatatctatgttctctttcactagttcaacaaaccatgttcatgctatttgtatcaatttcaatagctagaagcatcctacctctacaatattctttcaagatgcaaccatctaacccaattattggtttgcaaaatgtgatgccaactttacaagctgcaagacaggtgtaaaccctctcaaaactcttttgtcagtcattaaatttcatttgatcaaagttgtacttccaggattaagtctcactatcggtctacaataatcatcaaagattgcatattgatctctaatagttctttctacttggccatagttttattcttagctctatacaaagtccaagaagagagtttagaatacttaccctctgaattttcttttttgaaatcaccaaatgacatgttcagattcattctgaacttgtccaggaactcctttgcaatctaattagcatctaccagcttgttctcccatacaatttcctaggtgtgtttattctcaaacttgttaattagaactgtacaaccatcatctctcatcctctgagcatacaataactatttacgtccttctcattttatatacaactctaactctcaacatgtcattgtgaatgtacttatactataattgattgatgaaatactccttcaaagcctctcttaggtgcttcacagtaggaaatttcattcccaatttgaactcaatttctttaggcctaaaccgtagatcaaactcaatgtgtctctttccaagaactggtccatctttatcaccacttaccaaatttatcaaatcatcttcctctacatatcctccactgccatctttatggttagcttaactgccaaaatcattaactgaaccccaccattggctagggtttactgtgccctcatcctcatattctggatcttgtgtttcttgggcataatcctcatccacaaaatcgaaaccttgtgtttcttatggtttcttttttgggttgtatttggtttgggtgagcttttcccattgtttggattggtatttgggatgtctgtttcctagtctgggtgggtatattagtaggtgattagactagggttctagatctggtttggtgtgtgctttaggttgagaaatttttttggtaggtattttggtgggtatgagatacaattttaaaattggtttgtggtgtggttttggttggtgtattggttgtatttttttctagttttaggtaaagctttgttgctttttgtgttgtttctttttttttttctttggtgtgaggtggagttttggtgggtgtttgcgcttttatttctctagtttgaggtggagttttcattgtgattggggtaggttttagatctggtcttggttggtgtcattgattcttttctagttgcaaatatttgttttagttggagtgagccttggatggattggattggattggatattatgggttgtattttatttcatggtttgaggtggagcttggttggggttcgccttggccttttctaggattgggattaggttaggactaaggtttaggtaggtgtttgggctatttctgtttggtcttgttatccacataaagcttcaatttcctctaaattcttaaagatctcaacattttagtcaatatcaacacaatcaccattgtcatcccaataaccactatcatcttcactttgtattcaatatctagcatgtacatgaaaaactcatcaacatgaatcaccactatcggcttctaacaattctgcaagtttctcctcaaggttcctaattgctaccttgctcataacatagtgatcaggttgggcacttactcgagcatcaacaatcacatcttcatcataaggtagttcttctatatcttttcaacttaggtacaacttttggagggtcttttgttgttgtcttcacagggccaccaacaatttttcagttaaggactgtgtcctctccaaaagtcccagatagatccacataaacctcaaggggaccatgtgttgggctttatgccctaaataaaactctatttcaatgtaatttctattatttaaatatcaataaagagacagaagtatttttcatcacttgtttaatgtgtcatttggttcatgttgtcatttatatgtttatttgatttataaattcatccaaacccttatcacattaatattcttgtttattgtgtcgttagcacagtggaaagtaatcaatattatgtaataaatatatattcctagatttatcagtacactgggtttaactgatatgataatttacaacatagtttacttgcaccttggattagtgttatgtcatttccagggcattggttaaagtaaagtttgggttggatgcatggagtatgcattggaagggaccgatattgaactttgaattagatatgataaatttaccgta

SEQ ID NO: 294936 - DNA, 1963 bp, Cannabis indica
tttgattcatcaaaagggtggcaaaagaatttacaaaataaaaggtaaataataataaaaataaaacaaacacaccattcataaccataaaacatacatagtcaagttaaaacaacaaaccataacaacaagttcaatgagctaaaacaagataacacaaggaaagtcaaaggcactaagccttgcaaacatactaaaaagtgagaaaacataaatatgagaaaagatgctaaaaaatgatgcaagtgaactaattcggtgggggtccaaagcggtccgtatatactctccattgtgctatctcatcttgaatattagcaaacccatgtacctcctcatggtgttaatgttattgtggaggttggtaagttgagagttcatgtcgtttctcaaattttgaaattgagtaccacctgaagtataaagatgagaaaatgcctcttcgatgttgaagtgaggaacttgaggcattggaggtgctaaaggttgcactttttcttcttcttcttcttcttcttcttttcttcctattcttcactagcactaggaagtactttggcttctccatgagctttgagatcttgtttggagtaaatctatctttcttattcctcatcatacttgtaagacatgcccttaaatgtgatttcacctaaaatatcaaaatccttaaattttaagacctcagtttcatcatcagtggggatgcctagaagaggaaataggtaggtaagaagggccccataggataaggcttttctttttctaagattatagacctcatttatagttccagtgatgagatagcttaagttaatgctcttgctttggataatgatgttaaaaagaaggatttggtcaataacactaacatcatcttggtgtcccttcctaggagctaagttgttacaaatgaaagagtggataagttttccttgaagagtaagattatggcattttggtttatcaaaacaccttcttctacataaactccactaataaatagggcatggttatagtaggcatcattcttaagtctaggcctagggtcaagtaagagaccttcatttagggcatctaggagttcattcgaggaatcaacggttaaggtgaatctaactcctttgaaggttcctcttatgctgtatggattgtaagaaattttaatgcaagcataaaaagccctcactagcctagggtaaatattggtttgaatgcctattaaagtttcccaacccatatctctaaaaagattgctaaaattaatataattaagggtatctaaatcacacttcttaccaatgagtatgtctctttttgagaagtcttcatgaaagttgtttgaaaatcttccattagagaagagctcatgcctatccttcgtgcttttctcttcttattgcaatgaagatcttgtcctcttcccttgtctagatgatgaagccattgaaggaggaataggggtggagatttgtgaacaatatggattttgaaaataaaagaagggaattaggttttgaaagtgagaaagggttagagagggaataggagtgctatttagggttactaaatcaaaataagggtttgtgagaggttagaataggtttataggaaaatttttgtgtttgaaatgacaaaaaatcatacaaccatgaaatcctataaaaacggtttgtcgttttctcagtacagtggctaaaggcaaaaatggtcataacttgggttttaaaaatccttttgaccccaaatttttttgtaacaccttaaatatgacaaaatgaagatgttcaaatggaaaaacagaaaaatattgtaaaatggtgatttatggtaagcttttgcaaaaataccaagaaaacttgaaccttaccaaaaatgagttttatataatgaatttgaaaaatacattttttcagaagtttaagtgtaacaccctaactaacttaggcgtattacgtgattt

SEQ ID NO: 294937 - DNA, 5064 bp, Cannabis indica
aaaatttatatgtaaaaattatgcacatttattaagagatgtcgaagtaaaaaaatatctgacatcagtgaatctgcatgcacatgtattttacactcaagtgcagctggaagtaggttaggccttttaattacgatctttagaattaattaaggttatttttaatgctttgaggccaagtaatcataatagagacccaatcaacactaaaagctcaaggaaaacacagaggatgagctttagtgatcaagcttggaactaaattgacacccaaatttaggtagaaattcaaacataggcaaaatgtatttgaatatgaatataaattgttggattaaacttgcttaggataagaatagtaagaattgtgttgataacatataataaagcgtagataaaattaaatgtcctaaatttaatccatttatataattcttctttaacttcagtttatttgcatttttttattattcatttagtttatcaatcaaaaatttgcttcccaaacaaaattagaaaaattgttgattggtaattaaatagcaatctactttcattaaagcatacccaattttaatgaataatatacattgtataaaaaaattagaaaccaccaatgttagctcaatggtgagagagagatgtaaaaagggcataaattcaaacccaaaataaaaccttgaaaatattgtccctaccacataacattttacgatttactagccaagtttccaattgcttgtgttggaaagtctatctttaataattggaaaacttttttttttattgataaacttcatgaaaagaaccccaaaaacagggaagcggctacaacacccaaatctccacagaggagaaaccagtaaaaaaaccagtaaaccagtaaaaaacaaaggaaaatcagaaaaaaaaaccagcacaaacccatacaaccagtgcagaaaactaaaggattacaaagaaatcaaaaaggactccacaacattcttacaaaccaaaccaaaggctgaatatttgaaagcccaatcagcaagacgatgagccagttcgttagaatctctcttaatccaaaccacctgcgcacctggtatcacgttgaaggcttcgaagagatggatgaacaaagagctgtccctccaagaggggataatcttgctcgacaacgattcagccaagaccttgcaatcagtgaagaaaataggattcacccaccctcttgtagaacaccaattgcaagcatgtaaaagggtacgagcttccgcctcaatgatgctagagaatttcagcttgacagtaaaagcttccaagaccgatccatttgggcttttaacaacaataccccccagcaccaactagtccgcgacaagcagcatctgtgaagaacataattctatccaagtaaatatcatgtggcagcgtaccacttccactctccacaggctgtgggatttccacactgaaagcatggtttgtatctcgaattctgctccatatttcactgcgtataccagcaaaggtaggcaccgtttgctcatggtaagcagaattgcgggtctgccacaacacaaaacagaggcagctagcaaacaaagtgaactgcctttgatcttccactgggttttggctcaaaaaatcaggattcagaatccacttgagcaattccaaaggcgtatcaaacctgagattctcactacgaacagaccaaacgctatcaaaccataaggctttagcaaggggacacttacaaaagagatggatgaaggaatcgtcatcagctttgcaaatgtaacaagtttccgagttgccgaatatcatcttgagacggttaccaaacgggagaatatctctaccaagtctctataaaaagagtttgactcgttcctgttgcggggacttccagagatcagaccaagtcttgtctttaactcccaaccttctcctgataatagctttatatgcctctttggtgctaaagagaccagcagtggaatctttccaaatcaaacgatccacataaccaccaggaagcctagtgatcaagtttatagagctagcaagggttgggacaaaccaccgacgaacgaggtcaaggttccattcaccatcatctcgaatcaaactagatgcatagacagacttttgttggatcaatggattgaaggtagctcgggattgctgccaattaatccacggaacccagggggagttccaaacatcaactgagttaccgttaccaataaggtaacaagcttcattcctaaggatatcacgagcagccataatactcctagcccccaagatgcggacttaggtaactgaagagaccaaaaagactgattcccacgacaatatttggccaaaaagatccttccccagatggactcactaccagcagcaagttgccagcccaacttagtaaccaaagccagattaagctcctgaatttctttaaacccaagcccccccagtccttcggcaaacaaatagaatcccaatttgtgagagccaaaaaatgttgcttatcagatgaaccaagccaccaaaatttccttacagcccgatcaagaacttcacagagacccgtagggagcaagaaagtagacatagtataaattggcacactcgaagctaccgagcggatgagggtagttctccctgcttgagacaaaagtttgcttctccatccctccagacgaccattcaacttttcacaaataaagtgaaaatctttggatttgttgtttgacaagatgatcggattttcccagaaatttatcactggagttcaagaggcggaaacccaattgattctgaatagattgagccaccccagcgattatatttcttgagaaagtaacagccgatttgttcacattgatgctttggccagaccattgacagtatttgtttaagcattgttggacatgttcaatttccccagagtcagctcgacaaaagatgaaggtatcgttagcatacattagatgagaaactgaggggctgtttctggtcactttgaagccgtggataagacctctttcctcgcaacttgcaagaaggcggaatagaacttcaccacataaaataaataagtacggtgataaaggatcaccttggcgtattcatcttttcgggttgaattgcttcaaagggcccccgttgagcaaaactaaaaaggagactgtggatatacaacccgagattagcttgatgaacttttctccaaatccgaaggctctcagaattttctcaatgaagctccattccaggcggtcataagctttggacatatcgagtttgagacccgcaaacccagttttacccttacaattcttgaaagaatgcatgatctcctgggcaataatactattctctgcaatccacctacccgggatgaaagcatattgaaatggagatatgatcttgctcaaaattggcctcaatcgattagcaatcaatttagaaataactttgtatacaaagttgcacaagctaattggtctgaaactatcaaagttacaagctccatctttcttagggataagcactagaaaggtctggttcagggtcctcacaaatttccccgtttcaaaaaactgggtcactgtgccaatcacatcaccgccaacagtatcccaatggtctcggtaaaattttccgggcataccatccggtccaggggctttaagagggtgtagagaccacaccacctctttaatctctgaagcagatggtattctaaccaggctgtcattggtttccgtatcaatctgaggttggataatgttttccagttccggatcccttgggtgagtagaatcaaacaaccgtttgaagttagaacagaagtaattcccaactgcctgtctaccctcaacccagtcaacaccattatcagacactgcattcacaaagttccttctccgtttgatgacagtggccgcatgaaagaacttggtattacgatcttcgtccctataccacaattccctggatttttgtttccaaatctcacattgtcgagcttcgatttcttctatttcaagaattatatcggcctcgagctgaagagactgctgggtgggctcacggccttgaacctcaaccaagagccgattaagcatgtttaacttatcagagcaataaccaaagtggagtttattccacttagaaagacatttcctggtatgagcaatcctgctcataagctgaaaacttttaacaccctggatttcaatacgccaggcttccttcactaattctttgcaactcgggtccctagaccaagcgtccagatagcggaacggagttttgaaccggtccctattaaaaaggagatccaacataagaggagcatgatcagaatccttcaccgccaaggcacgaacacccgcttttggaaaggatacaacccaattgggatcccccaccactctatcaagcctttcacgaaccaagtgttggaattgcctcccattggaccaagtgaaaaaaattacccatactaccgatatccaccccccagtaacatcaagaaactctcttaacaaggcgccatccgcatactcgaaggtcgttcccccgaatttttcaatttgttccaaaatcagattaagatcccccataaccgcccatggttcactaaccgcagcaacttcaagagcgaaggaattccaaaactcatttctctctgcccgaacaggggggccatagacaaaaaaacctgtccacctagggacattgaggatgccactaaaggacacagtaatcacatacgaggttgctagaatcacttgaacattaatccccgctttccaacataaacatagaccacccgcagcaccagttgatccaaccacagtagcaccggcaaagccaatccgacgccaaaccaaatccatcctatgataatcgagcttagtttccattaaaaatagaacattaggatcctcccttagcaccaaggccctgagagcctttctttgccagagggttgccaagtcctcggcaattccatgagaggagcttcatggggatttggggggcatgattcggcccgcctcc

SEQ ID NO: 294938 - DNA, 1803 bp, Cannabis indica
tccaccattttggtagaatgactgttacattataaaaaagaaggaaagatcattccaatgtaaccagagaaaaaattaatgatttttttatcaacttttttatgcattttaaattttattccattccattcttatttctatttccattctcattcctatttatatattttcattcctcccaatcaaacgcattattataccttatcccaaactccaaaaaataaattctctacatttagctcataaataatgaagagggtaaatatgtgtgaggtaaaataaagaaaatagaatttaagtaaagtattttaaagaatagagtaaaaaagtgattgggagtgctcttagagaatatattttttttttataaaatcaaaaatacccatatattaccttttgtgtctcaaaaaggtgagaaatctcaataagtccttcatccttttcgtacttctcttgaattttttgtgcttctaactctaccattgtagggtttgctccaaacatagaacatgattcaacttttttgtatcccactacacacacaaaatataaataataatttaccccccaaaaaaataaattaatatatatgtaagagaagatattcattaatctcatattaattaataatatttttaagaaccaactatatattacaaatgagctaatattatataataatacctacaaggagtattgacttgatgtagaactgagaccaaggtgagtctgtccccagcttttaattttaagccttgcactgcccacttcaaaaacttcacacaaacttctctcaatgaatcctggatgaccaccacctcttgtacttgatccatatatgtgtgtggtgtgtgaatgtatttattaattttcaattttcaatttcttattaggcacttttaattaaaaattatcagcaaatttattttcataactagtcgtactatattctgtaatgtaagttaccagttcttcttataacttaattatactcttgacgcatattttattattatatagatgtatgtgatgttgttgacgaataaagcccttaaaaagagaatgtttttgtgataaaaatgagaaaattttggaaattttagaagcatattcgaatattcaaacagaaaaagtcaagatatatataatataaatagaactaaaactttaaggtaaattatacatataatacctaggcgatgaatgtgcatgtccaaccaaacatattatttcttcataatttaattattgttcttaatcttaatggttaatatatttattaattttgattcaatcaaagcttactttggagttggacgatggaagagtatatttttgtgattagtactaattaatattgtatcataaatcagtaacaaaaataagaatgtaaaactttgggactaaagaacaaaaaaaaatccttaaagaccgtcttcttggactctctctcatgcataaattattaaatctaatgacaatccattgatctaattacgactgattgttaaatatttgatatctaattgtgatcggattaaattgaatgttatttttaaatatcccatttgatcgaatgttatttttaaatatcaaattagatcgaatcggatgttcgatagggtgtccaaaaatccaataaatataacgtgcaattgaactaattagtattttcatatattgttatacgtaaaatatatatataggtgcactcttaatgggtgcttaatttttctatctaattaaaaaaaatctctcatttttatatcatatgggctaagattgttccattggtaaaaaaaa

SEQ ID NO: 294939 - DNA, 1767 bp, Cannabis indica
aaacaatgatgatcatcatcactggttagattaactatgaagctaccaaaataattgaacaatatctaaactacttaaataacaattttttagactactaaggcattttatcaaacacttagaagtcatttggctcatcccaaaatgacatttcttttcatttcttttgttaggcattttatcaaacatttagcgttcattttgctcacccactaaataacatcaaaatacaactataaatacagaacagtagtcaaaatacaattataacagaaggatttataaagccatgatttttatttttgttaaaacaagaaaacttactaatcaagtggagagtagttaatgaggacaagacaacgttgtcaatggcaagtcttggaaattgatgggatagtcgaagttaagagtagtaaagtttgagtttttatttttggtttcagtgatgagtaagggtaaagaggggagggtattttagtaaatgcacaaacccccaaaccaaaacaacgttggcttctccttccttgttttcccagaagagaagagaagaatgaattgattcttggctggtcagtattatatgatgattacaatcaggtatgtaggtaaagccatttctttctttctttctttctgatctatctatttttggatcttaacttgcactgttcatgctccttacacatgtcaatggcgttttgtgaatgaaatttacgtacttgtatggcctggggagacaaaggaagacattaactcattatgccatgccaattcttgtttcatatcataaagctcatgcataacaaaaataaaagaatatttgctttgtgttgtattagaactaatcaaactcaaataacagaaacaaaacacctttactgatgaagtctgctagactagttggtgtttcttgtataaaaaagaacaagaattaagtgttttcttggattggatatgaaattttgagcacataaagcttctttctaatgtgttttacttgtattttgctagaaagataatatcatatcactctgtatgagtatcagtatgacgttcccaacatttggcatattcttctgctcctaagggttagtggttttcaatcttataattaccatttacaacatactatgaaatatacgaatgaaatatacttgtttcttgttttctttggtttcttcaaggtgtactttgtgcttttgaagatgttatctttcaagatgatttgttttctattgacaatgttttcttgtggtttagatactaagcttcatagaagatggaagggaggcggttgagaagggcaagaagaggacgtaatcacactcaactgttgccactttcatcttcctctacttcttcttctggttgttgttggtacttggactacaagatcttgtttctcaaccaacctcttttccgttttggaagaacacacgctgctcttctaacaccgtggttctccattggggtcggcttcaccttaaccactctccttgctgtttcactggttgcttcctatcctatgctcaagtcttcttttcctttacttttttgtcttttcaatgctttcttatactaacttctttctgttactcttaccattcagattctcctctgggatttagccagaactctgcatattttcccggaaagctggttgggcgatctttcgagtgcctctttgtttggtttttggcctttctcatcttcaccttccgctgttgatgctatctacgtactactttctactatcatctctgtatc

SEQ ID NO: 294940 - DNA, 2274 bp, Cannabis indica
ctaatccaaattactaaagcggtcattacaagaaaggtaccactccaaatactgcacagaagtaggcaaagtaaccctttaggaaaaggtgtgcgcccatctccacaagggcttagctccagatgccgaaccccccttccgaacactttctcggctgctctccgtgaatgaaaaacctcttccaatattgtctctaacacgctcgagccctcgctaagtgtcatacttcctaatgttattctaaatcctaaatttttttatatactggtccatttcccatgcactatcattcaatatcaagtagttagctacccaaacgacctagtgttctcctactccagaacttcttcttccaattcaacctcttccattcaatattcttagagatagattttataaaaagaaagaaaaccaagtagttagctacccaaacgacctaatatagagagggagcagagaagtctctcccataaatagcttggagaggtccgtactagatttactatctagaaacaaaaaccttcagggatcattcgttctaaataggaaatcaagaacaacaagaggacaaatgaagaagaaatctacaaggtatccaaaaccaaaaggattctggccacaaaatttttttcaaacaattctgcagcaaaatagccattcctaaaaaatcctaatgataaaacctaaaggccgtagtctattatgcctaaaatttccaacaatatcaatcaaaagctctaaaaatcccaatttcattcaaaaaaaaggccatgtgaatcctacgtgcaacagtaaatctaaaaacacagttacaagacgaaagggtaaataaatgcataactgataatgggagcgaaggcaccaaactaattgtcattgggtttggttgaggtagttgagcacaccttttgcaaagacaaatggcgaaagttatcaacaaattaatgtctatgtcgaaatccaaagtcacaatgttttctagtgtagaatgcgtggtcactaggggttgaatgcttggaaattctcaagccataattcttaaaagaagttgtatacaaaactcaatgacacgatccagattggtttgggtcattttgattatgggtttggtttctgcatttaatgttgcagaaaaatttgaattctaatttctaactaaaattgggggaaaagtggtaaatagagtcttctaagggtatttatacccgaggtggatatccgcgtgaaaaggaatggataatccatgattgtatctctaaaagaacaaatacatctaatagttggggaatccaacaatcaagcatgaaaaacaattaatatattctggaatcgaggcacaaattaatgatgaagatgcttttccttagttctcgcaccaaaaagtgaacagtcgtcaaaataaaggcttccctaaaaagcaactcctcagtaaatgtgctcctccaccaacagatgactgccaaattaacctaccacgattgaagatggaagttcaccttccatgattgattaacatttggaaagtaatgtaaaattacttttgaacctccacatgtcaacactaatggaatggagcaagcttccaccatacgtaacattttagaaagttggggtaaatcttatctgtgttttcaacaagggacacatggaatctaaatcagcactgaaagcccatctgtggttctaaagaagataatttgggccaagccagagtgatacaaggccttctaggaaggtaccttagctccgcgaccagatgaacttccgctaatgacaatccatatttggaagcacttcaagtattgtaattctggagggctagatagtgtattcctataagacaagtttgatttccctttttattcaaatgtacagagtaaagaattaaatgctcctcaaatcttgacaaaaaatcgtatcaatccaaaaagggaaactacccgacatggagatcaagcaattgattgtccataattataggacacggtgttgacaattcaaccatatctaatctgcctagcaatgcagatcatttccttcaagagttggacctaacgagaatagccatacttatgtatcttttatgtaaactccccattagagggaaagaaggaaaactaagtataattctcttaacactataaatacctaataaagcttgaagtctatagtaacaaatggaaaatgattggtgcacctgggtattatgagtttggaaggatatacttctgaactcagaagagacattttggcaggaaggaagtaatccattct

SEQ ID NO: 294941 - DNA, 8406 bp, Cannabis indica
aaaaaaaaaatagttcaaatataccaataagaaaatgaaacgtaacatttaagtacttacatagttccataaatgtaaattagatattattaccgtcaaaaattaaacttaagtatttatttaaactaagaattaaacttaagtatttatgccgcaaattactctattttatttttaagtaatttttagctgaactctctgtattttgaagtttggtacagtcgggtctaactcttatactgaaaaaattatgttaaatttcataatctttacaatcgttttggtcagcactctatctattagtatataactattaactgcttatacataaatatatatatgtgataaaattttaatggactacctaatattaataattaaaagaataaattaaatatttaaaaaaatttaaaaatgagacaaaaaatttaaaagaaaaactagctagtgtatcttatttgaccgattggatttgaccatatttgtccatgcttctctcattgacattatcatgtggagatttcgacagaatgtccctaaaaacaactatataactatgatatggtaaaaagatcgatcttctctaaattgttttgcatattgtatcttattatgagagttttaactttaagtacgtaatttaaattccatttttgaaagaaaaataaaagaaagatgtacgatatttaagttcaaacaattttgctcactcatttaaccaagattttaaataaatacgtatgtgtacaaattctattaaatgaacataatttaaacaaataattttattattggccaaagccatcatcattattgagcttttgatacaataaataatgtttataagaatatagactttgactcacttttaaaattaaattatattgaataatattaataattttttgacatttgaatagttaataacaaactatgatatacgataatttaacttcttacaagaaaaaagatgtcctatgttcaaatttcctttctcttaattaatgtcaatattttactcaaataattaaaaacaaatgatgatctttttttttttcaaataaataaacaaaaagaagtaaaataattttcaaaatttcaattttttgtatacatattttatacataacatttgttgttataatatttccaaatttttaaaaagaatgattaatttagaattcttccttatattctagcttatgtgggaataatttgcatgcattgcacttcctttatgtttatctttggaatataaactttaattggactttatacattaacaaaatacacactcactctctccttctatataaatctaataatatatgtgtatatatatatataaattaacatgtggtgtgtaaaagtaagaaatttgaagttagaaggtaatactaattaatatatgtgtgatattattagatttattaattatttttttgaaacgaataaaatatattaaaataaattatttttaaatgatacagaaaaattgatatataatataatatataaatataaggagaaataaatgagtaaagttttgatgagttatatcaaaagatagaatagatagagaaattgttgtgagtggtctaaaaatttgttggtaaaacattttttatttatagggctttagcaatgttacgttgtctttctttcaaaataaattataatgcgtcatatatatatatatatacgacaaacaaaatttacaagattattgtcagaattggtttggtaatgaaaacgatagtctcataaacaattatatgacccaagcaaaattataatattaattaattttcatgcaaactttcataaactgcttagtaaaatatatccatttatatatatttttcatacttcatattttctaggatatctagtcaactatagctatatatttttatagcttttgttattataataagataattttgaaataattcactgctacaaaattaaaaacatgagataattgatttaaataaataaataaggttaggtcatccctctattctcatattattattattattattatttttattattattattattattattattattttgaaaaaaagtcttaagtggtgttacaagtaataataagagccaaaaggtttcaatatacaccacaacttgtaattagttgacttatttgtcacactaaaacctctaatacaaagaataatagaatttgttctttgggaaaagaatcatacatagctatatatatgctaaaaataataaagaagggaacctaataggctaattatagaacaaccctacatagcatctagcatttgggcattatatatatatgtatattaatttgtttttgtaccacaaatatatgaataataatacatcgtacctctttcagcctttaaataataataataataataataataataataatggtaacttggaaacaaaagggaacatagtctacaaaacggtgtgatggtcttcccagatcctaaatgtaaatccatggtttaattagtacggatctcaattaacaaaaaaccttatcctcttatggttttatacatcaaaattatcaaatgtatataataatgtgtatacatgttaaagattagaaattgaaaaaaggaaattaatgggacaaaaatggaaagttaattagataaggactacgtacgctagagtataaaattaagttaattaattaatcaaaagaatcttaaaaattactttgatagaatagaaattaatatatatttttgtatattaattgagtagtactagtctgacatggggctccaacatatcttgttcatgttatggaagcaacaatttgcttaatcaaattaatagagggaatcaactaaatcatatcatagcttttagagttggaattaaaaaattcaattatattttaataaaaagttgtttgaaagtttaagttagtgagacactaatctattttgtttgccatttttcttgggccatgcacaatagagctaacccgttttctattggttaattaaactatgctacctatttaattattattattattcttgtatttgttttagctcttcttttaagaattgtttccaacctcaaaaccccaattttcatttctacttagataatttcccacccccctaatttttcttttcttttttgaattattttcttaggaataattagaataaagtaaattataaacgtccattatattttcactatcttcattgaactgaaagacctgaaaaaaaaaataagaagagtaaatatatataccttagaattaaaagatatataccaagttaaaaaacacattatattggaaaactatacttgtcaatgcacaaattaacatctctttgatatttcaatctattgtttttccctcccacaatacccaaatcttcttattaccaccatttttcataatttatttttcaaatataacataatgattcaagttatatccattatgtagagtcttacaaataattaattattaaattaaaatttatcaaactcgatttgaatataattacaaatggtattgggcatcactactttcctttgatatttcttattagaatacagtatatttggttcaaccgagtgaatttctattatttgattgtgtagagatgtaaaattttgttctattaatattatttatagtattctccaccttttttcagactatttatttatttattttgtttagtttgttttattgtcacgtgaattttggatagtactcctacgtaaaataattattactatgtccccttaattatttttcaacttaattactatttcatataggtggcataacacataatgtttgtcattattgtttgcctgttaaattgtttttattgctcatgtttcgaagaattatttgttattttagcttataggagtagtaggcacaattctttatttttaatttgtaaaatgaaaattaaaacttagcatatgtttccttatataattaaagaatatttaaaagcataagttgtcaaatttttaaactcaacccaaatgagcacataaagtaactttaattgttcatatctctaaagtaaaaattaaaatagtctttcaccagcattattttattccaacttttccattggcaaatatttggtgaatatcatagcccattaattaattagagtgtaattaagactagttgggtgttttgatttggcctaagaattttattttattttgtggtcccatgaatcaaataattgaaccaactttccacgttggtggtccattctcccaccacgtgtccacttcgattgtgttgtgatattttgttacaaaaagaaattaagagatcggataccttcaacctcttagttaattttcgtatttgaatatatacatcggaaattttgtttttaaaattttttcataacgaattttattatgcttacaacattatctttgtaatgctgaaattacgtttgaagttttttgaacacgcatgctaattaactagaatatcaaaaaatttatttttcggcattgtaaactattcgaacttttagcaaaaatttatactgtaattatgatgaataccactctgaaaaaaaaaattaaaaaaaaaatatttcgacatgtaattttaaccgtgaaaattaactaagagtttgtaattagcacttctctttaattatatttttaaaataaaaaaaataaaaaataaaagaaggacaaattaatttaggactcgatcttcaaaacaccaaagtccttagtccatacgacgtgtctaatttctatatacatattttttatttattttaatatgaggaatcaatttattattattttcataagaaaaacaaaaattgaaaagtttgatttgatattcttattgacttaagggaggtattttcacaatgtggatcaactacattattaggctttgctacaaagttataagtataaactatgataggtttcccactttccattgatatcggtagatattgcctttttttttttacatactactttgttcactttgtgggttttttcagaccattcattaaattgtattagtaaaaaaacaaaagtgtacttaatgaaggagtcatttatgtaaaatggtaatagttatgattaaaataactaatattatatatagtgaatactctagtgagggtaaatacttggaccatatattttaaaaaaataacaattaaatcatttattttgtaaaatgataaacttgacccttgtattttatgaaataataaaaaaaattaacttgagaaaaatattaacttgagttgattatttttttatcaaaataaaacttaataataacctaatataaaggtgttataacaaaattaattacgttttatttatttgttcatgttggaaactgtcttcaaattgattatattaaattgttgaaaattgagctcagggtcttattatttttactatatattttagaaaattcaggatcatttttgttatttgacaaaatagaagatctaaatagtaattttcactatgccacaccaacccattacgagcccgccaaagagattaacaaatcatggcaacatgacacactttcgacttagaaaaactccccaaaatgaaaccaacttgagaaatcaaatgccaagagaagccataacgcctcattaaccctctgccaacatgcctttactaataggtaataaaccaaaatttgaagaattgatttgaccctataattacacaccaaacaagtaacaaaaacatccacatgcgtatcctttaactgagacaaggttggtagacacctaaaacaagctctccaaagtaaattcttgactttaggtgggattttgaaattccataatgctctccaaaagctagagttactatcttttgaccatctaccatgcaacaactgaagatacttataagcactctaaacactataaatcttgaaagtttcctgaaactaataccaatgattcggaccttgattatcattcaaaataatattcttaataagatgacgaccagttgtattgaataaatcattaagaattttgtcatcccactctcttgcccctgccaccatagtttgttgaaccttcactccctctaaatttagatgggaccaacggacactcctcactaggaagccacgactctcccaaaacatcaatggaagagccatcaacaacacaccacctacatcctactcttaatagcttctaagccgccaggatacttcaccaaacataacttgggtaagaccccaacttagccatcaacaaagtgccatgaggataatatcgtgcctaaaagatgtgactaacaagcgagtctttttgagttaggagacgccacccttattttctaagcatagcaaggttaaaatcatgaaaactatgaaaccctattccctcattatctgtatgcaccaccaacttatcccatgacattcagtaaaaattctcggaccattaactttagagcgccaccaatacttatacgtaatttgctccatctccgaacacaactttaatggaagcaagaaaacgttcatagcatagctgggaagagcttgggcaatagatttcaataagacttccctttttgatctcaaaagccacttactatcctaactttctacccgtgttcgcatcttatctttaaggaagcctaaagtagcattcttgtcctgcctcatagtattaggaagacccaagtataaactctgatcatcagcagccacttgcattatgagaatcgcttgcactctagcacaattgaactcagaagtattaatgctaaaaaagatgaaggattcagcaatattcacatgttgacgagatgcttgttcaaaagtcgccaaaagcttcataatcttaattgtttctttttcatttgcatgataatacaaataattgtcatcaacaaacaacttgtgggaaactaccggtgccctcctggtaaccttatacccatgcagccacttattcatttcgaacttctcatttaaggcaaaaaatccttcagcacacaaaatgaataaataaggtgatagaggatcaccttgtctaatcccacaagtaggaataatcggccctagcatttgtcctccatgcataatccaatatctgacttatgtaacactctcgaccataatcaacctcaccaagtacgggtggaaacctatttttaagaggatcgccttaaaattttcaaattcaatacgatcataggctttacttttatcaagttttaaggccatatacccgtaatgaccttgctttttctttttacgaaatcgagaacctcaaaggagattaaaatatcaaaaatcaacctaccaataaaaaaagcactttgagaattcgagatgatttctaaaagaaaatcttttaggctattagccaacactttagtaatgactttacaaagaacattacataagcaaattggtcgaaggtcacccatacataccaataagatgcttcttcttcggaataagaaccatataaatatcatttaaccccatggcaaaatagaaaatgcaaaataattctgaaccaaagaaacaacatcattaccaacaactgaccagaaattttggtaaaaagccggtttcataccatcaggcccagaggacttatcaggatacatctcgaacaaagcatctttacttcttctcctaaaataggccgcaagagagccacattatggacaccagtaatagacatgggtacacaatcaataacctcgtgccagtgaatcgaagaagctaaaaaatattagtaaagtagtccaccgtcatctcacctaaaccatatttccaatccaccgaaatacaactactcgagttcttcaactagtgaatggtattgttctttcgcctagaagtagccctggagtggaaggatctcttgtttctaaccctatccttaagccaaagttgatttgatctctcacgccaaaaagtttccttaattttgatcaagaatgaaagatagctctttcttggcctcctcaaactgctgacaaagaaagattatttcgacgaccttcaagcctcttaataacacccagtatagaagcaattctagctttaaaattttaagtaatatttctgtcccaatgtaaaagtcgatggccacaagtcgaaattttcacatgaattggctaacccgctaaattattctaggtgtcgtgaataatcttatcacactcttcctctttaagccaagcatattcaaatttaaacgttctgttgcattctctttaattgtattcgggttcattaatatataaatatatctttatatattaaaagtgcctatctatttttggtttaacagaatatacttaaaaataaaagaatattctgtta

SEQ ID NO: 294942 - DNA, 4742 bp, Cannabis indica
aaaaaaaaaagaaagaaaaaagcaaaaaaagtcaagggaaggagtgtggctggctgcggcgggtcgagactgagaagtgggggcttgttattattattattattttaattttcattacttaattttatgatttttcttttttaataataataataataataataataataataataataataatttttgtataggtttagagttggggcttgtggctcttggttggatgagaaggaaacttcatcgaatatacccttaccactcatctgtgccatcaacttgttctttaatttctatatatattacaaacaaaatggaaaagtgataataattctttaaataataataaatatcttatgatttagaattatacatagatattctcatgaataaataaaggtcaaacattaatggatgaaaatgtatttatataattttattaacacttacaaagagaagaagataacttaaaattagaaacaacttgaacttggggcagaaaatagtttaccattcaattcatgtggcacatcatgtgggtcagacccaccaccaccgttggtccatgtatgtaaggacaaaaccacaataaaaaaaatgaaataaggactcaaaactaattaacaaatataaaaaggacatacaagaaaagaaagaaaaagtatagggtgtatttaaaaataattgtgtaattactaagtgagataattattaaagtagtaattataatgaccagtaattactctatattttaaaataaagtatttctattaggtgtctaataatactttctaaaaattattatattaaattatatgagactcgatatgctacttaagtggtactaaacagtaaatactattagcaccttttagtatttttctttaaaataatacaaaatgtatttaaatataagatgataattagatataaattcttaatattttgtttagttaattattaattatacaagaaaataatattttaaattttttagtaattacaagtataataacactcaattcaagacatgagaattagatagtacaattagaatctttcaattatcttaaattataaaattacagtgtaattatggttgtaattacatggtgagtactaaattatctaattacttctaattacacaatatctttccaaacacacaaggtttgagattgattcaaagtcagttggtaaaaatggaaaagacataataaactgaaacacaacacatacatatatacacacacacgatccgccgtcaagatgaaataccacgttcgctcaagattgaaactttgatatgaaaggggtgacctttagaaccacccaagagaccctttgtgaccctcttcaccgcttctaaatctctctcctttagcctacaaaaatgacaacccttcttacccttttctcttgccaatccataaacaaccaccacctttcctttctttactttctcttctcaaattttcaatctttttttcaccatgtcatcactttctattcgttgtctatctcttcctttgtcttcttcttcttctaaccacaaacaaggcttcaagccaccactccggctgcagcaccaccagcggccccggtggaagtagatgcctcaaggttggagccaagagtggaggagaaagatgggttttgggttttgaaggagaaattcagacaaggtattaatcctcaagagaaagtgaagattgagaaagagcccatgaagcttttcatggagaatggaattgaggaccttgctaagatgtcaatggaagagattgataaggttaagagtaccaaggatgatattgatgtcaggctaaagtggcttggtctctttcacaggagaaagcatcagtgtaagtgtcaacacttagatttctatttttggttttgttgactcaattcaaatccttaggctgatttagctttttgacatcttgttgagttgtttgtttataaagttagctttcttttttgaatgatgttttaatcagatggtagatttatgatgaggttaaagctaccaaatggggtcacaacaagtgctcagacaaggtacttagctagtgtgattagaaaatatggaaaggacggttgtgcagatgtgacaacaaggcaaaattggcaaattcgtggagtagttttgcctgatgtaccagatattcttaagggctagctgaagttggcttgacaagcctgcagagtggtatggataatgtgagaaacccagttggtaatcctcttgctggagttgacccagatgagattgttgatacaaggccttacacaaacttgttatcccaatacatcactgccaactttcgtggcaacccaactgtcactaacttgtaagtactttagctccttctgcaccaaggaaatatttaattaatcttgtcccttctcatgtaacattttcaggtttagtgaacaatttatcagatttgtctagtagactattactcacttgttgtcaatgttggtttctgtggtgatttactgctttctttctgttgactaaggctgacattgtaaatgtcatgtcacatttagtttctacattatgaatctccaattgctgtgtactttttagataaagaagttaaaatcaattctcttgttgccttatctaagtcacttgagcttttaaatgtgtgtattgattgagtttctttatttgcacctgttaatgttagttttatggttatatgcaggccaaggaagtggaatgtttgtgttgtgggcactcatgatctttttgagcaccctcatatcaatgatcttgcttacatgcctgccacaaaagatggacgatttggattcaatttgcttgtgggaggcttcttcagtcccaaacgatgcgaagaggcgattcctcttgatgcctgggtgtctgcagatgatgttattcctttgtgcaaagcagtactcgaggcctatagagatcttggcaccagaggcaacagacaaaagactagaatgatgtggttgatcgatgaacttgtgagtgtctattgctgattagtctttaatagaatccaaagcttttcgatgtcatgattttgcaccatgtcaggattgttattactatccgtttcgttaatgaacttcaacaacaactttcttcaagtcataattgaaagtggtttcatatttctaaaaatgttttatcaattaagccaggaaagtttatgtggtttgtttatgtaaatgcagggagtagaaggattcaggtcagaggtagagaagagaatgcctggacagacactagagagagcctcttctgaagatcttgttgataagcaatgggagaggagagattatctaggtgttcatccacagaaacaagaaggcctaagctatgttggccttcacattcctgttggccgagtccaagcagatgacatggatgagctagctcgtctagccgatgagtatggttcaggagaactccgcctcactgtagagcagaacatcataattcccaacatcgagaatgcaaagattgattccttgcttaaagagcctcttctaaacgacagattttcacccgagccaccaattctcatgaaggggttagtggcctgcactggcaaccagttctgcggccaagccatcattgaaacaaaggccagagccttaaaggtgaccgaggaagtgcaaaggcaagtgtcagtgactcggccagtgaggatgcattggaccggttgccccaacacttgtggacaagttcaggtggctgatatcggttttatggggtgcatggcaagggatgagaatgggaaaatttgtgaaggagctgatgttttcttgggaggaagaatagggagtgactcacatttgggagaacttcacaagaaagctgtcccttgtaaggacttggtgcctgttgttgttgaccttttgatcaaccatttcggggccgttcctagggagagggaagaaggagaagagtgatttaaacttaactagtaatatctatctggtgtggggtcttctattctaccaaagtttcagcaattttcatgggacaagcaaacattaaagtcctcaaagaatagagatgatgatgaagaagagcacagggtattatttattattagcttatgctaatgtttaacaacttcactcacttgttttgttgtattgaccctgtttgaaacttcttatgcatgtaaagtaggatattgaaaccaagttttctttttttgcttggaataaaattgtaatttttaaagtaattgagaataataaaactgttatttattttcaatattcattattctaaaattttccatttatgtctttgggttagtaactctttctttttcaggtttcaaatgtattatgttagttgtaataataatttgcttggatggatagttataatttttccaatattcttctacattttctttagttaccataaatataatcaataatggtcttctactggttgccttgggtttaaaattttagtcatgtaaattcatacatatagtagctcatatttcagccaatgatgccttatgttgttatgtaggaaagagttatttaatgaaaacactaactactcatttaaattagggttggacaaattcaatccaactttttttaatggtaattggatttgaaaaattattgtcccatccaatctaattaaattggatttcttaattgtttatttaattacacagttaatttttaatattaacttaaaaataataaaaaaa

SEQ ID NO: 294943 - DNA, 7263 bp, Cannabis indica
aaatttaaatattaattaaaaatatctaaatcatataccatttaaatttaaatttgattagatttaattctgtatctactttctcattatttgtaattgttctaaatctgatcgtgcaaactcatatattaaacacaatactccaccttgaaaccgttctctgtttttaataattgggtaatgatgagtgacaatatatatataaatgtgtgtgtaggcatttatgaagacatgggtagcagcatgtaaacaagggacgggaaaagcgaggattgtgataccagcagggacatttttggtagggcctgtggtgtttcaagggccatgcaaagcttcgccaattgttgttgaggtccaaggaactgtcaaagccaccaccgacgttagtgagtactcttctcctgaatggttctcttttgaacaaattacaggcttgcttatcactggtaaaggcactttcgatggtcaaggccccaaagtttggaagttcaacgattgtgatactaaccccgattgccaacatctagctgctgtaagatcgatgctaattaattaattaataatatacatttaattattattattattattattatgttaatatattaattattaatttgcagtcattcaaatttaccgatgtgaaaaacgccgtcgttgatggaatcacatctttggacagcaaatggttccatttttttgtatatagaagcagtaacttcactttccaaaatgtgttagtaactgccccaggtgacagcccaaacacagatggtattcatttaagttcagccactggtgtcaaaattctcaagacgaccatcaaaaccggggatgactgcattgccatagtgcaagacacccatgacgtcctcgtcgatggtgtcacttgtggtcctggacatggcattaggtacgtaagtacgtcacatacccccacatcatcctcgccgattagaattattattaaggctaattatatgatttttgccaaccaatttttacatgtgtaccaaatacccgctcctaaaattttaaggtagttaaaaaagttccatgaactattaagattgttgaatttaaaaatttttgtttaattttagtaaggaaaatctaacatgaatgaaagtttaggggatatgatttgttacacgtcaaagttagaaggatataatttggtagatataaaaattagggagtataatttagtacataaacaatcactgaattagtaaaattgaatgaaattggaaaaaaatccttaaatttaaccatctatagttttgaaaaatttttaacagctgataaagttccgggacgtgatttattacatgtccaggcaaaaatcttaattagcctattatcaattgttgggttttttttttcatttttatattttaaaatatatatttttttttttgtatttttatggaattctacccagaaattcctatagcaattaaaatcgcagctaaaatccatatagcaatccacataaaaattattagaacaataactgtaaatttgaaaaaaaaagggttaaaaaatagtatatgttaccttaattgtttaattgtttgtaataatatgtaaatttttaacaatggcacacagtattggaagccttgggaaatggccagctgacaagggctctactggaatcgttgtacaaaacagcattataaatggcgcaacaaatggagcaagaatcaagacatgggctggtccaacctcaggtgaagccagtaacattgtcttcgaaaatatccaaatgaccaatgtgaaaaaccccattatcattgaccaaaactatggaaaatacaaagacacggtacgcacgtatactacatttatatatataattattacaatgaaactatttaattgtttcaattataaccattaatatatattgttggagcagccatcgaagtggaagttgagtgacattcattttaggaagattaaagggacatcagcatcgaaggtggctgtgtctcttggttgcagctcagcaaatccatgcgatacagttgaaatggccgacattgatttgacctttaaaggtggtgaagctcagtctgtatgtgctaacgcaaaagttaagcaaggtggaaccgtcaaaccggtaccctgtagcactaccggtaaaccggaatctggcgaatagcacacgtacaataattattgttatttattggagagcaagagagatataaatcggcactaattcaaaatacatacatgatatatatatagagagctcatacatgtctttttcaaattatttattcattatatacatataaacatattatatagccggcgggtatgtattcgatctcatgaggaaaggctagctaaaaattataacatcaatctctgttgatgagatgttgtgttttggtgaaattcatatatatgcatgttttatgtatacccaatgtataacagtattgtaagaactagctattttgtgttactaatattgttgaatactatcaattcatcgatgaactctgttggtgcttatatatagtcgtacgtattggaaaagttgaattgcttcgcgtgttacctattttttttaattaattattgtgctaacctttattaaaaagaattttaacatataaaagtgtttaataaaattttcttaaaattaattaaaattttactaacataaaacactttagtaaaataattacaatctggatcccaaaatctacaaaacatacttaatatatacatacacaaaagtgtcgtctaatgacatagccaaaaataacgttagtagtatctcgaagatcgcaaccctctaggcctagatgaccaaatatgtacaatcttcaccaaactcatcactcacaattgttcagccttagtgctgcctttacctatacatataagcatatctgtgagtcgacacactctgtaagaaaatataaacatgatacatcatatatttgacttgtaattgagtacccatacactcaattaccatgagtctactaaccgcatccaatgcgtataaactaatattcgaacgtttgtacttatagcatgattaaccatataccaacacctaagcttgtactctattcttactagtgttggtatcatcaatttatactatccaacattgcctaacatatatattagatatttgtgtcttagtgcaactctatgtacactcataccgttctctaatatgctagctacatggaaatatgaaacatgtatactagacatgtgcatatgaaaaacttttcttacctcaattcataattcaggtgtgctggtcaacctgagtgcaaatttgctagaggatcgaaggccctaagtcacattagtggtaaactagtaagtgtctcgctaaaacactttctatgactaaaatttataatctaaggtggcaataccctaaataccctaaaaaatacaaaattgaggtacccttaggaacccctaaccgaacaactagatttacaactaggtgcccgaaattttaggcactgccagaccaatcgtgtgcccggttcttccatctaggtgcccgaattactgcaaaaacctacaacacaaaacattttgagttctaactcctccaacctgctccaaatcatcttaaacttctcagaacagtttaaaaatactaatacaatctatccaacaacttgaaacatcaataaaatcatgagttcaccgataaagatacgagctttgagcttgaaacttaggatatcctttcaaagttactacaacagtatgatttctaatttaaaacataaaagaaatcacttcctaactcatcagttaataacaggacccaagaaccccaaatttcacactgaaacctatttttgatccaaaaaaaatcaaaagaaacagagctatgaaatcatacagttcctacaagattcccaaatgtactcctcaaattttagttccttcgaaattgctaaaagacggtttagaagaaagaaagttttcttcaaaattatgatttttctttgtcttgattattctacaatagtccatattattcttactgaaagaacaaagtaagagttatcatctagtaatctcttggcaaataccattttgccccataaacttaaactcatctatacttaatttcaagggcaaaagggttatttcttaaataacccacataactccataatttctaattgcctaaaaaaattcagtacctctaaattaaatactttaatataccactgtgatatttttgccaattcatcaagtttctactgttgccaatcataatcatgttaaatatatattatatacatatgacactctataattgagtaataatatatttgtctaatttctaataatagactttcatttttgaaatgcacatattatttcataatttactataatattagttaattactaatttttcatgtctaattatgcggtcattacaattattccctcattaaaaggattttatcctcaaaatctaatctaaaaaactctagataatgtgtcctcactttagactctaactcccagaaagtttcctctaccttgttgttcctttagagtaccttaaccaaggctatagtattgttccccagaactttattcttctcgtcgaggatctaaactggttgtttctcgtaggataaatttgattgcagctgttgtgaaaattctaacatgcaagtgcatgtatcgttacaagtaataatactcacaagagtgagtcgatcccataaggactgtagttaattattactaatcaattaaatctttatttatatttggcaaacaacttatttgaataatggttgtaattactatgaaattaaaacaataaaacaagtaggcaattaacgatgattagaagtttagggagtttaacttcaattgtatcaacttcctatggcttaatataatttaattgcttcttcaattcatgtgatagtggattaataattcaatttatattcttattaggatatatagaatctaattatatgaaaaagtcctacacttttgtaataaattacacacataatcaacattaaataacaaaattctagttgctacatagaccatacatgtactttcgtctaatatcgaaatctgtgtctattccactacaatataattaacactcacttttcaaattttgtatatttaaatcatacataaatgattggtgattgagcaattatatgcattaagcataaatgaaatagatgcacatataaaattcaagaagaactaaaatttcattaaaaccataggcaagtatcaaacaacatccattaaaaccctaattaggagtttagctcctcattgtcattgtaaatatttgattaagattaattaaaaacataaaaatagaggaagaagaaaagaactcgtcagaaatcaatagcagtagtctccgaggtcgcttttagcctccaaattcgtaccctcaaaagtccaagttaaaagccccatttctttttcaaaattagggttcaaaaacccaattagtggcaacaaggggtagcgggccacgacatgcccaatctaatgatatgactcgtgtctctaaaagctgaaaagccacgccaattttgcaaaggcagactgcgacatgcccttaccaatgatgcgaccctagtggctgatttttgggtatcaaggctcatcttctgtaatgcctcaacatggctcccttaatgtcgaggtccgcctattttctctgaaactcgacctagttgtctattttttctacaagagcgctctgacattgaatttttatgacatggcgctactccaacatctttaattctctttaaaggcttcaatcacaaaatcttctaaattattccacggatagttcttttggcacactagtgacaaaacttcaatgaaatcttcattttttacactatttttttcaaacttgttcactttcctcttcattaactaaacctgaaaacataacaaaaactaaagcataaaattgaacaaaatgacactaaaactaattaaaatgctcaaaaacataacttgaaaataacataaactagaatctaacaataactctaggatttcatagcttaagacatgggttggatctgattacactttctcggcatttacaagtgaaatacattgtgaactccagaaaatgttggaggtaaggctaatcggtatgctgcctggtcaaccctttctagtatctcaaatggttctataaacttagagctcaacttgcccttcttacctaagtgtttcacatccttcatgggcgaaacccgtagaaacatatgatctcttacttgaaattctacatttatgcgctttggatatgtatagctcttttgcctacactaggaagcaagcatttgagcttttattttctcaatagtatcattagtcctttgtaccacctttggacctagatactttttttcttaggtttcatctcaatgaactagatatctacattttctacaatacaacatatcataggggtagcctaataattgttgttgtaggtgaattctatccatagcaaatacttgctccatgaaccatcaaagtctaaaacataggctcataacatattctgtagtatttgtattgtcttctcggacgggccatcggtctaaggataaaacgttgtattgaactttagctttgtaccatgcctctttggagacttttctagaacttgaaagtaaattttgaatctctatctgatacaatggacttcaaagcttcatggagatgaactattttttacatacaattttgaatactagaaaagaattgtgttaatttggcaaaacagtctacaatcacccatatcgaatcatacaatcatgtgcttctagacaatcaaactacaaaattcatagtaatgtcttcccatttctacttgggaagtttcaaaagttctagtgaacccaaaggtctctaatattcaacatttatatgttcacatgtcaaacacttatatatttattctaccacatcctttttcatatcggaacaccaataaaagagtttcaaatcctgatacatcttgattttacctgtatataacaagtaaaaaatggtgtgagcttcatttgagatttccttttacgctctcatcactagccataacacaaacctcattcttgtcattaaatatttctatcatataatttaggtggcgtttggtaacaactttttaatcagttttctgtttttaaaagtagaaaagtgaaaatattt

SEQ ID NO: 294944 - DNA, 1876 bp, Cannabis indica
ttttttttttttgtatatttctcatcaatggtatttaaatgagacccacataaagatcaaatttacaaattgaccccaatttcattaatgtttacatcatttgcaagagagagacccaactaacttttcaatttaatcctccaaataaatttcagaaaattttcccaatttttctatctcaaacatttccaacttcgccgagaacgtgaaattctccgatctccggcgactgtttacgtgaagtgttcttcactcactttctctccttaccttgatcgatcatggagaaacttgaatcaagattatcttatttgtccgatccataactttttgttattgtttttggaccttgaatctgaaaatccaagttaaatccatggcgtcgaggaaccggactttgcttttcaggaagtatagggatgctttgaagagcgttagagcaccaacaagcttatcggcttctacgagctctggcggtggcggaccggtgattgagttggccaatacgtcgcttttgaatccgaatcggtcttatgctcctctcagtactgaagatccgggtaattcaaggtgtcgtcttctttcaattttttagtttctgtcaaattccgtggaagatttgtttcaaaaatttatattgaagatatgaaatgtaatgctagtaattcattcctgttttgctcacgatgaggacatttgagagaattagagggaaaaaaacctgactttgtgtaattaaatggtgcaaaaagtttttaagctgagttatgcttaataatgcaatttagtttagttgtttatgagtatgcataatgccaattcaaagccattgaacattaaaaaataactccacatcgaaatatgtttggatttcgtgaagaatcaaaatgtatggagttatttattcgaaaacattattaaaggcaatgagaaggaagaaaacattgtgtttctcttcccaatctcactaagtagagactcttcaaaacttaatttttataatctcaccgagatttctgttttttttttgggtataatagtgcttcatattttggtaaagtctgttgtttgcacttgctttcctttcaagattgtagaacatgtgataattagatgttgggaacttaggaatggtgcaagaaattccagtccttgaaagggtctcaatgatcattcagacgattcaatttttttgtccacatgttcaatggcagccgctgggacatctcatttggaactttgttctttagtggtgatatgtcattttgattcctatatgaaagatgttatctattgaataacatccaaatagcctgtatttgggacaatccttttgatttcaagttgattgtaacttctacaaaccctttctgcatcagtctagtcaggtgccagatgttcatctggaggatggtgcctgaacttggatgatgatatcttattatcaggacatatcaatactcttctctataagaatgaactggaatgttgaaatgtacaattgctattatagattacttcaaattaggaaatatctttgatggggactagtgtttttattaatgcagtaggggtgcgcttactgttggtctacctcccgcttgggtagatgtatctgaagatatatcagtaaatgtgcagcgcgcacgtgtgaaaatggtcgaactgacaaaagcccatgcaaaggccttaatgccttcttttggggatggtaaagaagatcaacgtttgattgaagcgcttacacaagagataactggtttgataaggaaatcagagaagagactacaaagactttctgcggctgggccatctgaagattcaaatgttagaaaaaatgtgcaggtataactttgtttcaagcattcaagcaatt

SEQ ID NO: 294945 - DNA, 1618 bp, Cannabis indica
caaaacatctccattattacctagtacgtacttttttctctctctttcagtgtctttcgcagaaaacttttgtctgtctcttgcccttttttagttaagtaactactactccgataggtgaagtggtgatgatgtatcttaagagattgagaaacgattatatatattctctgaaagagttgttaaaatcatcaaacaataatttgctgcgacatcgtttttagccgggttggtgcactgatcgaatacttgagaaccaagctgatttagctcgaacgtccaacgtcgtttgtgcaaaacaagctgtcgttttggccagaaactcgttattttttgcttacttttcttgcgtattacacaaagtagtagttatccgtcaaagcattacactttttcaaagctaagctacatataaatatatatatatacacatataaatatatattattaaaattataaggtctctatctatgtagatagatgatactaaccgattttgtcaattgggctaagaggtgagtgaccagctcttggggtttggtgcaaccgtattgggtaaagtacacccgatcccagctaacggaaccagaaataaaatagtggcttacatttggtcatccaatctggcaattccaccccaacttgaaagctccgtgaaaaatttaattggtcaatgaattgaattgacattgacaaggtaactaaacgctaaccccactcctttagcattaatatatttaattatattgatttcaatggtaatgatgatattgtatgaatactgagaattaatgttcatttacctacttactatgttaagctttaatctattaattatgtatttatactaggaatgcatgagataataaatttttaattattttcgaatagtactatccataatatatgtttctatgtaatgaacgccactatttcttattatgttcataacacattaacttaatacgtactttctacgttatgaatttaaaaagattaaaattatttgtaattacgcaatgttaatatatggtgggaacaccatgaattttacggccggtggaatacgacatataatggaatgtattaattaattaaccggcaacaatattaatatattcgatatctagttgagatatatagttttctgtaagcaaaagattttagatgtggatagcatgattatgatgcatgtaagagggtatagtttatttaaccttttctctccttacaagaaaaaaaaaatatacattcttcctataattttgagcattgctattaagtatgttaaggtttccaatactatagtgaaatgaggagtaaaatatattaggagaccaattattaaatatttataattactacaaacttacttttattcataacaaaaattgtgactaaaagtgaaaaaattatgattaattataaatcatcatatgttatgattaaaaggtttgtagctaaaatttaacaaaaaaaaaaaaaaaggtttgtagctaaagatataagtcacaaaaattataatgtattgtgactaaatgtatttttaatcacaatacttattatgacttaaactaaaaaaaaactaaattgaagttttttctattttaggttaaaa

SEQ ID NO: 294946 - DNA, 10724 bp, Cannabis indica
aattcatattaggatattaatgaaacatatttgttagtaaatctagatcctagtaaaaatattacccacctagcgtttcttacccaacatgcaaaaaggggcaaaatcacaacaggaccatctgaccgctggtttggtagctagctttccatcgtgtggtgcttgatcagtgtaagatatctcatgagggtcttgacacgtgtcgctcaaaggtttgtcctttaaaagtaattacctagacaagtcgttagacaataggcactacaaagcatatatgcgcacaaccacgatctgacgcagaggacaagatctgttttggtgtttaaagatatgcaaccgtagggcttagctctggattaggcattacagagtttctggctaaggtcttcctcggctagccagttcgctatcatgttggagcgtatgcgactcccattcactcacagtagcggaagctttcgatgagaacctccagaaccatcgcgacctttgctggagaagtattttttccgagtattatagcaccttccacaatcttattaagggaaagatttatgatatcaatatctaatctgacgtggcacccttccgtaattttcacatagaactcatcctgaaataggaataataataactaaatttttaacaatacaaataaaaaatattaaaattttaacatcaatatatatatataaattatcaaagtgtttatattaaattgtttaaaaaaaaaaaataatacaatatatcatatttgaacatatatgaaaaaaaagcaaaatttatattgtaaaaattagtaattttataatatatagtacggtttggttttaactataatttttaaaattaaaatcacaaattagattgtagcgtctgatttagcaaaaatgtaaattacaacgcccactgcaaaatattttaatctgcatttttttacattgtaattcggtgttggtagtttgtaccgtgtaagcggtttgatcaacaccctactaccacttctcttatatttttttaaaattccataaagttccgagaattactcaagaaactattgtacataacattgtaatggttatgcttatcatgactctttcttcgtgttttaaagttaaacaaataaaattcacgctttgggtggataattcttaccagtacaccacttattattattttgtttttaaaaaaataaaaacataattgacagacctttaattatgagtactttgtttgtttatcaatattctgttatgtacaaaaacatctaaaatcacacttctattttattaagtgttttttttattattatttatacggatattctttgttcagtttttttaattacatttttttgaaaaacattattttcatattgccaaaaaaaaaaaaaaatattccgtgaaattgttaagaatattgtaaatccacatttttataaatattttatcgttttggtatttctaaaataattctttttgtttttgtttggtgctagtgtaacactcgaagcctcacttgtattctagttccaaggaaagaaaagcccaaaacaagaatcttggaggctcaagcccacataattaaggtcgacgaaggtagagcacaggacaggaccacatcagaaggataaagaggtccacgtggcgaaaggtgggtaatcctgtcagcaacaaaactcaaaagcctgctttaccttcccttcccttgtgctaataataataatcaatcatgagtagctttttcatccgcaacaccacctctaccgccctcctcggcggcgccccactacatcaccaccagcctaaaatcccaccgatccgggccagctcagaaaacaaaacgacatgtcgtcgaagcatcgtgaccacattcttagcagcgtcgttgggcatgggactgagttccgcggctacgacaccaatggcagtggcccaaaattgggggacccgttcgttcattaaggaacgattcttcgagcccgggttgtctccggaggacgcggtggctagaatcagacagacggcggaggggctccggagcataagggagatgctggagaacatgtcgtggaggtatgttctgttctacattcggcttaaaacggcgtatcttaatcaggatctcaagaacgccatgactattttgccccaagctcgcctcaaggattatgtcaaggccgctaatgaattggttgataacatgtccgaggtattactcatatatctccttaataataattaattataactttgtttgtttaaatctttaatttcataggactaactaactttaaaattttggttggatgggattgtgattttggttattattattttttgaaagagcattatttcattggttttactgattatttgacttgtatgagattgtgatttttagcgatttatttttttatgagattgcatttctttcctttttcttttcctttaataatttgttattttctttgtttggtttttaaagctggaccatttcgtacggacgccaaagatttatgagtcatacctttactacgagaagaccttgaaatcaatagacgatgttgtggcattactatagctaattagccatgtatacggaactctactcctgtatatgtttttatacttctcttacttctatattaattttccgaagcatttatccctcttcattcttctatagcctatcttattatagtttttaattataatgcatattagatagcaaatttgagaacgtatataattgatgataaggtaaagaccacattccataattccatgtttgacaaattacatcagtacgtacgctcgattccatctcttttgtgaatcttattttttgccattaaagcaaattaaataacaaacagagatttgtaatcattaaataattaggtaggtagctagcgtcgagagatgacaagtgaagacaagatgattaggatgatgaagagaactatggcaaggtaagaaccaatgagagaacccgaaacgcgttgacagaagctattgaattgtctgcaaatcggaaaccagttagcaattgtgttcccatcgtgtgctaagctcactatagctgtcgcagctgaagctccacccattaatacacccattattacctgtttcatcacaatataacttcaaattaattaattaatgtatatatatatataatactatattataattatttaccatcctcgatcaatatcattcttcttaccaagtcgaatacaatcaagacgattctactatttatggctttatatttgacgatgtgtaggaaagagatagtgagtgagagaagaagatatccgaacgcaatagaattcgcaatcacaaaaaacctacgaattgcatcaattccaacatagaaacgtcaacattaataatagatcaactaaaacattgtactaaacattatatattatagttaaaaaataaaaatgtatatattaagaacgatgatatgtatgtatgtatgtaatgacgcacgtaaatgtgggaaggtctttataaacggccttgaatcgaacgaagcgagtaacaaaaggaagtgtttgtttggtggttcccatggcaatggcacttgctagggttccaagggctgcaagtactctcagaatgaaatctagtatcgatagcccccggcttacacttcgcctcgtggttgactctattgacaccttgccggtttccacttcttgatcaactacttgagctgccttcatgattttctctaaaaaaatatttataaaattggatataaactgtttttgttctagcttattgttttacacttaattatgaagattgatttagattaatgtatgcatttatacaatttttcagggaccgattaattaataagtatcaaaattatttagttatatcaaatataaaatgttcgaccagtaagaagccttctaagtggagaggttgatttcgccaagctttcaagtgtgtgtgtgtgttttttttgtctaatgatggtgacatttgtcatatattaattattggtgtggcgtcacatatggatacactatatttaattatctatatagtaatcactgtacatatcagtagagtacgactcctaatctataactggttaagacctcgaatcatgggatggaacatttacttattttcacacatgcatactgagtatatactctatattattaaacatctcgatcgtgtgtattgtataaaaatagctaagctttgttccaactccactaaaatttaaaaattatatccagggagaaacagaaagcctaaaaagtgtaaaaaaataatttgaggaggtcactaaataaaattttaataaaaaataaaaataaaaattacaaaatcataactgaaaaattaaaacatatatatatttggtggcataatttgtatatatacatttgtccgtttagaagcgtcacataggtttatgattaaattatttaattctatctcacaaataaatatatacaaggactaaacggtaataattgcattaatattaccacgtaccggggtcgacgagtcctaggatttctctgcgaggcggctatgtattaatccctttcttgtaagggtcactacaacaaatatacttattaagagccactaattttggggcgacgtaatgtcacctctaataatatgggtattagggcgactttaatttgtcgccgtaatctgatttttttttaatttgtaaatcgtatgtcgcccctaaaacttgtagaggcgacaaaataaagtataagggacgacatcaaaagttaaaaatagtagcgttgattatgggcgggatttgtcctgctcataacatagtctgaaaagctgtcagattccccttttagaagcgacttttaggggccacatatatcactcctaatactcaataaattaaagccacctgattccctttcttcttcattttgcctcttatatttttttttgaaaacaataaaagcttaattaaatcaaatcttccaaaacaatagaacaataaaaagtgggtaaacagttcccactaagaacacgatcagcctcgtgaagagaagcccgcgccaaagcatgcgcaagaccatcagcagaccgtttaacaaaacaacaatcaacattaaataaagaggttaacaaacctctacaatcttgtaaaacaaagccataaggagaagctaaagttttagcattcttgatatcattaataagcgtaagcagtcggactcaattatgacatggtgccaatcattcctctttatccaacttagagcttctttcattcccattgcttccaccattagtggactccacacacctttcttacacatttgaaccgcttcaataacattgccagagctatttcttgctacaaaaccaaatccgaaacaggtctcatttgagaagatggcaccatccacattaactttgatgaaagggtcaatcagcttaatccaatgctcaataaatcttccttgctgaccgtgaccagtaggagatatgtaggagtttttttgagcattattccaagacacaaagttaggagatgcttttgataccacttcctcaatagaagattgtttagagttccataccttgttgttccgattactcgaaatagaccaacatagcatagcagtgccaagttgttcatccttgttccacagctttaaaccttcatcaaaccagcccgcgaagcttgttgcaggtgaggggaaacgggatatagcagtagcctgccagcagttgtgagagaaaggacaatcaacaagaatatgcaatatggtttcgacaacaccttggcatattggacaattgacattaagggggactttttttaaggacagctgaaaataagtggggaggcagttggaacacgcacgccagaggagatttttaacttttgggggtacttttagttgccaaagacagcgccagaaacccgagttatcaggttgatcattcgatgctttgttgtcttgaatcatctggtatgcacttttaacggtgaacagacccgtgtgctccttacaccagtaccatttatcttccttaacagaatgacttaaaggaatggacttgaccaggttgtagtctcttgctgaaaggacatcattgagtatctcatcatccatttcttttgttgaaatctttaacagagctgcaacattctgattatgaagtgccggatgggaagactcaatataagggtgttgctcatcactaagccatgggtctttcaatatgcttgtagttagacccgatccaatacaccttcgaataccctgtttaacaaccgcttgagcttcatgaatgcttcgctaaacatagcttggattgctactaatgtcggctgagagataattccccatgggataatatcttgctttaaagattcttccaaccaaactatcctctttctcaagtaatcgccaaccttacttggcaagaagagtaacgttaaaatctctgaggcatctaaaacccatgcctccttcttcttttccacgccccaatcttttccaattcatccagtaaattccattatcttgattcgccttagatctccaccagaatttactcatcatgcgttcaatgtccttacaaatctcatctgttaataggaaaacattcatagcatatgaaggcagcgactaaagcacagatttaattaagacttcttttcccgcacaagacaagaacttattatcccagctttgtattctttgccgaaccttgtccttaagatatctgagaaccgcattcttgttcctgttcataaaacttgggaggcctaagcatttgctattttcactagcaggctgaattcccatttttgaacaaataagagttttcgcttgacttgttgtgttgtttgaaaagaacacagaagacttggcatatttaacttgttgacccgttgttttctcaaacaaagccaagagccgaaacacttcattagcttctctatcagttgccttgcaataaatgtaactatcatcagcgaacaacaaatgagagattacaggagctctattggccactctacacccatgcaaacactttgttgcttcaaatcttcgaatcatagcagataaaccttcggcatagatcaagaacaaataaggtgagattggatcaccttgtcgaatccccctagaaggcacaatcggacccagattaaagccaccactcaccacattgtaacgcacagttgtcaagcattgctgaatgagcaagatccacatgttgtcaaagcccatcctagccataatggcaaagaggaaagaccactccacccgatcataggctttacttaagtccagctttaaagccatatacccatcacgacccgtttgttttcgcttcaagtaatgtagcacttcaaaggcaatcataatgttgtctatgatcaatctccccaggataaaagcactttgattcattgatatcacttgatcaagcagatgtttcatgcgattagcgagaactttcgtcataattttggagagcacattgcaaagtgatattggccgtaaatcactcacacggtctgggtttttcttcttaggaataagcaccacgtttgtatcatttagtcccataggcatcaacctagattgaaagaattgttgaaccgagactacgacatcttgccccacgatgtgccaatacttttgatagaatgctgggttaaccatcaggacctggtgacttatcatgatgcatttgaaacaacgccttcttcacttcactttctgaaatcggtctaagaagctcttcattttgatgggtcgttatcaaagaatccacacattgtaaaacatcattccaatcagccgaacccgccagaaaaagctcctcaaaatactttttcataacattagcaagtccattatcccaagagaccaacaaaccattttcatcccccaagctagagatttgattatttcatctacgcttattagcggaggcatgaaaatacttactattcttatcacccacttccaaccataattgtttcgaacgctgcctccaaaagatttctttttgatgaagaatatcgaacaattttcgccttgtttccttgaataggcagatgccctccaaatctcttctttttttcaacaatctaagctttttgttgtagtcttttaattgagcagagaagtttcccacaccagtgttaccccaagcaagaagagcttcaccacagtttttttatcttactttggatatcagcattcacaccatccccccaattctccctaataatctgctcacaatcaggatttcctaaccagaagttctcaaaacggaatggtttcggggcagtaccagaattttgaggctgaaaaatccaatagtaacggggagtgatccgaagtagacaattcaagattatgcgaaagagccatagggaaaaggtctaaccagttttgagacacaattgccctgtcgagttgagcttcaatctagtgagtagtgcctcgacttttctcccatgtaaaaggatgcccccgaatctccatatcacaaaggttacacgcatgatgggtttcctggaaaccatcaatgagccacgaggggtgcggccttccaccttttttatcttcttgactcaatacattgttaaaatcccctataagaacccacgggtcaggggattcttctttgagagtttgaattagattccatctaagtctcctttgactttggtttggttcaccatagatgcccgacagtctaaaatctggtgtaccactggtagaaacaacacaatctatatgatttttggaaaaaaatatttactttaacatcattgctattttgccaaagtaaagagagcccaccacttcttccttgggcttcaacaacataacaaccctcaaagcccatttgtctacttaccatctccactttctttttaacaaagtttcacaaagaaaaacaatcataggcttatttcaacccacaaggtcttttaggaactaaatagtccgtggcggcccaagcccacagcagttccaactcaagattatcataatgattggcgagccccattgccaaggcccgcctttgtagagttttttaaaagcccattattaacctgacccatagtcaaatttccatcatagacactaccagccacactttctctttttctgatccaatacaatcaatacaccattattctctccatctaatattccatcatcatcaatctctttaactctaccattctgattttgtccagaagtcagccccctggcgatccttcctcacgcccagcttgcatcattatggcagggatatcattttggctagagtgatttgtggcgagattgttggagtgtgaagtttccatattttttgctgaaggttgaccgtgttcttcccccgctctgatgttgactgactctggctaccaccccttcgttctcagccaccttgaactaatattttggttatgtttttaaaatttagcccgcataaaaaaatccccatacggtttgataatggtctcaataggttcatgataaagtcttctacaaaacttctctgaatgccaatcaaaccacaactgtaacaaaaagttagcaccctttcatatttaaacgacacccaaaataccgaaccatcagtcttagtgcattggaaccttccacgtaatggtttttcaatgttaaaggtgactctcacccgaaggtaatccctccaaactcctaaaaaaaattttggattcatttcaacaaaagaacccaggatattacctatgttttccacaaaactagatgtcatgcatcacggcctaacatcccagatttgcacccacatattaagcttgtttagcgtcagacttcgtggctccaccccttctcccagccgttcaaagattaattgcatccgattaaatgtccaagggctcccttccactaccctttgaatatctacttcatggtagaattgaaatagataaagattaggctgtagaagtttgacaaacatgcccatttcaggttgccataaggcagccagattgttatgtataatctcaaagtcaattgttcgagatgataaaaatttacccaccaaacaccatctcggatcaatgccatcatcctcatccgatccttcaactctaatacccccatcattctcatcttccactagtaatctgaatgtttcttcttcaacctccctagaactccaactacaagacgccattctagcaacacagaaatcgaattgaacaataacgaataacctttttggaaccgatcaagaaatccaatcaaaaaactagagaaaacaccatgtcaaaagacaagaccttaatttttatagaaatatttttaacaacaccgttatgtttttctttatttaaagtgatagtgaaaataactacttatttatgaacaacaaaagaaagagagaaattctattctcactaatagtcaccattttgcctcttatatttcacttctaaaaaaacaaaaaaccaacatttcagaaaaatccactcgtcttctccttccttttcatcttcaccaccatgttgttgtccctgcaccactgtgcggtcgtccccgcaccaccgtgccgtcgtccccgcaccaccatgttactcttcttcttccttttcattttcaccattaaaaaaggtatgtttttttatatttttattggtttagattaagttatttttat

SEQ ID NO: 294947 - DNA, 5512 bp, Cannabis indica
tttagcttcttcgagctattttttcatggtgtctttgagtgtcttgttgactgctttgacttgcccatttttttgagggtgttctactacggagaaatttttaatgattccatgtgtcttacaaaaatctgtaaacatctagctatcgaactgtttgccattgtcttagacaatcttgtgtggaagtccatatcgtcatatgatgttttttactacaaaatctaataccttcttagatgttattattgccagaggctcggcttctgtccactcggtgaagtaatccattgcgaccactgcatattatactccacctttgcctttgggcaactgtccggtcaggtttattccccatatggcaaagggccatggactttgcatatgtattagctcatttgagggcgctcgaggaatctttgaaaatcgctagcatttgtcacactttttcacatgggcctttgaatcttcgatcatagtagcccagagatatccttgcctcagtattttctttgataaactttgccctccggcatgattaccataaaatccttcatgtacttcgtacaagagtcgtgtagcttcttctgttgtcacacatcttaacaatggcatggagaagccccttctttacattataccttccactatgatgcagctttctcatcattttttgagcctcgtttctgttgcttggaagttttccagtgttgagataagctgttatgggagtcatccagtttggtgtagtatctatcatttcgatttcttcgacatagggatactgggttcttccaaaaattgaattggaataaggttggccttatctgttaccgtgttgctcgcaagtcgtgccaaggcatcagtagttgtattttcttcccttggaatttgcttgagggtataacccttgaattatgcaagcaggtcttggatcttactaggataagccatcattttttctgcacgagccatgtattcccctaagacttgatttaccaccaactatgaatcactgtagactttaatatattcagcatgtacctcatgaacaagctttagtcaagctatgagtgcttcatattctgcttcgttgttggagactttgaaccccaattaattgcttcgtgcagaggttgccctcaattgtgatgaggacaattcctacaccagaaagctgatcggtggctgatccgtctatatgtaacttccagatgggtttgtcttcattctctttttgtagggacttctgttgtagtccttcatctggctcgggattatcttttagattatctgcttctttgcccgtgcattctgccacaaagcctgccaaagcctgccctttcactgctgtacagggttagaaaattatctcctagtgacccaagtagccgtccagaagcatcaagcttttgcaaaacttggcgtaaaggttggtcggtatacacttgaataggatgagcttagaaataaggccttaactttcttgtggctaagatcagataagttagcttttcaattaaaggatactgaccttctgcctcaactagtcttttattaatatagtagactggatgctggacattgttctcttctcttatcagcacaatgcttatggtgtattcagtgactgctaggtatatccctaattcttctccgtccaaaggttttgagagtatgagaggttttgcgagttgattttttaattcttggaaagcattttcacattcctctatccattcaaatttcttattagctcggaggatgttgaagaaagaaacacacttattttttaattttgaaaggaatgtactgagtgcagctatctgaccagttaggccttacacctcctttacttttgttggtgacttcatatccaggagggcttgtattttctctaggttggcttctattccttgagcattaacaataaatccaagaaacttacccgagctgacctcgaaagaatactttaatggattgagtttcatgttgtattttttgaggattttgaagcattcatccagatcctctattcgcccccaaccttcctggatttaatgagcatgtcatccacatatacttccatgtttcttctgatctggtatttgaacattttgtttactaacctttggtatgtagctctagaatttttaagaccaaacaacattactttatagttgtataaacccatgtctgtttagaagcttctgtgttcttggttaggtggatgcattctgatctgattgtaccccgaataggcatccataaagcttaggatttcatgtccaactgttgcatgcactagttgatcaattcttgggagtggaaaacagtctttgggacacgccttaatgaggtcggtgatgtcaatacatactcgctattttttgtttggcttgggtactagtatggggttagccacccaatccgggtagaaagcttcaataataaacttgtttgtggtgagccttactacctcttcttttagtgcctgcgcacgttctttgttcagcaaccttctcttctgctagatgagacggaagtttggatcaatatttagggcatgagacatgacagcagggtcaatgttgaccatatcctcatgtgaccaggcaaaaatatcaaggtttgctcttagaaattttattaagggtaattttacttccaacaacaaaccttcactgattttgagcttcctgatcgggatggttggatcgatctccacttcttctaactcttctactggcccaacatttgcatttcattccctaagttggggatctatgtcttcgtccccaccttgggtgaatttctattgggcaatgcctttccctttctctgaactctggctgaaagtattttcctttttgaccttagatagagtaaggttgtagcattcttgtgcaatcctttgatttccctttagacaatccactccacttttagttggaaacttaacgcataggtggaatattgatgtgataactttcaagtcatataaggctgatcggcctaacatgacgttaaaagctaaagggacatcaatcacaaagaactgtgctattaccattatgctcttcagagcttgttctactgtaagtggtaagaaaatctatctaagtggcgctacactctagctggagaacccgtagactagttgggtgcaaagaatcaagtctttaagttgtagccccattttttcatatgttgtcttaaatagaatatttgagaaagcttgttgtctaccattgtaacgccctgatacttaggtgcgctacagtaatttttcaattacagtgccacctttgttaatcaaaggattttttcttaaaaatcgtgtaaaattaaaaatttagatttaattgctaaactttataaacttttaaacatttatttacaaaagtcaggatctcgtatttaaacttttacaacattatccaaaatatatatttagtctggttgcacagtgactacaaaataaaaaccctaggtgtcccgagactgaacactccaggtcgcactgccatgacatgtacaaacaccatcctagcttgaagctcactcctgttcagcctttgcctttccattacctacacatggaaatatcaactgtgagtcgacggacttagtaagtgttaacgcaaatatttgtttgccaaaatttgagcctcacagtgataatttcacacaaaaaaaatgaaagaagtaaagtaagagaaatgaacacgaaggattttttacgtggttttgcagttaaaattctgcatagtccacgagtcaatcttattagatttctcatgttcatgtatcaagcaggttcaaagcagattagggaatctatttatcccggtatttaagttgtgtttactggcgcatttcacatgtgcaccggtaaaaactcttttaccaacaaagattcactgacatcttttgctggcgcgtagcattgccgtgccggcaaaagtaccttttcttgtagtgatttgtgcacaaatttcagttctagaactaacacttagagggaaccaatattcgatccattaggaaagataggattttatattataaattaagttctcaactatccatattattagcttcccaaaacagaagttgtaagaatcatcttctctgaaaaactttaaatagtgaatcaaattgaaactaataacatgaacatgagttcatgatttctcaagatttaggtcgatctactaattgatcattattgtgatatacattaggtctttatagttaaacgattagtttgataaagataacttaattagatttcggtcctgtcatatataatctctattatatacaacaaagatgtccctctacatcagcgatttgaatcaagattgcttgaaccaaataacgggcatcggtgagccatactagcaactgttgataaatttttttataattttaatatgttactgactattttattcataactcgtgatcttaattctctgtacaatacaagtcacagtctcatatatgaatacaaaaaattcaatacttatatctaaattattaataaataattaaatattcaaagatatatcacattgttcaacttatatttataatcaaaatatctttacatgcttttcaggacataaaccctaacaatctctcacttatcttataaaaaattggcatttatcttaatctcatattagttacatgtgccataaaagactttgcatgtagcgtctttagtgtctttgtaaacggatcatctaggttatgttctggcgcaatcctcaagaccatcacatcacgtctttttactatatctctgaatagatgatattttctttcaatgtgcttgcttttcttgtggctccttctttccttggagttggtcaccgctccactgttgtcacagtaaagcacaagtggtttttctaacttccaggtcagtgtagaacttcttcaaccaaactacatctttatctgcctcacaaactgctataaatttgtcttcgatggtcgaatctgcaatactaatttgattaatatttcttcagactacagctccaccaccaagagtgtatactaacctaaatgtcgatttacgactatttctgtctgattaaaattcaaaatcagtatatttaatagaatttaactctcctttgaaatacacaagcatgatatcttattctctaaatataagttattatatatttagtagtatatatattatgaggacttattttaatttttatacattgaaaaaataaaatattgatatgaatagatataaatacttttattttaataatatttttaaatgagtattctttgttatagttttagtgaaaatatttagaatatgaaataagaaaataagatatagtattcttttgtaaattcttgaaatattgtttttcaaaataatttcaaaagagtgagagtaacttattttattaattttaaagtagtgtttaaatatatatgtatagacttatttaaataataataataataataataa

SEQ ID NO: 294948 - DNA, 1881 bp, Cannabis indica
ttaaaaaattaaaaagtaaaaactaattttatataatatgattttagaaaattatttttactttctaaattttaaaaacaaaaaactaattaaaaaagtgttactaaacacaatctaagagtatttattggtttaatattaattttaaatttctttgttagctttaatataatatactttatttaaaagagttttttttttttttgaaaaagtatttaacagaatattcctaattagtttttatcccttatctaacaaaataattttaattaatttttaaataaagattaaatctgtctatctagtgtaacaaaaattcttgttatcttttgtaattctaaagggataatgttgtattcaagttatctaaaaggaagtgcctgagtagggttctttgaagcagtttttcctaagtttttctgggtttttttgtgtattttcttccacttcttcttccccgtctctaccatgatcactgttaactacccactttcacattcccctcttccccagtatcatgctattatcaatcctacgaagtctctattttgttctaaacctatatatattcaccatcttagcctctatgatttatacttgcgctttctattctctttttcgttcttcgcattttgtatggattctattataaacgaaatgaactcaactcttagtctgtcagagaaggagagacttatgcatactctctcggaatctgacctccatgatcctcaccattcttcaaaaaaattcttggtgacaagatgtctttccaattctattaatcccagaacctttatcaaaaaaatgggagaattctagagcaacaagtgtcgttttgaagtagttgtttctgagatgcattttgacctttttatattgaccatggcctgagcaagtgacaaacggtgaaccatggcatttttttcaatcaaattatcctccttcactcaccgtcttctttttagaatgtcacaaaggaggatttgttcagagcacaattctaggctcaaactcatagacttccttttttaagtaagtcaagggctttagcaaggaaagtgggtgaatgggttggagaattcatcgaagttcatgaggattcactccatgaaggttggggatctttcatgcgtactcgagtttggattgatgtcactcaacctttaatgagaggcaagatggtcactctcccaaaggttcgtgatgaacattggcttgagtttcggtatgagaatctccctattttctgcttccattgtggcattttggatcatcctttcgagaaatgtcatgcttttctagaattggtggataatggtgtggatctcgatcttcattatggtccacaaatgattagggataaacttcctaattcaggttatgatcgataccgtaatgacttctcaaaggctaatgcttaccccttcttaacctgattggctaggaaaacaattgcttcatccatccctgacctttatactcatccaaatttagctattggaactacaccacagccacaacctctcacaatagcagaatcctccacaccagatataactgccacttccgaaaaattgtcttgtcctgaatttcccttgtcttttccttcttattttcatctatttggtgctctttgagtccgaattctagcgtggaacttgcttcaaacaattctcatccttgagtcaccttctcaaaaagtgataacaatatgttatccacttctccaattgttaccataccaaaagacactactactaagtgcattaatgagattagcactactacaaagaataaagggaaagctgttattattttggaagagagccaagtgttaggttataattagcctatatttcgggtctttaaagttagcat

SEQ ID NO: 294949 - DNA, 9184 bp, Cannabis indica
atatatatatatattacattgtatatgtttaactaactgaaaattcaaactaaactgaaagtacctcgtcaaccaaaaacatggaaactctagttcccttcaccttcctacagtactattatatatataattgtttttgcttaaatgttaaaacatgagaagtcaaaatacttaaaaaataattataaacaataatcaacttaatttattcagtgtgcccatgatctgatttgagtatcgatatcattcgtgttatggactactctatctggtattattaatactaataaaaataaaaaattagagttaataatgtgattttaaattctctgaccattgtaattagctctcctcatatttataagctaccccttttatttagtctcaccatctttagttatgttagcacgtttgatcattgagagtcttatccctataaatatatattatatgtatatgtatatcctgatgatctcatggatgatcaaaataatagattacaaatataatttgaagtcttaccaggaaagataatattgattatatatattagcaccttttccttccaatctttataatataaggacagttttcatcattacttgcttgcgatcatctcaataattttaacaatatcgagatggcacacaccacattcttcttctccatcaaacaacccatattttttaaaaataataaataaataataaatgtcagactaaggcatcgagattcgtttatgtaaaaccccacattaatgttgactactttgactactattgttttacactatttattatgtgactaaacaaattttactactactcaactacatctctctctctcctcctaaagaaaaagtgcattctatgtgcactttttgttaagcacaattaccatcatttcttttcttcatctccttctagacaaggggttttgaagaacttctcaatttctcaaattaagaccaaaagatccaagacttaatgttacttgttacttttatcttttatttatttaatctttttttggggggtttgggtagatctaaattgttgttagcataacagataagcacacaagaataaaatcaaatactgtatcccaacaccaacacacttttttttttatatatatatttatataactaatttactttgtttgtaccccataagatttaattatataattacacacatatatcaagtatgttgatttatgtccgtttcacatgttattcataccttcctcatttttttaatgtactcacttctcatacatacattatacatatatatacaagtataattaatataaatatatatagttctcaactccaaaaccagtcaaagaaatatattatagctataatatatccctataataattaatatatatatatatacacatctttcaatagtaataagcgtatagtactcgaagattcaatttaacatttttctcctaattcaatccaatgtaattagtaattggatttaaaaaattattatctgaaccaatttaattagacttcaaaatctaatctaatttaaatactaatgggattggattagttttctaattgaataccaattacatatctaaattttaatattagcctaaaaacatgaagaaaaaaatatacataatatcatcattcatttaagttttatattccataacgatatcatcctttcaagtttaatacaattaacaatttagaataactaaaataacaatattgctaacattgaatggagagacgtgcgtcggaactgattctctcgatgaggatgatagaaagtgactcgaaagcctgcatctcgacctcgaattgaggagcccccttcaaaccaagaatgtcaaattggtaatgaatctgagatatgagaagaagaacgaacgacgatactcgtggttgaatcaattcgttgggatataaagatttgaggtcgattgcaaagtcagtgaatggtgcgaagagtgattttgagactgcttcgaagacgaattgggctgaggaagttgagaatgaagatttccaattaactgcacaaaagcactgggcgaaacttaaggaaggacaacaaatcaataccgcggccaagcttcactatgaggaacctataatcaagtctggtataagagttgcaaagctagatttggaagagattacaaagcaagcacataattagagctcagctgttatatgtatgctgatgggggttagtcccccttttgttgtgtttgaaggatttgtgaaacgtaattggggatatcttggtattgaaagggtggttaggatgaatatggcactaacaattgtgacatttaaggatgaggaaactcgtgatttagtctttgtgtctggcgctgtgcaatttgataataattggagattgttaggccatggacacaagatctcgacacagtgaggttagttctctctgtattttatggattagattacctaatttaggtcttcaatattggggtatcaattgtctgaatgctttggtgagtaccatttgaaaaccaatcatggtggaaaaagttactaatgatagaatgatgattagatttgctcctatgcttatcaaaatggagattactgatgatcccccattcatcatccattttgagaattaaaaaggtcaagttcaggactaatttgttgactataaatggctccctaaaaagtataataattataaaagatatggccataatatggttgaatgtaagaggacgggtctaaaggcttgggtaaagaaaaacttgaaggagagaaaggatgttgttagagagaaagttgatggtgatcgacgaaggcaggggaagagaaaaaggaagtgagagtaacagggggctagggtgaatcaaaagaaggattggtaaataaggaaactgttatgggaacagagggcagtgaaaaaattatttctcaacacctgaaccagaatgtacagaggagtggataatacctaaaagagttggtaattcgaaggctaaagggaaacttgttgtgaatgagcaagctactattgagaagacttttaatgtgctacagaaacagaagaaaggtgatggaaaaaggagttcgtttcatgtaggtggagatggattgtaccaatataataagttagaatgtgagggaaatgaataagagggataagcaaggttatatcttgagtctcttaaggttgaataacattagtgtaggtgctttacttatgaataaacataaaaagaataaagttgatgatgtgatggctaaagtgtatcatggttggcattactacaatggtgatcaaagtgaagggagaattctggtgctttggcataggacttttgtcaggtccaaatcttgatgaatcataaaccgtttgttcattgtttaataaaaattgttagtgtacagttggtttttcatgtcacttttatttatggtttgaataccatagaggaaagaatggatttgtggaaggggctctcgtatgtgttattttttgtaagaacttggttaatttttggtgactttaatgctatttttcatcatgatgaaagaactggtagtaaagttgttagctcaaataagttcattgatttagcagcttggcttgctcagactaaggtggaatcccttaagcgtatgggttctaaatacacttgaacaaataagcatgatgggaaagacatagtttactcgaagattgatcatgctttttctaatgaagaatggattgatgagttgccaaatactatggctgatttttagtgggatgtttcttcagatcattgctactgcttgatcaaaactcataaatagggtgatctgggaattaagcctttcacattttataatctttggacgactcataataagtttcaacaagttgttatggctaactggaataaatctatggtttgttttgggttacaaagagtttttaggaagttttttagacttaagcatgccctgaaaacttttgataggaaggagattggagatgttgagcaaagttatcatcaagctaaaggtgagtattaacttgccttaactaaggctcaagctcctccaacagactctttagctcaggaattggaaaaagttgttgcaacaaaattccaaactcagtctgccgtgttccaaagctttttagtcgagataagtaaagtcacttggctttcaaaaggagatgacaacaacgaatattttcatgcttgtattgaaaaaagggagagaggagtacataattatttcttttcaaaatgaataaggagaaactgtagaggattataataaggtggttcatcattttgtttgtcattttagaagttatatgggcagttgtagttcggctactcaaactattgatgctaggtatgttgagaatggtccttgtcttagcattagtttacagttgaatataataaaaaagttcaagaaagaagatgtcaagaaagctatatttagaatatctagtacgaaaagtccatgctctgatggttttaattccaagttttataaagttatgtggaaggatattagggatgagatttttgaggctattcttggattctttgatactggagttctgcctgaggagtttaatgaagttgtaatatctctcattccaaaggtagagatgcctaacaaagttgtggattataggccaattacgtactgtaatactttggataagtgcatccctaaaatgatttgtagccgactgtctaaagttctttctttgctggttagccaaaattagggagttttgttaaagggaggactcttgctcataacattcttattttttagggtttgatcaaaagctatagtaggaagaattcctttctgatatgtgctttgaatgtaaacttgggtaaagcctacgatatagttgattggtgtttcttggaggatttgctaagatgctatcagtttccaaccaaattcattcattgaattatggtttgtcttcgggatacttcttatgtgtttatgatgaatggtagattgcaaaagggttgcaagggagctaaggggctaggacaaggagatcccctctcgcctttgttgtttttcttgatcatggagtacttaactcccatgctgccatttgccgttgatcatgaggatttcagatttcatcctcaatgtaaaagcctcaagataattaacctctattttgtagatgatctcattattttttgcaaagtaaactgaggtttggtgacttgcgttaagaagatttttgaggagttttgtaatagcagagggttgaaagaaaatctgagtaagtccaaggtttattttggaggaatttctagtgatgacaaggctgctcttcttcagattttacagtttgaagaaaggaagtattttctcaaataccttggaattcctatgagacccacaaaggggaaagcaaaggattgtgggtagtcctcaagaagattaaacatcagctgcatacttgagctactagacatctctcttatgcaaggagatgccaacattaactcagttcttttggggcttagaaattattggatgaatattttgttgcttcctcaaagtatagttaaggagtttgacaagctttgtatgtggtttatatgggggaacaatggtacaagaagttttatgggggaacaatggtacaagaagtaatttccatcttacttcttgggctaccatttccttatcgaaggctcaaggtggattggattttgatgaaggctcaaagtggaacacaacgatgtttgctaagtatatatgggctataaatcatcaacctgagtctttatgggttagatggattaaccatgtttacttaaagggccaagggttttggcaataccaacttaagggtgacacaagtgggtattatgttgcatccgagacttattcacctagtaggaggtaaaggatgctggctggacggagaaattcagtattagtttgatgtataagtgtttttgtaccaaggaaagattcaagtttcaaaggtttgtctgaaacaggattgcagtgccaaagcaccatttcatttgctggcatggttgtgaattataggctgcttactcatgatcaccttcagcgagttatgcagcttgagaatgggttgtgcctgatctatagtgaggctgatgagaatattggtcacttgtttttcacttatatatactctcagcaggtgttacttcgggttaacaatttgtagctggccggtttggctttgtttggttgtgagctgtttggtaattaataaagtttttctttcttgataaaaaaaaataataatattgctaattaatgaaacagagcaaaaattatgaaaataaatacacacaaaataattaaatattacaaattcaataaaaaaatattattagttttttttaatattttttattatatattaaataatttttttttactatatattaaatgtaattggactggatcggtttttaattagattttgagattgacattcaataatcgatccaatccaattagaatctaaactttgacatcagttcagtttaatagaattggattggatggtatcaacccctaaacatacacatagcctagctaggaacaatacttgcatacatgtaaaacgtgtttatatataaacaatacaattagtataacatataataagagactaagaatcccgaagtcccatttccttgttgcaacacttaaaataatatatatagctagacaaatataaatattgtatatatttatatagtcttatttattccaccataaatcaaacgcaggggaagtctcgagattcaaaattattagaagccaaaagtggtagctagctagttcctgaggggaatggccattaaagttcatcctctgatcgcttcatcatcaaatttaataatagataatcacataatactcttactatttcttcttcttcttcttcaaagagagaaacactgacagtgtggatgaaatctcttgtgatgcaaggaaatgggtgcactgcatacaatcaaaatggtcaagttgtttatagaattgataactatgaccacaagaacagcaatgaagtctttctcatggatctcaacggaaaagttctctttacaattctaagaaaagtaagtaattattatttattattcatctattctaataatttgatctaattaatattctgtgtataatatatattgtgtgtttattatttatactgattataattattttgttaatatttattataatttgcagaaaatgtgggtgtttcgaaagtgggaaggctataaaagtggtaacaaaattaatacagagaagccattatttcaagtcagaaaaaattgcagggtacttaattttggaggaggcttttcatgcaaggttactttcaaatataatgatgacgatgatgatgataacaacaacaataataacaatcaagtaattgattatagattagaaggctcagctggtaaatcagctctgaggatattagatggccaaggaggactagtggcagaggtgacccttctctctataaatctcatgtaaaaattaataaggctaatgattattatatgtaagatatgattattttggtttcaaattgacatttttagccttttttaatggttttatgatctgggtttttgcaggcaaagagaaagcaatcatctacaggggtaatattgggagatgatgttttgaatttggtgattgaggcaagtgtggatcactctcttgttatggctcttgtgactgtatatggtttaatgaagagaaagatgtaaatattcgactactgcaatacaatacaatttttcattagtttttttttcttttttctttttgggggtgagagtttgaccaattttgtccccagattatttattgatgtgtatgttcaaaatctaaagggtaaaggcaatttgtgtataatgccacaatgcttgactgttgaagtttttaatagattagactgttttcagtatgtgaccaacaaattaaatttaagcaagttacaaatctttaatttctacctagttttgttcctcactcagtcttccaatttctttttctttaacttctgaaaaattaaagtttattctctctaaagaaaaagtgtttctatgactactgatgtttaacagtacttctttagaccagaactcttttgaaaacagcttttactttcactttgaaggattctttataattataaatgtttttgtaatggccctattggaatggaatagctattcatgtaataaaaataaagttcattccaagacaatatttgctttgtaattttcattggagttagtgaattagaaaacatggattaggaactttcattactctggaaaataagtttcgaatttttctttgattcatatgatttttaaaataaataaaattttaatttcaccattccaaattattaatattaaagtgtctcaatagaagatatgcatttcatattagcaagatcataaaatcattgtgtattggactttttgctcattacacattatcattagcatcatcttgcatgatgagcaaaaggtttatgcttttgttttaaattgtagaattctttattgacattattgataaaattgagaaaattaattacgtataccattttttaaagttgcttcttgtttttggtgtgaaaagatatttctaaaatcataatatttgtaaggacctaatttatcttactcttagatatagctgattatattgaactgttagttagttagttttattgtcggatacagttagttttgtaactaactctgttacttgatattttgagtcttgtaatacacaggtgtgtatatgaacctctgagattgcattaataaagtttagaactgtttttcctaatatggtatctgacgataaaatctccttcatctctttttctcttgggcttttttcataaatgtacaacaaaaacaaaataattacaaaaaatgtacaaaaaaaaattattttaaaaatttatacattttgaaaacttattacatgaaactatacatttttaatatgtttattaaacttcaaaataaacaatttcgtaaaattaattaaatagatttataaaaataaacaagttaaatatttttttattaaaagataaatgtttattatctattt

SEQ ID NO: 294950 - DNA, 1811 bp, Cannabis indica
taaattaatatttatttataacattagttaattgagtttagctatacctatatattattgattgatttttttggaaattttagagggggccagggccaccctatctcataaagtacgtccgcccctggggacagggatactccttgccccgacaagaactcgtttagtattttatttatatttttagtaatattttataatttatatttactttttcttaatttattagtattctttttagaaatttaaaattgtgttttagataataattagtttattaaataataattaatgtgtaatattttaatttttatctagtttaatgttttttatatattaaaatttttattagaaatttaagttttttattaggggatctctagatccgtcctcgaccctattaggatattctctactccccgatgaagaataagcatagacggggattaaaattcttaacaaaaatggagacagacggagcagtactctctgctaatttctcaccgggtgtgcatccccagttgaactagctaaggaaaagaaatccctatatttttttcagagaaattattgttattctaccatgtatatataaatatatatgtggttatagtagttaaactatttaaaataataataataataataataataatgatgatgatgataaaagcttaatatgaacttattaattacgtacccttcaatttagctagaaagtcttgctcggagactgaagatttgtgcaactctttgccgataaggtcttcccaaactcgaacaacttctctttgagataaaatattcttgggtggcctaagatacactgtcttgttcagagttcgagggtcatcaatggctttgattgtgtaccttgctatgtcatcttcatcaacatatattgctgccatatattaattaatacgagtaaaattccttatgttataatttgaaaagaagtagtgagatgagattaatataattaatatagccatttgtaataaagtcaccttctattcatagaagcatattagaagaaaatggcatgcattaagttatttactcatcatcaaccatgcatgggattaaataatttattatttatagctaggtttgtattgtagctagctagttataaaattcatattgtaccttttttgttgccatctccaagcaaaagcacagagtccattgagggaacaatgtgaccgggttgacataaaccaccaagaaagtaaccagcaaaacaattagctgaaatatatgtgaaaggaatgtttgcatcttcaatggcttttctcactaccattttctcatcaaatgttactcttcctggttctattgcattcttcattcttgaagggtcagttccatgttagataaattaacaattaacccaagatctatttgtatataacatagaacacaatagtagtatatgataattgagtatgtgtacctgattgatccatagcaattatctctgattgatccacagcagttactccaatttgatagtgcaatactatcaactaagtcttcctccctagatctctaaatcagaagcagtttattttctctgattatcaaaaggtatacaattgtgatgagacaatatgtatttatagagttagggaggggacttagctacaaaaccctagttgggctgggcctgctcatcaaaggcttcagtcaactagaaaagcccacacttctgcttcacctagactttactcacagatgctaagcccattaacaattgatcaccaacaacatgggctaacacagcaaagaactatccaatcaaccca

SEQ ID NO: 294951 - DNA, 1797 bp, Cannabis indica
ttttttaaaaaaaacaatataaaccaaactcatattaccatataaaattttaaaaatttaaaataatttacaagataaaaagagtatttcaaattatgtgtgtaactaactatctaaatcttaacgtacacaaacacgaccatatgaagaaattagacataaaaattatttgggataatgcataattaaattaacaaatagaaaatgcattgatttgtatccgtttaattaggggtgcaccagttttcctaaatatatattattacgatcgatatactccaaagtccaaaggtttttttttttttttcttttttgggggttatatatgttagctaatagcctaatacttatacttaatctctgggtcctctcctacttaatttggaaattcaggcatatattattatgagtagactagtaatttgttcacacaaaagaataagatgattcataaagaaagaaaaatataaaatcttaattattccttatttcgtgcaattaattatcttgcacttaatttaattttgaatgagaatagcatacatattaattgtcccctatattctataaatatagctagttacattacatgtatatagcaaattaattaactctcatacataattatacatacaaatatttatatatgaatggcattttctgtcggtacaacaattttaatttctatatattagaaaaatacattgtaattaattaaacgagtacatacttttaaatcttaaaaacctttctcctttcttagctaggcctaaaaatatattaacataattaatttcttgcatattaatatattaattatgtataaataaggcactaaattaatttgttaagatcacttggaagatgctggattcagtactcttctaaggaatgtgacaatacgtaaatatatatcactatcataatcagtagtactattatgtaggtcctctttatatgctcacaatttttttcaatttacaataattaatttcgtcggcagcctatatataaatatatatatttatatagtaaagtacaaaagataaataattaaggaaatttatgtaatacaccctttaaggtattttgatagaccttatatttatttcggtttccaaaataatattttaattcaaatatatatattttttttcataaccacataattattaagaatcacttaagtcagtaaagttgagttagcttcaataatttttctaacatagaatatactcgatccacacttaattattaaagtcatctatcgtgagaacaatacatataaaaggatttaatttcctctcttgttcttttatatacttaggaaactaatacataaatatatcatcacatgttttattcatagcttttatatttttatttttgatattaaccattatccatttccattacctctcatttacaacaagtattgcatatatacgacccaacaaagtacattataaaagtttctaatagtgtaaaaagcagcactaaatataatatatacaatcaatgatcagaaatggtataattaaatatactataaatacgatcatgagatacaacattattattatataactcatgtattcaattaaattacaaaacttaataaaaccaacaaagcagagacaaagggctgctttttcaattctgctatacatacatacataatacattaattaattaatcataataagataactctataccaaactcatgagtatacagcaaaacaaatatatataaatatgaactctctctctctctctctctctctcttctatatat

SEQ ID NO: 294952 - DNA, 5248 bp, Cannabis indica
ataatttctgaattgtgtatgaatttatattgaaccatgttattttctgttattaactaactagtggccttgaatgagtttggccctccagtagttggcagtcgtgaccaagtcccccacgttaagctcctccttagtaagagttacaaaaatgacagtgtggttcagaaagagctgagtcggagctgtccaaagcagtggaggaatctgagtccactcaatcaaaaggtcaggacgctaaaaagctttgaaaccggaagagaagaaaaatcggtgatgacaatccttgatattcttttgaaagttaaataagacaggagtctcattggcaacatgagcttagagggagtaaaagccatccttgcattttcccccttcttagggacagaaataattcgtaaaaattaaaatttcaacagggttgggagcagcccaaccacgtgaagcataaaaaaataaataatcctgacaacaggcgatatccttgaggtatcaatttgtatagagcaagtcctacaaaaactaggaagtttataaagtaatcttgaagcgggagcatcacgccgaccataaaatgtgcttggctccatgcctcaaaccctctgtagttataattgggggttttagtctcctgggccaaatggtggaaaactccaaggtcctggggcttgatctcattttcagttacaatggttgacaagtggtgaacacaactcatggatgagtgtaattcttcagcttcccaaccaattgcagggtgtacatagtttgtgactaggatgggaccctacatcaccatgttaaggggcacgacggggtaccgtgggaccactacctgagaagtagaagaagcagcaacttcaggatttgacattctagttgatgagtgaagtttaaagatttcttaatcgtaagcgtgaaagccctacttatgaagatccctcaagacgtcactcatctgaaaagataacagttatcccagcagttagaccccatatcagaccctaagtgaaaatggaatgagggtcccctaatcgctgaggccccatccgttagcaagcatatccaaaaataaagaaatttcacatgctatgcatcaggtgcaaaccgcaccataacaagcaacaatggtacagaggtggggaagaagaggaaaggggaagaatctactagtcctaataaggaatatgttgcctcaaaaataaaaactaaggacgacttgggaaagttcccctaaccacacataaagtaccaacaacacaaccatgctaacatatccccaagtagagttatgaaaataatgcaagggaaagaaaaagtccttaaagttggtaacttacaaatagaagaaaatggagcagccggggactctgatgcgaaacacctgtataatcgagcttgtcaacaatgaagaaagagtagaagaaaatctgggttacctgaaattttgactggctttgaatatcctaagagatctaaaggtaaaaacctcaaagaataaaaatgaagggtttttatagaccagctgaggtgcgtgaatcaacagtcatccaacggtcttcattcgaaaattaaaagccatgtgatcaacgactagggaacaattagcatgtggacaaaactaaaagaacagttacaccacttgaaagtccctctaacatcccacaattaatagcattagaatcgactaaaaatcaaatcgttttcctcaaaaatgagggaaataatgagtagtatttaaaataggcacgcacaatgtgacgtcatcgctccaggatgtacatcgcaagtcccattttgcaaaaaatgtaaaaacgaacttggggtaaatgttgtctaggattttctcaaaatatgtggcagtacaggagtatgccatgtggcagtaagacccaagggtacgagacacatcaccctaattacccccgaagtaaagtaatgaaagaccagtcatctctaagagtaccgagctagtccgcaagcatccctcgtttgaccttccctacgagtgagatgtaattggaggatggaacatgaggagtagtgaaagatgatgtcactaaaagggtataacattgtatacacatttaatgtatcatggggaagaatatcagatgccttactttgactaacgtgtttaagggttaaagctcatcattcccaaattgtgtgagcccccgggcatcaatcagcggctgcataaatgagacgctaagtcataaataagggataaattacatcccaccaaacacctatagacaacctaaaacccatcacaaagtaggcaattataccctgggttagatttcaaaaattgtgtcaagtatgacaataacggcttttcaccactattatgagcctatatatactctaatgataaaatgaaatgggaatcgaccaagtgaaagctctgtaataaatactcttataaatataaagactcgtgaactaaggcttattaatgccccaatcacctaaaatttttttctcttaacttctattaaatctttcatacatctctaatcattagttgccaaaaattccagtcaacacccatatatccccttaatacacatattaccccatatttaataaaatatgatttacttaagttttcagaatattacacgtgactctctattttcattattattattattacttgaaagccatacatgctcttgcgtaactatattaaaatttgcaacaatttcactcattaatgaaagttgccttcaagaactataaggagctccagagctggagttgataacaagctaggtcatttgtgagcataagttcttcttcccaactggtagaatctccaagcatcacgtgttcgatcaagattttaagactataatttcaatcacacatataacatcaatccaattacgaaaaatttatctatagagttatagcataatatataaattataaaatctatttatttatttatttatgcacacgtagtatcatcagttctactatgtgacgctattttttctgaagcaccactacttactactcactcctaccaaccaaaccaatcatctcttttagttttaacccacgaaactacttcatacacgttcaacgtgggatattattgttaaaacagtttaaatgttttcttatttatctattaattaatttaatataactctaattaattaattaattaattaatatttaagtacacctctatcgtactaaacaattctattagcccaagtaggaattagtaggagtagcagctgtcttcattttcctttttccttttcccaagtgtgaacactgaccaaaattttctcacctccacacctctctttattatttattatcccatttcccttttcttttcaatcacaatccaatttcagtcttcaatctgctgacaaaatttgactcttaaaataaagaatagtactttcatattcaaaaattccctttcttattcctcagtactataaatcacactctcttattattattattgtaccattactatggccaaatcggaaaccacaaacgccggctgtttttccggcgttctccggcgaatgttgtgcacaggaaacgttcccacacacccatctgaaaatatcaacgattcagttccaaacccaagtgagttgttgttcaaatcttttccggttaagaagaacaagcctgaaattcaaggccaaaccagtcctggcgtggtggcgaggctaatgggtttggattctctacctgcggacacaaattgggtccccaaggaacgaagtcaacgagactctttctgtcgaagcaagtcagtcaattttgcggattacatgctcaacttcgatacagccgacgctcaccatcgtcgtgtgagaacttcagtgtcgtttcgtgagagtccagtgtcgtttcagcaacaaagtggagattttgttgtcgtttatttggatgataagaagaaaacgacaccaaaagtggagatgggttttggagaatcaaagcaggggaaggcgaaacagaggagtaagaaaaagaaggaattagaagagaataatgttgttcataataagatttctaagttgaaaaatgagccaaggagaaaaattattacaccaccacaggagaattatcgaaacgagtgtagtggtgtgaaattgaaggctttgaagactgaaaatagaaagaaagctccggaaaaatttgctaagaagagaaaaaattcccatgcaagtaagaaaattcaacaagatgagaagaacaacaacccagaaaatattatccctgattcttttcttgatgaggtttatgatcttcttattcaacatgaaactttgttttcaggttagtttaaacatttattttgtaatgggcatttttttttcttaattatttgttgacaattttattttatttttttgattgttataggagaaaagataaggtcagaaaatggaagagattatggtgaaatgaaggagaggaatttggttgaggaatgtatagagcttgcagaacaacttgggaagttaacagaagaagatttgattgagtcatattggagttgttgttctaagaatgaaagaaagcttaatttggaaatgtttgaagaaatttcaatggattttgaggaacctattcttgatttgctacttaatgaggttattagtgaactagttgaaatttctcattaattaggtcatgattaataattcacgatcatgttgttttttgggttcttaacttcatgaaaatgctacttgttttcttgtgtatacatcaataatttcttctagggtaatgatatgtgcactttttgtaccaaaacgcttcacttactaatgcttttatgtttttagaaatgcttaatgacactctagtaattatgtgtgaggtgtaatattgatattggtgtactttaatataggtttagacactttggtgcctatgctcttatatttttgttgttgtaaatttaacttcactgactgaaagaactaacatgttgcattattaaatcactttctattttatatttttctctatatataagtgtatatatataggtggactcttaacgggtattatcgatttatgggtaatattataaaaatttatttatgggtaatattataaaaatttgagtttttatgtttagtttatttatctaattaaaaaagtctctcatttttacattatataagttggggttgtttcattgacggaaagaaaaattaagaaaaaaagttttcgacaaaaaaaa

SEQ ID NO: 294953 - DNA, 5299 bp, Cannabis indica
ttttgtttttgatattattacgattgcgtactctcccactactagaagcggcgcagttttatagagtcgatcttaccaattccacgattggacgctaacgtacgcatctcactctcctggacaaaatccattaacgttgctcaatcagagctccaaactcttacaggtccgacatccctatccctatacccatcccaattccaaatcccatttgtgtctttctctttctcattcattagggcttactcactctctgaaaaaccctaggcctgtttttggctttcttatttcttcaaagtttattattattattattatcagtatttgtttttatatatctataataatttggtttcagtagagggagtatatttctgatatgtggattgtggagctagttattgagagtgttatattttatatttgcattttattatatatatgtgcataaataataggtcgtggatttcaacttcaagcttcaattttgtttttgtttttcgctatattggtagcttttgtgttaaatcataagcatgagctttattttattgaatttggataaactgaaggtaatgattcgtgctcgagatcgttgtttgttggtgtgggcactgaagctagggtagggttacaaaaaggggtgattttgtcttcgtttattttttggttttttaagaacatttattggaaagatagggctgacaaaaatggacggggaggagaaaaggtctgtttggaagaaaagatcgaaacaaatggaagttggtcttgattcggatgatgacgagcccattgggtctttgttgaagttgaagaaacaacgaaaccctaaaaagctgaagcagggattagagagggttgctgtaagggtgaagaatgtagaggttgaagatgaggatttggggggaatgaatgatactttggcgagtttcaggaagaagttgaaagcccctaagaaagatattgttgctgcagcattgaggggaaggagttctgcttcggctgtggttgaatctttggatccaccctccgccagaatcatcgaggatgatggtggttcagatgcaaaactgttatcaaaagctgcggcgaatggttcattggtggctgatgggggatctgatatgactatggaaatcggggtagaggataagcctaaaggaaaggtgaagagacccaagattaaatcagctgcaaggacaaatgatggtggtttggattctacgggatctgggtgttcagttttgaaggacaagaatgtttcaggcatggtgttagaggaaggtactagtcagcattcagatgataatatggaagactcattatcatcacttttccttaaggtgcaatctggtttattgagaaagtttcgcccggtttctggtccaaaagagaattatgagaccaacaacagaaaacaaagtaggctttccagatttagttcagaggataaagcttctcgttcaaaagtgatttatgatgatccgctggattgccgttcaatggatcaagatgaacttatggtggatccttgtagctcaaataaagtttctgacagagatagcaagcagtgtactagcgttcaacttgtatctcctgcacaaaatgttgccttggaaacttgcaattccgaggatgaactgatgtgtagtggtactgaaaacatggccattgcaaactgtgaaattttgtcttcttttgttgctaaagaaacttcaccacctcattgtgatgataacttactgaagaatggatttcaaaataactctaaggtggaaaaaatagtatccggagaaaccactgtagcgctgccttccggacttctatcctctaattcgttgcatggccatttaaagacgtcggaagtattagattgtcaagaggagcttgattctgatcaatctctaaaggattctcagcatgttcaacgacttgtgtcttgtactgcctctaattcaaaaaagaaggaagaagattgcattgattgtaatggtactccacgaaaggaaaatgaagtaacatgtgatgttgagatgtctcaaattctggccacttctcctggagcacacaagtgtggttctgatgtaggtcaaaatcttgaagaacataaaggaacttgtctgaaaagcgaagattgtaatttgattggtgaagagactcgtgaagcatctcctcaatctgtggctccggatgaaaatgaaagttacctagaagatgcagtatccttacctgacattgacaaaagagatggtaagctatcagctgcctatcgtttgcgcaagcctaaaaagcgcaggcctgacatggcttacgagggggatgctgattgggatattctaatggatgatcagtgttttcttgaaagtcaatcttctctggatggggaccgtatgagagtgaaaattgacaggtcttcaagtgttgggattgaggttgaaggtgatggtgcagcagctgtatctgtggggcttaaagttcgtgcagtcggccctgttgagaagataaaatttaaggagatcttgaagcgcagaggcggccttcaggactacttggaatgcaggttagtaatttctatactggatctggttctaaaagagtgttcttttgatatgtctatacgattcattaatgatgccatgttagacttttctctccagtaccaattcattaatgataccactttggatttttctgttatgccttactaatgcaaatgtctttacatggtagatatcgagtgtattgtttggtgtctttactttcctttttgaattgaaatactactttacaagggaatgtatgttatatgtttatgatgtgaagtcttatcactttcaaacaaaagtgctggaggcatgctgaattttcccttttatttgtaccagtcttctgctgtgttatgcatctgaaagaaaactacattctaagtgctagtctcattgattgatcctacacaggaatcaaattttaggtctctggaataaagatgtcagtcgacttttgcctctttctgaatgtggagttacagaaactgcttcttcaaatgaaccaccacgtgcttccctgattagggagatttatgcgtttcttgatcagagtgtaagtttgtaaagtctcagttgttgaccataatggttatcttttctattcagcttacattgcattaagaatttactttaattaaattttttgaacagggttatataaattttggaattgcttccgagaaggccaaagaagaatctgggactgagcataactataaacttcttagaggaaagccttttgaggaaagttctggtgtttcagttgctgattcagaggatggagtttcctttattactggtcaggttaagagctctaaaactttaattgaagcaaaaaatggagttattttaaataatgaaaacccgacacatgaagccatgaaaggtagtgagtgtgttccaaagctgacaactgaatcagcaaatgctatagaatctgaagggtgtgttgctgatcttactgaaaaaagcagcattaatgccaaattacctgatagactgattaatatagatgttggaagtacagaaatatcatgtgaaacattggaagttggtaaagtccctattgtgactctggatgtagaaaaagagtcatcccctattcaagctgcgtttaatgatgatgccaaggagaatctttatccacggtgtcatacaaacgttggaaagaaaattattgtcataggagctggtcctgctgggttgactgctgcacgccacttgcaacgtcaagggttctctgtcactgtactggaagctaggaatagaataggaggccgtgtttatacagatcggtcatctctatcagttcctgtggatcttggtgctagtattattactggtgttgaggctgatgttgccactgaaagaagaccagatccatcgtcattggtttgtgcccagttgggccttgagttgaccatattaaacagtgattgccccctctatgacattgttcaatcacaaaaagttcaatcagatctggatgaagctttagaagctgagttcaacagccttctagatgatatgatattgcttgttgcacaaaagggagaacatgctatgaaaatgtctcttgaggaggtttagaatatgctcttgaaaggcgtcgtagggcacgatttggggtgaatgtggaagagaagaaacagcactttgacatggatggttttgtagagtccaagacaagtattgatggcgaagttccccggaaagattcttttgatgaagagcttttgagtcctcttgagagaagggttatggattggcattttgccaacttggagtatgggtgtgctgctttgcttaagaatgtctctcttccctactggaaccaggatgatgtttatggtggctttggaggagctcattgtatgatcaaagggggttacagcactgtggttgagtctcttggagaaggactttcgatacacctgaaccatgttgtgacggatgtttcatatagtacaaaggcttctggagttttagatggccagtatggcaaagtcaaagtttctacatcaaatgatggtgagttttctggtgatgcagtcttggttacagtgccacttggttgtttaaaagcagagacaataaagttctccccaccgttaccccagtggaagcattcttctgtccagcggcttggatttggagttcttaataaagtagttctagaatttcctgatgtgttttgggatgattctgtggattactttggagcaactgctgaggaaacaaatcagagaggccagtgctttatgttctggaatatcaggaaaacagttggggctcctgttcttatagcactagtggttggtaaggcagccatagatggtcaaaatatgagctcttctgaccatgtaaaacatgcagtagtagttcttcggaaattatttggggaggaatcagtacctgatccaattgcatctgttgtgacagattggggtcaggatcctttcagctacggtgcctactcatatgttgctgttggagcttctggagaagattatgatatattaggcaggcccgttgagaattgcttattttttgctggtgaagctacttgcaaggagcaccctgacacagttggtggtgctatgatgagtgggcttcgtgaagcagttcgtataattgatatattgactactggaaatgattacacagcagaagtagaggcaatggaggcattacaaagacaatcagactctgaaagggatgaagtgagagacctagcaaggagacttgat

SEQ ID NO: 294954 - DNA, 4585 bp, Cannabis indica
atttttaatgtcttaattattcaatctaattatttttgttgtttatttatttttttactttatattactatttaataataaattacaaattttcatccaattttaacattttatacaaagaaaaaacagcccactcacttacaaaaaaaacaatattgacccctcaatttaaatttggctcactaaatacaacataaaatacataaattgtaatttttccggttatttttgtgttttttttttttttttaattaaattatcaaggcaaaatccataaacccacccactcacttctcaaaactttccatatcaaaaaactctctctcacacacacacatacactgcaaaactctccaaattctgccgccaaatttataattgtgaccggtaaccgcctcaagcggcggcatcaatcaccataactgctagaataaccgctcgccttcaatgtccaactcgcggaggaactcgctcagcggcgtcgcctctcctcaactcgccgggtcaactcaggatcttaggaaccgagtcataaactgcctcaacaagctctccgaccgagacacgttggccctcgccacctccgagctcgagtccatcgctcggggcctcggtaatgattctttctcgccgttcctgagttgcattcacaacactgatgattcctccaagcctcacgtacggaggcaatgcgtgagcctcctaggccttctttcgaactcccatggcgattctctaactccctttcttcccaagatgatctctaccctcgttcgccgtctccgtgattctgactccgttgttcgaatggcatgtgtggacgccgtctccgccatgtcggcgcggatcacaaggccgccgttcgcgactgctttccacaaacctctaatggacgttctctcgcttgatcaggacctcaactcccagatcggctctgctttgtgcctcgccgccgcgatcgaggcggcgccggaccctgacgtggctcagttacgacggagtttgccgaggttagggaagttgactaagagcgacgggttcaaagccaagtcagcgttactggttctcgtcggtagcattgttggcgccggtggcgcgtcgagtaagagtgcgttagattggcttgtgccgagcgtgtcggacttcttatgtagcgacgattgggcggtgaggaaggctgctgctgaagctttgggtagagtagccattgtagagaaggatttggcgtcagagtacaaggcttcatgtttgaatgcattggaaaatcggagattcgacaaggtatgagagaacgttttcccgatttgtggtgtcctctttttgtttggattcttgaaaaatatactggcaagaaaggaaggtttcttaatttttgaatagtagtagtgatttagcttctaaaagattttttctgctgtttcggcttttggatatggtgttaacaggtcaaggttgtccgtgagattatgaatcaaacattagagttatggaaggagctgaatgcctccgcggagattcctcttccacttcaatcaagatcttcttctcaaggtaaacgctttgatattttgctcacgagtcctttgaattttgattcatttggtaactatacaatttcatgattttcccgaatatttgaagatcagtttgggtgaggcattttaatttcataatcaacctaacattttggttttcttttacccttgtcattgtgttgggctagataatggcattggtcgatgttttcctcctctccctaaaagctcccaagacagcggttttgagactcctcaaccaaagaaaagagtccccactaaccggtcccctccatctgagtctgatggttccttgcctaacagtgccaaaaaaggaattcccttaaaaagtaacgacagaaattctagcccaaccatgttcggtaaggtggaccatccgaagaaagcatctcattggaaaattgaaatggcagtgccaagttctccttcaacgaaggtggcttgtgaggacaatgttggtggaaagaacgattctctggtttctgaatctggggagaagcagtctagaaatgcgaggcaggaaactaaacatgccctcgttagtaagattctcgaaggagaagttcaaaaatttggtcgtttgagatcgggctctcgcgtggttccttttgatgatgataatgaataccatggttcagatgttgtccatgacaatgttgctgaagaagtttacgagaatcccaaggatgctgaggatctctcaaagatccgtgaacaacttattcagattgaaaaccagcaatcgagtcttttagaacttcttcaggtgtgtattgactgaacaatgcttgttttcagcctcttcattaaaaattatataaaatacaatccttttaaaaggttattattgcttgtcaaattaatcagagtggacgtgttggtttgtgcattttgcttggatacacttttaagagtcttctctgctaactaatgtattcttcttttactggaaccagagatttattgggagctctcaatatggattgaattctttggagacacgggtccgtggcctagagatcgctctagatgaaatgtcatacgatttggctgtatcaagtggaaggtttccgaactccgactttgcagaaaacacatgctgcaagctgcctggtacagagttcttgagctccaagttctggcgcagagctgaaggccgctattcttgtcaaatgtttcctaattctgggtctgggatggttttctcacccaacaggtttcagcaccaaaacggaagtgcttttttgaacccattggctgctgacatccagagcagtttaaggggcatctgtgggggatcaaacagaatgccaaagaggatagttcaagattctgatagtattcaagcttgcaacaccagtggatttagtggtgcttgaccagttaactgtagacattcacccgagatataggtaagttttaaaatctacttctgacccttatattctttttactattgatactttctctctctgaatattttttttttggttatatgagtttgttttgtcctttacatgtgacaatggtattgaaatcgatcatggttgtgacatatttctaaactactgcatctgcatggagttggggctttacctctggattgttgatgtatttgttaatcttatttgtagttaaaattaaagataatatgttttacttttaaaatctacatagattttttttaatacatatatacgtacaagtaggcaactgaagtgttttattacaaagtcctgatactattcgcattttatgtcatttttagactactatagtgctgtaaattcatccatcttaaaactatttagtatgtgatttgtttctgaacttttacaactaaagaaactttttagtgtagctttcaaaagaaaatgaaactttttagtgagctttcaaaagaaaatgaaacttcttagtgtagctccttgaagtgtaaatgatttaggttcatatgagctactgcatttctacttgtaaattcatactaacctcatggtttctttatagggtggcaatattatgtgaaatcctccaactacaattgaacttctaatggtggaacaatgtgtatgtttatagtgggagagcctgcaacgaggcattgaagaccaaaccatatgaacatgaatatttcatgtgcctgaaaacacagcagtcgtccatgtggctctctgcgcacactgcattgtgccaagggcgacctcactcaatgtatatttatttcatttagtcccagcgttcagattaaaatttattctcgacaatggaggcaagtaccatttgcaacttgtaattcttttctgtgcagtgtgtaccatcctcataatttaagattcatctgtatagatccaagtttcttcaccatctttttggcatatcgtaactaactatattgttaaattattaatacatgagtaaaatttatttcaagtgggtttaaagtaagcatattttgcttttcagtttcatacataaggttcatgttcatgttcttgcttatggtagaataacaagaaccaaaaggatatcaataaacactagggaacaaacaaataaagtcagcttgaaaggcgtagactgaaaacattgtctagattatatctaataatgctttacttaaaatttctcgcagactaaaaatgttatccaaatacgttctctttactagtaactgaagttacttgttgtcgtgtatgggcaactaaatatcattttagtactagcaactaagaaaatttaattgtgtaaatttgaattatgaacaaccctaaacaataattaaaatcatgtgtagggctaataagacataataaaaatcacaatacttttctaagagagagtagaagaagaattagtattctacaaataaaaattggaaccaaaacgcactttattatcaccgagaccatctctcattaaaaaatttgctatatttagtaacaaaaaaaaaaaaaatgtgatatatttgcataaggagaattatcctaaatactgtttttttaataaaatattaattaaattaatta

SEQ ID NO: 294955 - DNA, 10329 bp, Cannabis indica
gttttcgggttctgctgccataaaacttcatttcgttgcagccatataaaatataccaaaccagcaatgacagccgaaaggacttgctgctggaacttgcttctcttggacctgctaatgcttcagatgaaagcagtcaggtctgatgcaggggtcttccaactgatccattctttcacttgttggagtatgctgcctgctctgctgcattgaaagaaaagatggtctttactctctgtttgattgctgcaaaaacaacagtcatctacctctgttatatgcattctttttagtctttctcttgtcttaagtctgtccaacacaaccatccaaagaataaaactatgcttaggatggttaagtctagaccaaacttgattacaccagtgaattcggtcttgaggttgctgaagcttcttgtatccatctgaaattttatactccaaagtatgaacctgacttgaatcccagttttttcttatctcatcttttatttccacaagcttcctccaataccaactactatggatggaagttttgtggttccaacaatctccattcttcaaatagacactatgaatccatttgatccataaattatctttctttacagctagtgtccatatatttttcatcaaggctgctttgttccaattactgacatttaaaaatccattccttcggctttagaaagacagattttctcccaaaactatttaatttaaagttattagtactatttaatttctcaaaactattttgatttggcaaatgacattttatgcttcagtttcttttatttatttatttattattattattttttgggtaaccaattcttttatatcagttcctcacaataaagaaaatctttcatgtcaattgttatattaaaagtgagacaagtggtaaaattgttagctttattctttattcgattcttttataattacacgcaatcactttgcattgtgatgtttgatcaaactccaaaactaaattctgatcaactcttcaaaatatatacatatagataatgagtataataagacaaacatgtacctcttagcaatgttgggtcaactatataaatatatatattcataaataaatatatattttaaatttggaattagagcaatatttaggaagctacaaaagaaaaacagagcttgttttgctagaatatagtaatatactattttggtcaatcatatgctctgcccaatccgctaacacaaggaaaaacaaagagactgtggaaggtgcaaaatctattactgtaatatattaagatttaaaaaagaaaaaaaaggaaaagaatatatagaagtaccaaaaaaaaacacaagaaaaattagccctcagcaacacaaaccagccaccagattttccttttcttatatataaatttgagattagtacaaagtgggagagcagccctgttaaatatatatcagcagctcttgtttttgatcatctatgtctccacagggccaccacccacccaggggcaattctgtcattttgctcaggctgcacatgcagccataatcaacgaccacaatgtcaatggcgttcacattgagctttttttcaaggggatggcttccaatcaaattgaagattattatacccattaacagctcctagcccactaagcagctggtttcccaaatcttgctgttgatgatgcatgatctgatctcgacctaaggacggcattcctacccttccgtttgccatggaattatttcccatttgagctcggattccgttaaccatggcagactgaccaagtccaccacccatatttccaaaccctgcaacccccatacccgaattagcgttggccatgccgttccccactaggcagttgctattatttatacctgtgttgttattcgttggtaatataccgttcacatttttcacatcatgccccatcgatccaacactggccatacctcccgggctattattaagatggttattcatcatcatttcatgtaggattttctgaacagaactctgtgaatcactcggatcagcctcaccagaaagagcaggctgttgcatggagatatttccaggtgaatttgcggtgttcatgtgattaccagctgacaaggcaccatgtgatgtttgttgtggaggattgttagacgacgagggtgttggtgactgaaatggtgaaggattaggttgtggctgtgggatcgtactagaagaactgggtgatggaatctgcactgaactacctccataaggactgcttgcattattcaaagaactttgctgtctcgagttcatggaattttggtgaagcagcccaacaattgtacttggagaggaagatgtggaagctgtattcatagcattacttacactagccacaccgttgcttgcagcaagttgcatagtaccttgaacagtgttttgatcaccgtttgaattatgggacattgcttgctgctgctgctgctgctgttgttgctgctgttgctgttgttgctgctgttgaagctgttcatcagattgttgtgcttgactgtgaaccccagatgacgtactagtccttctaggaaacttgttcaaactctctgaaaaaataaataaagataagcagcaaatataaaactgcatgcaatcaagaataaaactcactctacattgtcataaaatatctaatccaataaacgaacaaccttggatggctcaacttgccaaaagacgttgatataatactatcatatgtccaatttaatgtccaacccaaatgttaaagcctgcatgaacttttatttattttattgtttatttatttattaaattatgtggaggagagtcactcatgttagatagctaacaaattatatactaaatcacttgttcttatgtcccctgaagcttaaccgttactgtaacttcacttgtaaactaatataagcattcaagtgtaacagagttggcagtagcaatttatttagaacttatctgtcgactatgcactacacattttctgactcaaattcccaagcaatttcattgcttacagtttctaatatatatattgggtaatatcaaatcaaaaaaagaaatgtggaaggcaaatggcaacataaaatgctaaagtttctaatctgcaaccaaattctttgattgatttatacattaaagttggattttggtagtaaggaaattacagggaaaaaaagtggcacataaaagaatttaaaaaaataaaattctcatgtttggtatggaaagaaaatatgtacggaaaaaaacttgcttcaacaacaaatttcataccaaatatgaaaaattgatttttttttttattctccacacttttttaattttttttccctcaccacaatccaacttccaaacatagcctaaaagagtaaatggatcgaaagtagatttcaactttaagttattatgcacatggaaaaaaaataaaacacggataattaaaacaaaagttacaactatataggataaactacattaagcttacccataggtcctgtccctgtttctcgactgtaatcaatcaaatctttcatactattaaccacttccgaaatctgaaaggcaataatgtaattagaatttaaaagggagcaaaaatgaaaacaaaaatatataaacagtattcaaaaagctactaatgtgaaagttgtcttagagttgaacctgatcaacatttcttagtcttctcaatatgcattgacaagtattagaaccgtaaaccgatttggaaatattagatgtgataagaaactatttaaaatatcacagcgataggaagatgacacataacggtgaaagtgaaacttttgccactatgttgataacatcaaaatgatatctcacaaaaaactagcagatccccgaaacacacccacaattaattaaatcaatgtcattcataaacaaaaactgaataatgacacattttcctttaaagaagaaaaaactacctgcaagcagcgtacatatctctttgtatagcctaaatcattcaccaatggcacctccaaagttttcgccaattggcgagctgacgccacaaacctagcatacaatagccccatttaaatccagtcaggacatttgaagtcaagtcaaaccattaaaagttataataaataggagtcaacaaattgacaaccataacctatacaaatatttgatccttattattagtatgaaaatcatacaaacagagattgaagaaaaagaaagccagaattacttcacattaacacctaaatgacaaaataaataattttaatacagaattaatctatatagtatataccaaagggaggtgcttcaaaaataataaatgggaaaaccattacacatgcatgcttctataaagaactttagccttataatactaggcctaattagaaatgtctgaacttactcataaactgcaaaaatttaacattgatgaaaaaataaatacatttattaaatgggtcacagcacggaaacctacatattacagttattttgcatctctggaagtgatagattcgaagaagcattttgagtagcagtttggtatttttgagctgcagcaccgagctgactaacctgtacattaaaaagaacattagatatgcataatatactagcatacactcaatggcagaagcattcttattattaaatggatacatcaaattgaccaccactactggactaacattagagcaaaaagagccatatgattcatgttcatccacatttaaaagccaaaaagaactacaaggaaatccagatctaagtgcgaatcaaaataattaccgactataatcattatgaacaaaacagaattcagaaatccaaattctaatatatttcaattctagatttttgtaaaggaccaaatagttgccaatatatacaattttattaataatattgtaatttacagagcacctcaagtacaaggaaaaataatatactcagattcagtaacagtccacattatgttatatgcttcactttctagattcaaaaatctgtccaaaagtaagcacttatttactcatgttttcggcaagtactttaattaataaaataatcataaatgcaacacgctaaatattaaaacatcacaaaattatttaggaaaaaaaaatcttacactgcttccagatatagaatggaaattagcaataacttttaaaatcacgttcagaaagtgtattttgagagaaaaataaaccaaacccgtcaatgaagtttgagttcttatacgaaaaaatgtcaaaatttgaatcaacagattacattacagttggaaattcacttttgttttcataaaatacaaaagacgtgagaaactaaaaaagatcatttgcatggaaaccccttaccatcactacaacttccataacaagtaattctttagtaacgtaacttagattgggagttcatcaaaatatcaaaaaactcttatagcacttcatccaaacaccccatcaggctaagttaagacgttgaaagccatgacaaacttacaaagcactaaaaactgtgaaaacttgttttaattttgacaaactttccaaaataatacaatatgtagaatgaaatcataatcttgaacactattcactaaatttctttagcaaaaagtacatatatattatgttatacggacattctagaaattaaatacatttttcattgcaatccaaaacacttgcaattaaatcaactaaagccccatttaaagttccctgtcattctcattactcatcctgaccattacgtgtcgtcttgttaccaattaaaacatactcagatcacccatttatgtacaggtactctacaaagccaaactatatagtcaatcaaattacctgaggtaccaacaatctccgagggattagctcttcatgacgccttgcacaaaattcccaagagcatatctggtataaagaatgaacatacataagtaatgccttgaaagaattgaagccataggatatgtgaaaacaatcttgctaagcacaaccttgaggtcaggagagaaaactattcgtagttggccatcacgaacaacacgaagttgctcaaaaacactttcttgtattgcctttgcatagtctaagacaatctggcctgaagaattgtggtactcacggggcatatcaatgtacaaaagttcctccaaagtaccactttcatactttattttgaaaagccgggggagaacctctactgtcgcttctgaaagtacattaagcataaaattatcagttaccaagcatatatcagttatcccaaagacaaaaaaaatactttatgcgaacatactgaatacatagtgttaacactgcagtattgaaaaatgaataaaaaaaaaataaagcactacgaccataaaactaggcaataagcactaaaattctaaaatgtataaagcattacgtaccgaacccacggccaggctttcgattgcatatttcacaatgccatacatcctgcaaatgtagaaagtaaaatttaagttacaactgagctacaatttttttttcttttgagcaccagccgggaaattactagcgagcaacaataagcgtgagacaagtaaaaatgatatccacaagttggtatactgttttattcttttgttttaaatttgtatgtaaatctttcaagtgcacatgcatttaaacgccaagaaaagagatagccacagttcgagtgagcctatcattggcaataaaatgtaaaaatgtagtatggctgcagcatacctgtggaaaaacaccagttgtttgccgaccacttccatacatagaaacgcaccatttcttttttgcatggggagcaaagaaatcagagacaaatttcctccagaattcaatattattgtcctgcatggaaagtagccatgatgataaaaacagcagaatatatactggagtaaatagtacaaagacaaagaatttgagtgtatcgtacttcaggcctttgttgttgctgatgcatataacttgtcaaacgccttgcacacatcccaggttcatatgcaggtttagcaggagatctcaatggcaaattttgctgttgaagctgttgtagttgagaccgttgctgatgctgaggcatagtcgataagaaatgttgctgctgctgtaattgtaagaatctttgctggtgcaagaggttaatctgagctgcagcagcttgcgaggactgccttgacatgtggaggaactgttgttgctgttgatgttgttgttgttgctgctgctgctgttgctgctggtgttgttgctgctgctgctgttggtgcataaacaaagactgatcagaatgctggggttccaactttactgccggtaagcttctcatactctgtagttgctgtggttccatctttaccgcactaagatttctcaagggatgcaactgttgttgttgggattgcagctgctgttgtccatgatcgttcacttggggttctaacttgacctgtccaccagctaagcctcctcgcatagcctgatattgttgttgctgttgctgtgtattgtgaggagcagaaaactgttgcattggcggctggccatgttggaaactctgaggatcaagctgctgagactgctgttgatccgataaaagctggttagcagaagcattagaatattgaccctgaccttgaccagaagagccagggttagccatatttggtgatacataagttgatgaaggagcattaaagttcattccattgccaacagaaggaagtggatctgactcagaccctgtatcaataccaccacgctggccacttccaggaccagaaagcccagaatttggaaccccattaccaaaagattgattaaggaaagaagaaacgttaggaacatttccaagcacattcatattattgtattgagttcgaggcgagacaagtgaaggaaaagctgtctgtccaggtagtggaccaccttgagctcccaacataccagaattggatctcaaaagagaaggaggaacagactgggcaccaccaataggaggggtcggcccggaaggtaccattgcttctcaaaacaacaagatacaaacactgaaccaagtaaagactaattatctaaaacatgaattgactaaactaagattacataacaagtttcacagaacagggaacagagttcatcccagatagtatttcaacccaaaatccaaggccaaaggcttcagactcattagtgtgcaccaatagaaatggtaaagctttatgccagagcatattgtgctgagttttacacaacataagccagacaccaaaacaagccaaaaccagaaaacaatctttgattctgaacattctagagttgcactatctccgcaaaacaaacaatcttcctccggctgtcgcgtgaatctctgtttaatacactaagttccagatccactgttacctcaaccattgagcacaaaaggcaaaacaatcggcctatcttaagattccaatttataacgtacctcacttctattatccaaaaccctgaacaaaatcacaaatcaaatcagatttcaaagccaaaaaacaaatcttgaaaactcaaaacaaaaaacaaaaaacacaataaataaattgaaccaaattatacaagtacaataaaaaaagataaacccgtacttcacaacgtcgtacccaaattacactcccagaaggccgaataaccagttcaacacaaaatgaaagtgacaatgaaaaaagaataaaacatccaaactttatcacactagagcaaacacaagcaaaaccacagccattgaaagaaagaaaaaaaaatgtgaaaagcacacattaataccttttcgatcggaccgttcatatacccaaatcaacgatccaaaacggtaatagaaacaaataacagactatcatgaactcacccagactaagaaaaaaaaagttctaaaacaaaatagatattccaatccaaactgatcgaaaaaagaaaacccaaactcggatttcattccgttacgcttcaaatctcaaataacgaatacaccaaaccaaagagctcaacttcttactcttattcttcttcttcttaattcttctttgttgttgaagtagtttaaactctttattagggtttgtcagctgtatatgtcttcttctctcttttttcttccatgggagtagaagtacacacaaacacacggccctgtacctcgctgtattcacagatagaaaggaaagaggagagagaaagaagagagagaaagactgagtgtgagtttgtctagcggacgtcaaaattgtattcgatcggattgaattttcttcattctccttacctctttaccttttcttcttttcttttcttctgtttcttctctttctctctctacatgaagtcaaatcctattctttctctctcctcatacttctcacatacatacatatgtctcatatatctatgtatatgcatcatcatcatcatcatcatcatcatactgaattaaattataataatataataataataaatatgattagatgtacttttgaaattacttaattacccttgactgttctgtggaatttcttcctctgtagctccctcacaccttcttaacctactcaccatttttcaagtttgtgttcttaaaatattttttttctatggagtttctatattaagaactcttatctattctaatttttagtatctttgatctctaatttttaatttatgttaatctcacttttctttaactcggtttatcttacttaactttctttattttcgtcgcagattcttttttttaactacattatgatcttattattttttttcttcaaatttctgtttagtatatcgttagtttattttttttaacattttattccaattttccatctaaggatggatcgagtattaggtatgaaagaaaggatattaagaaagaaaatatatttgttaatactgtaacagaagttatatgaatcgaaataaagttaaaaagttattattcatttattttatgaaattttatacaaattacttaaaattaagctatttttatatatttgtacagaatataacttactttttcacaattttctttcaattacatttttagggagttaatataaataggctaattagaatttttgctaactttgacatgtatcaaattttttaaatttttaagatcattaaaaataccccctaaactattgagattgttggatttaaggactttttttttttctaattttagtaaaaaagtctaacatggatgaaagtccaggag

SEQ ID NO: 294956 - DNA, 6136 bp, Cannabis indica
aaaaatggtacttgtgttgttacttccaccatcaactgagatagagatggatggatctcacaataccaagcatgatccaaaataaccaaattcaaggccatcaaaaatttgtaataattaatcgaagacactaaattcatacaatatcagcctaatgtatactcgagtattggacatgtttcttaaaaggaactcattctcatacgccagaagtgaagctttatatccggccagaaagggaaaattttaaagttctctatgactatcatgccaagggatatctgaataatgtctagtgactcatgatgacaggtcccaataggaattagcccccttaaatagaagctggaaactgagttcaactaataggaatcctaagttaatcaacaatttgcatacctacattaaaactctaacccacccacccttgtagcacatgtaccgatatagtttgcatgtcccgcatcagaatctattatgtaggctggatcaggtatcagcataccatgaactatacaacgcataatgctaagacaaaatttagaataataatgtaaattagaagtatcttaagttctcaccttcctcggagaaagcaaatacgccaccaagcatgtcatcattgtcaccatcttcttcacatttctccccatcacatggactgctgctgctatccacatcagtgacaacttcattagattcaggacagtcactctcagcagatgctttacaatagccctcttgaaaatactgttcaaaatctggtgaatcatgtactggtccctcatcaagactgttcatagtcaaatcagaacggttggaacttacgtttgaaccatcagtttgcccaccgccatcaaccgactgaacctcttttgatatagttctatcagcagacatcgagtcgtccgctaaagtagatagtccagttgcaaaagtgctatcctcaacatgagaaacatttgaagtagattgtctagaagagtatgaaactaaatctttgtttgtagaactttggttctgcaggcgcgaggagaatataaattttccatttttccccccactactttgaatggcagattgatgactcaatgaataagaatccccaaaaattcctgataaaaatgacaataaacaggaacttgaattagtagccccttagatggccaacaatgatatcagcatcacatactaatcttaccatctgagggttcaaacgatccagttgatgctaacttagcattagacataacagacatttccgagaagttttccttagcttcgtgagaatctgcagaagaatgtgacccaacaaggcccctgcaaaaccagccagccattacacacaatattttagtaaactcacgagctgccacattcaaaaatagagaagctaggtcagttcgaaacaaaacacacttttgaagcatcgataaaaaagtaatgcatcattcaggaaagtgaaactgttggcaccacaagtaacaagttcccttgtgcatccaagacacttctataatggatgtaaaaacagaacttttgttttgacttttgaagttcttttgtactgttatagattgaagtatgttccataaaagaacttcaaaaaaaatactaatataataaaaaccaccaaataataaaaaacaagtcaaaagtacaagatcaaaagttaaagtcacaagcaatttgctattttaaatctctgcatatatgttaaaatgctagggtttcttagttaaaacttgaaaccctttattaccccaaatctactaaaatcttctattgttaagctaaaaagttcaaaaacagtatcaaacctgtaaaaatttaagcctcccattattgatgtgtgtacctcaacaggcacctcacgcctcaccctaaatgcattttttaaatgaaaaaacaaaaacatgtttttttttgaaaaaatacaaggacagagttccatcaaatcaaaccaaaacaaaaaataaaagtatacaagaatttactgtaaatataacatttacaaatggaaactccaatctcgatgtcatgctgagaaaggaataagtacaaagttcatgtcaccatgacaccataaagctagtctgtctcattaaacttatcaatcaaatattctgccatttctttctatccaataaacactaaaaacatttattactcacctcaaattgagaggtgccttgtgaacagagttagatgttctagagtctagatcgtagagcatggtttttttagttttgggtgagggtggggggaatggtagaacacgctaatatgtaaatgtaaaatgtttattagaaaatagtctgattgtttaaatatgaattttcctcaacgcagaacaacgagacataatacatgtcactaaaaactgttctaacaaaaagaaactactgatagaagggttttacatgcagagtaaaacaaatcagttacataaagtgcactgtgaaaattacctgtcaccccaattggactgcagcacaggaaaatgattaaaaacaggcagaagatcctttcgcttaatttcaacctcattaacaggaatcttttctatttcaatctctccaacagctaaatcatcagtaatgttattagcctccattgaactcatcgtaaagaaagatatctgcagttataagccacaggattacaacaaataaaagacaacaatgacataatgggtcacaaatttcaaattgaacacgtacctttgcattttgccaaatcggtatccttccagagtttatttggacctcagcattagaaatatataaatgggacttttcatgaggttttaccaactccttatcccttgtatcattatcttcacaatcagaaacgtccatgaccatctccatagcttcttgtttcctacatgtaatcccagaaatacattcatctctttcgggccaatcagtccttcgacaaacatcccaccactgaacaggttcgactttcactctcagctcatcatcctgcatctgaagggaagaacccggcccacttcttgaagcagattcagtagactctccccccactgatggaagtaaattatactgaattacatgaccagaaggagcataaaccaacagacgctccaaagcattcaccttagcatggccaggttgcaaatcaggaggaacacaactatgaaaaaccgcagtcatggccccagaaggcaaaagcatctttcctgctgctgatgatgcagcattactaactgtattcagccaaccagagctgttgttttttattctgctaacaacagaaagggttacaggttgtggtggtggagaaaaagattgcttgttcacagtgaaagacgaactggaccaccagggtaaagacagggtaggtaaaagagtaggcccatcagcaggagaattatgtgcttgaagaacagtctcaccaccaaagggagaaagagcaaaaatatgggaggtccccctggatgtaataatagaaacccattggctatattgactaaacaaatatcctgtatcacctgcatgacaagaacaatagaaaaaccctcagattaatcaacacaaaaaaaaaacaattagaagacgttgaggacaggaacatacagcagatgtcatgcctcgatgaagcttgtaaaggtgcacatgagaagtactccagtcataattttgagtacctgaacccatgtgcgagcaggaaggcataattcgaaaaatgttgatattgttgccatgaattgaggccgtaacaagaagagtcccacttgggtcgaaacaaagagcagaaattggactagtgtgagctctaaactgtgaaacaatagcttttgatgtaaaatcttgcacgacaacctggaatggtatttgaataatcacacaaaaatcatttcttgaaacaaatcaacaggttggcaatattacctttctactttaaagctttaccactaaaaattaaatttccaaaaccatgagtatgtatttgtttctgtgtataaaaccaaaccaaacaaatcttttcttttcttgcatttgtgcagctcaaattatgattataatttcacgggtctcaataatagttattatcttttataataactttctactttaaagttaacaagcccacaggttgacaatattaactttctactttaatgctctaccactaaaaattatactttccaaaactatgagtagctatttgtttctgtgtataaaaccaaacaaatcttttcttttcttgcatttgtgcaactcaaactattattatgattccatgggtctcaataatagttttcttttataataaagactaaccattccagcaatctctgattctgtcaaatgcccccgacctactttccaactacagtttgatggaacaggagagccagaaccgtcgggtacaagttcttgatagtatttagacaaagttttataacccatgtcacccaaatttaatatcccagcagctaattgcttactagattccttagcataccgagccatcaaacttccattgctgggtgatgttgatggactgacacctggtggagtaagactctgtggacttagccgtcccacatttgactgcagtgggttattcgaagcataagccaaccatcttggaccaacggccatgggtccataaccaatattagccacaaccattccttggactcccaactgtgggactgggaaagtgaggacactaaatttactctgaagagtgactggatcgaagcaatatatctggaagaaaatacacatacaaaaaaatgttgacaactcagccaagttccaatttgtcagaaagtaatcatctaaaagtaaacaagaagtccaatctaaatattccactttgttaaatgacagggaaccaatccaaaaggaacttactggatagtggatattaacaactgaaaaataacaatagtatcccataaaattacaagccaaagcttacttgtgatgcaagaccaacagccactatttgtggactacatcggaccatatacacagttgagcgaaatctcaatacatggacgtaattgtgagacctcagtgagtaaaaccgaacagcagttggtgaataaacagggtgtccattttgatgttcactataaccatttctggccaacacatctctcccattttgcatcagacctgagctctgtgtttcatcgcatgcaacaaccaaaagtaaaggatgtgatgctgcgaatccttcatcactgttggattttgtaggccgaggctgcatctgcaaaaatgtaactggatcatcgcgtttcgaaacgagttcaccgacactggaggcattttccacatccaggacttgaaacccattggaatagccgagtaagagtacatgtttaatgaaagttggaccaagctctagtttgtcaacacaagcacacagcacctgttaggccgcaaaaaggtcaggcaatgctcgtgggtgaattgaaactaaatactacgcagcatgcacaaattaaattaaaaataaaagcttttcattgttcaaactcgcaaataatgaaggtgaaagagaattaagcattcaaatgaacccttatcattccaaaaaagccacatgtaagttatcatttccttccttaacaactacaatagttctaaattggctaatattccaggttgtacctcctcaacaataaaacttaatgctccaagcaatcaaaaatggaaaaaattttacccaaattattcgcaatcaactgcatcacccctaaaccatcactctacactatcaaataaaatgcaacggtcaaaatccttcatttcactttctattctagccaaaataattaaactagagaaacatccgttcccgaaaactaaaaagctattgcctctacattccactcagttttcctctcttaaaatttaatcagcatccacccaatacacgataagattcaaccgcaaaagaaaatccaaacaacatcaaacctagaattcgcgatttcgattttccatcgtgtccctcaactttctccgtaaccaaacacagagaatatacatatcccaaatccagggaaaagaaacctaattccaaattaatgaaaatcaaaaattgaaataaaaaaaaatatctatacattcaaatatagtaa

SEQ ID NO: 294957 - DNA, 4799 bp, Cannabis indica
caatatcatcaccaaataataaataattattaaaattgtgtagatttttttcttcttctttttaattaaaacgcacaatcttttaatattttcgtgaaatgtccaatcaataattaagatatgattgtgataataataataattattattatataatataccatgatatcatttatacatgtgtgacaccagacaatgttgcttgtaatatttagagaaggaaagtaacaactacccaacaacctctattatgtgtctcctccaacaagaagaactagtagtatatttatttatttatttaaaaaaaaattaaaaattaaaacaacaaatccaaccttttgtagtgatatattgaaaaagggtctctgaatctacctggaaattgaggtgggttttgtctcaactcatagaaaagacgtaatcccaactatatattctatcaatattattattattctataaactatatatagtactctaatataatatttattgattacaagaaagtatatattaaaaaattgattgcaacgttatatatataataaagaaaagaaagataagagtgactcaagtgagagtagtgtgtgattaatgagatgagagagagagaagaatatgtgtgaggaggggattgaaacacgactgtaccgaaatggggccttcttctccaattggacaaatcttatctcatctatctgcttattgggaagggaagggatctcaagattttttttttaaaaaaaaaaaaaaattattattattattggtttatttttatttttattatttcagactcatttactacaatattgctctctttctcttctgtagtggtttgcttgttcgattttaaaaactaggaatggccaaacaccaataatgctgtcaaatgcacgtgataaaaatagtattctcttatatttcatctatatgggagaccaaatattacataataatatacttatatataatcaggtgaggaccatcttgacacattccttgtcgatagaaaaattatttcactgtctaattaattaattaattactacctactttaaatggttttccttgactaaacacgtctatatatttagccagaaccaaaaaaagaagaaaaatttattaattactataattatagtctttaataattaaggacaatctaatatgtgccttttcagaagagagtttagaatacgaaagagttcaaagaaaacgacagttgtcataactagtctctctcttttcactttctttttttaatgttctaattataaacatgttatataaattgtttaattaagggataaacaatattaaaaatcccatgtgcttatcatcagtaaaactctgccaaaaaccaagtgatatatataatataaaaaaaccggccgtttgattgaatttaatatatcatcatcatacgtcacatatataatatcgtatataccacacacacactaatttacatgggttgtttttatcttttacaaaaattaataaatccataaacatatgttaattattctataaatttatagctaaactcaatattcataccttatatatataaatatagtttccaaacacttcatcatcacgaggaagatacatgttctgtgacttctgtccaaatcaatatattcatcatcaattcatattagaaaaaaaaatatttactaaataatatttgtatcaattttatttttatttttcctcatcacgcaaaaccttaaagtatagtactcttgtacgtacactaacatttctctctttctctctctggttgtcatatatataaatatatatgttttagttttagctctctatcaaatagtttcactacagtttccacacatcaaaaccccataatcagcacgcctctcttatatccctgcccccacatatcataagactattcttattgaatatcactagtaccgatacttaatagtatagtatgatattatgaaaaatattagacaccaataatcccttataataaccctattaattccccgagatttctttctacacactactactcatataaatataatataatataataaattattaatatataataaaaccattatttttcatttcactttctcttcctctcccccaaaaataaaaacccataaagccacttcttctctcatcaaaccttccagaaacacgtctattgagcttaccaaaatccctctttctctttctttctctctctcagtacaaatattatggatacttcaccacacaatattcgagaattctaccaccaaacaacgcctttcaccgaaattatgtctcgaacttcaaattctttcaatcttaaccaatacgacgacaacgaacacaacgacgtcgttttagaccaacgatatcgtcacccgaatcaaaacgacaacaacaacaacgaagaagaagaagaaattataataatgaaggaacctatgttcgagaagcctttgactcctagcgacgttggaaagctcaaccgactcgtaatcccaaaacaacacgccgagaaatacttcccactcggtggcggtgactcggtcggaggtgagaagggattgttactgagtttcgaggacgagtcgggcaagttctggcgtttcaggtactcttactggaacagtagtcaaagctacgtgttgactaaaggatggagccgttacgttaaggagaagcgtttggacgccggcgacgtcgttttgttcgagagacactgtacggataacgaccgtttgtttattggatggaggcgtcgacaggctgcggcgcaagatagtgctgctgcgttagcagcagcgcacgctagcaattgtggtggtggtggtgacggttatattaacaatatcaataataataataataataataataataatacagggtggactaggatgttctattctgcgcatccttatcctacgcaccctcattatcaacaccaccatcagctccaacaccatcctgttatgccataccatcctgactctatacatgcaggtttttctttcatctcccttattttccactgttcaaccctatctccaatatcgctttctctttaattttaattttattttttttaaaagaaaaaacaaaaatgaaaattgaatttttcactgaataaaaaagtaaaaaaaaaaaagaaaaatatatttttacgcatgtaaaaagtgcgtgagtaacacgttcctgtgagttgggaggaatgtgcatgcccatacaaatggtggtttcaggttatctcgggggttgtgttgtaatcgatcggagtgaaacggacgcgctcttatgttatttctctttctttttttactcgtggaaaatattactgaaactgaggagtggttttttattttctttttttaacttttattttatttaacgtgcacgtgttttgattttgttataactaggaatatccagtaatgttcctaaccaaacgacgtcgtcaccggttcatggaaactcgaagatactgaggctatttggtgtgaacttagagtgtcatgagcaacaatctgatgagaatgagctcgagccatcaaccccagatggctcgtctctgtcgagccaaggtcctccagctcaccaccagttctaccctcctgctcattattcagatcacatggtaagaaggccagctcttataatattattatataagtaaatttaataatgccttgattattttcttaatatatatagcacatggaataagtatattttaacataattggataatgtatgtcgtttgttaaaacaaagatctagtaggtatattcatacgtatatatatatatatattatataaaatgtagatacatagagatggaacatgatttttcatgaactatagttctaggaaattacatggtctcctttcttcctaacaatatataagttcgtggaattcaggtccatatataaattcattgttaattatatttaattaaaaaatgaggtcactaaaatgattgagttctaaagcatagttcattttcaatgtctttgggattactcaaatcactaacataaatatgtaatgaggattagtggggtccaataatatagctaagaaaataaaaattagtcatacgcttatatatagcaaacaaaaggattatgtccaagtttaacaacatgataataaggggtatacatagtcaacattcatggacattattttagaaaagtgaacatctttccagcctatttttagccccaaaaaagtaacatttggggacgaaaaaccgaacttgacccaattacggtcagtttggtttgagttgatatcaacgtgagagaaaagttagatcccaacaaagcatatagttagaaaaagactatttagtgggtctcatgatttatatacatatattttattttttattccacttgaaactattttgatttttaatacatgatatttctttctcacatgtaaaattattaaagggtagtagtcattgtattaaattgatggtcaattggacggtggtatagttaggccgcatgtggtacaacattagaaactgactttttttttttttctttgataattgttgttcccaaactttttatttagaaaataaaaatgactgaatattatttgtgattgaaacaggatttcactttctcccgagatgtcaaacccatgagaaatgatcgaggataaagatctgtggatgtgacgtccatggattgactaatacttttttttgaacccacttggaatttccccacccaaaaaaaaaaaaaactaaaaaaattaaata

SEQ ID NO: 294958 - DNA, 586 bp, Cannabis indica
cacatatttacagcacactggcaaataatgtaataaaactaataattaaattctgtcgtccctacttggacatcattcaatggattttatcataatttggatatgtacaaactcacgatcattatttagtaacaaatttattaaatatatgtggatgtggatgggcatgtgtatgttattactaaagtttttttccaggaaaatggaaatttgttgtcgagaaaccaaaggcccatttatccatttatgtacggttgttcatgaatataacagatgtaacagatttgtgacgtagtatgaatatgtaatttggtggggttaggtgtgtgattattgatccatttgtagtatttactttattagagtttgaaaattgtaaaatgtttgcttttattcttattactatgaatagtttgatacatcttaataatgtatatgatagatagtagatagataatgatgtatttttaattattaagaatattaagattatttatttatttattgttagtttctacatatgctatttcgtgtcaacttgtggttatatacataacggagtcaattggggcaattaaaataatag

SEQ ID NO: 294959 - DNA, 4396 bp, Cannabis indica
ttttatggttgtgcatatcagatcagaaattctgttaagttgaaaaggatcatgcagaccattctttcgcttggtaatgccttaaaccatggaactgcaagaggtgagtgaataattgattactgcgtcgtactcatactcgtgcaatttgtagtgtacatggaaaacacttagtaaagaaatttactgcaccagtgaaaggcatgattagaatggggccttatttagttttaaaaagaattgcccttttcttatggtctgcaaatcccattagccagggctttgttggcaataaatagctttcacctggttaaagttttgaataatatgcatgctttgacataaaagaaagttgtaggtatttcactgagtagaaaatagacatcattattgcctacagaaaccacactctcttttggccagtttcactcatgttattttgtgatttacgtggtgtgatatttcgttcattatgaacactgaaccaaaaggtaaactatacaccgaaaactgcagtttgattaggacccacacttttacatgtttgtaattattcctgcaactttcaagctcaaattctctgacggccacccaacccagcccctttttgtttctgctagagcagcaattaatttatgatatgtaatattgtaggttctgctattgggtttcgactcgatagtctgctgaagctaactgatacacgtgctcggaacaacaagatgactctgatgcattatctttgtaaggtaaaatgcctcttttgagcttatattgggacttcttttcatttctgtgattgaactgagaagagataatacgaaattataaacattaatctagttgggtctcaaattgatttcttgtattggtgtattgatttgagcttctttcatacttatctttatagttcatctatatctatgataatgattattttcatgtttttggcaagctgtaggttctagctgaaaagctaccggatctccttgatttcccgaaagaccttgttagtttggaaagttcaacaaaggtattttgctgtattatttcgacatttggtatatggatatattatcgtctatttatctatagcggtcttatcattgaatcctaaaatctttagaaggttggaaactctaagcatattttcatgtaggtcctaggaatcaaatcctaaatcctaaccctggtggtagcaagctttggatctgatcaatgaacttactggtaaaatatcttattataatgcagatacagttgaaatatttggcagaagaaatgcaagccattagtaaaggtttggaaaaggtggtacaagagttgaccgcttctgaaaatgacggtcctatctcagcaaatttttgcaaggtactctgaacatcgtgtgaaatcctcgcgacagtttaataatctaattataatactaacataattttcattgataattctcaagtctttaaaggagttcctcagtcatgccgaagctgaagtgagatcgttggcttcactttattctggtgtggtatgtatctaagttttgtttggaggagttgaattttcatctctatggtgtacttgtaactcttaagtaaatcattacaaaattcaacattatttgtttttgcagggacgaaatgcagatgcattggctctttatttcggggaagatccagctcgttgcccatttgagcaaggtatgttaagtagaaagggaaagagaacatgtcttttaaagtgtgtaatatctttactattttcaagtctttgtatggataataaattgtattgcagtggtatcgacaatgctcaactttgttcggatgttcatccgagctcacaacgagaactgcaagcatcttgaattcgaaaagagaaaggcacaaaaggaggctgagaatgaaaagctgaagttgggtgcctcgaaaagggaacctcaacacctgatacaatcttctctcaagagtgggaatatcaaatagaaatagcaactgagttcttagatttagattctacacagttaaaagtgaccgaaaccgttctccaattggttaatatttggtctatgaatgaaaacatcttcaaatataagcgagaacaaacttgaaaagttcgaaaaaataaaaatagaaaaaagggtttctggtgactgatgacaatgttaatatcatgcatctaataattctggtcacatacagtaagtatcttttttattgcattttttttaagctttcaattaagggttatcttttgtgttgttgaattaaacataacatggtatatttgctgttttttaagctacaatgcaggattttgtggaagcattgttggcctaatcataagtgactcactcctaagatatcttcagttgcttaactagatgtaatcattttttttttcataccagaagtttattgtttttttagttctttttgttcctattatatatatttatatttcttatgtaatcttgtatatatccaagtatatggggatgtaaatggctattgtagttcatttttttttttgtagtagttgattatggtgaaatagattgaataaaaactagcaagtcaatcagaaacttaggacctgtttactacccaatcagttttcaagacatgaatgatttgttgaagaagaagcattattgatcatttaaattagctgtgatgtaaaagcagtaaatgactattttattgctttcataatttgctcccaagtaaatatatataatacaagttctcctgaaaacaacaggaacaagacaacacaactaaatgagatcaaaagataagggattttgaatttgaaacaagattaaacaaaacaaaattattaaaataaaatgattacaaataaaagaaagagtagttttgaaccaaaactaaagggtgaagcttggagaaaaagctcactctttaagcgccggccataggaagtttctcttattctagagatgcaacatgaggatttttcaagaggtggcttattctagtattactttcgcccaaacacacttagttgcgaagttttaatgagatcctgcatattagtgctggtatgattgcaccactttatctccatttctagttgaacaaatttatttaaaatagaactcttttttatggtcttttattccaaagagaaatgtgttaaatatcaatgaatggcagtgagttgtttctctgtgatttttattttacttttgcgcattcttaatcttgaaatgtacttaatactaagtaataacacatataataatgataatattaaaaaaaattaaacacatgttaaaagaaagaaagagaaattaattattatatattaatatatcctcgtcgtttacactacagtctatatatatatgtaactgaatattctaaatagttatatataatctgggtcgcctgtaatggatcgtgcaactgcggcggctaaagcaacagtgaaattttgatctttggtcaaagaagctacgtactcttccatttctgcaggaaataattctttattattgcttaaatatgtatcaatattcccatcttctctattcatcatgttcatcttattataatcactctgatcatcatcatcttgattatcattagtaatattggaaagagagagatccagggagattatggaatgatgatgttgatgaggagttgtagttacacaactactactactattattattatttaatcttggagataatgaagtagtagaagtagtattagtactatagtttctcatcatcatcatcatagtattgttattattatttttgatgcgatattgatcatcatcatataattcgtggttgtgttctccttcgtatgttgctacaatgattgacttgttctccatgcttctttgcacctaatacaaattattatttaattaattgatttgaaaaaattatagcttaataaatatttaaatataatatatagtcctccactaaaaaagaagagtacaccgggacatcctctcctattagtgttataattatttaagacattctgtaaaattttgaaaatatttaaaataatttacaatataaaaaataatatccaaacagtaagagttacacgtgcagtacatattgtgtttttagcgtgttaaatttttctaaattttataaaaatttgcagaatgtattaaacatagtcataaaagaagttaaactaaaaaatcctctaaataccaaaataaatagatgtacatcagtgcatcccctaaaaatcctctaaataccaaagaaatttctaaatatatatatgggtgcactcttaatgggtattactcatgaatgtataaaattagaaaattttgagttttaatgcttaatttttctatctaattaaaaaaatctctcatttttatatca

SEQ ID NO: 294960 - DNA, 1737 bp, Cannabis indica
tttttttttttaattaaaattcaattttgctccacaaaaaggttgcaactatgcatctattgtatttttgactttcatatagcttttaatttttttatgacattgtttaatatgaaaatttaagatattctgtgaattttttaagaaaaaatttaaaaataaataaataacacgttaaaaataaaatttaataagcgtgttgtactacttttgttaatttatacatgtgtgaaataaaattttttgaatatgtaaatattagataatagtgtccaacatgaattaaatgtaaaaaaatattaagtcatttataagaatatagattatgttggatcaaaatcattaatatgggctcatattattagtgtattactatttgaagtttgacctaaatataataatcattttagtaattgtggatcattgtgtattaaaattttatgggataaatgtgtagatactttaagtaatatttttaatttagggatattggcgtttaaactacttgaactacacatttagttacacttcccataaaccgattttttagtggtaaaaccctccaaaccttacttatgttatgttatttactactttattaagttttcacagttaagtgacaaggtggattgatttgtgtacacaattatacacatgttatgttttgattgatccacataaacttaatttattttaattatttttacaaaaaaaaattattttaattattataaaaattaattaaatctttaaaagtaatttaaataaaagcaattttttattttttttcttctttttctcgattcttcttcttcttcttctagattcttctttctaaccttcccaaagcattcttcctccttccctaatcgccaatcttcttctccttcttcctttcccctggcaaaccagccagatccattccttccaaaattgcccagagccccaaccatcgtcttccccttctccttcttggattctccttcccaaatcgtctgcagccccttcgttcgactcatcccagaagtcaatgatagtagacgtggtcgagtacaaaaccaagggtctgagcatagcttcaagctcctagatcgagaggttggtccaacgttgttccggtttgaagtcctaatgatatattctgagatttttttagtttttctaattttgggggtgtttacccagatttttaaaaattgataaattagagcttaagaaagatataaagcaaataataatagacaagtaagttctacatagttcgggcgttaataatccctagtccgcgaccccgcagtattagccttaccagcaagtgtttgaatattacaaatatttacaatatgaaccttacccttgtattcctattttttctcttgaggaagaatgaaggtagtaggaatttcagcaaaggtttggtaagtatcaaattgttcacactttgcacatgaaaaataagagtatttataggcacgtatgggagtgagggcatacccttcacccagttagagtttcgtattcaacacgctacaatggttggtactacaacatggcaatctgatcgttggttggtagggagcattcccatcgtgtggtgtacaactgctgccaggcattttgtgggaatgaggacacatgtcactcaaaggtttcaccttgcaaagttgttgtctaggcaacctattggacaaaaaggagcttcagaggcacgtatgcgcactgttgggttttatgccc

SEQ ID NO: 294961 - DNA, 4302 bp, Cannabis indica
aaaaaaacagaaaaaatagaaaagaaaaaaaataaaagaagaagaagaaaataaaaatgtaatcattgtttagaattagttttttttggttttaagtttatcttttcagaaaatttataaaaaaattatatattttgggtggattcgggttaacccagtttttttgggttttagattaatgaaacccgaacccggtttactaaaattgaaacccttttttttttcttcgggttttttgggttttgggtcgggtgggtttcaggtttcggatgtaaatgtgcacccctacttagaaatggtttgaagacggggtttgggttcgaggtcgggggccggagccggagccaagtccagtttatggtaaagatagtataattttttacacaacttattaatccaagtcaataccaaacataatattatattaaaataatactatacaattcaacacaacacggtgcaccaaacggacccttaatgtctcgatgtctattttttttttctcataatatgcaaacatagacaagcaagatcgatacaatttgtgtcgatcatcaaccttaccattcgttttcttggactacactcttttaagatgcaacataaattgaaactgtttttactgtgttttatggaatgacagtctagtggatctcctccatctgcatttgaagtaccctatgattcttttcggaaacaaaggattcctactgcaactgacgatactcatgacaccgactcttctgctgatgtcgtggaggatattaaatctaaggaattggactatgactttagttgttttttcctcactagccaaagactcgatctctacaaatcaatcgattatcgctgcgaggatatgctgactggtaattgtgtcacctaagctgaatttcaatgataatttgagattgtccaattgatgatttatcctaatctattatgaaataatgctagggaactaacctcgttgtgtgtttcgattgtaggagatgaaggacttttgtccgaggccagatggttgcttgatataggccttcttcccaattcaaattcagctacccgagcaatcggatacagacaagtataactcatttaccttgtcccattttttcacaatttagtggacaaacttttacttgtttttttagctgtaatagggaagtgtttacagatgtaagattcattttgtttcatatgaatcacaaatttcaggctatggagtatttattgatgtgtagggagcaaggtggtgggagttctcctagagagttttattcttttttagctgacttccagaaagcatctaggtaatgcctctttcgttagatgatccgtctgtatgattcgtactgcgaactttctttcatgggcatcgacattttatatgaatgtggtaacgagacatatcttgtagatagtttcactttcgattgtggatgatccgtctgtatgatttgttgtagatagtttcactttcgattgtgaatttaacagaaagatagtttcactttcttggaatctcatatgaatattgcattgtgttttctgtgtttcttggaatctcaaatgatgagatacagttctattatgctcttccaggttttcgacaacaaccgagtgataactcgagttctatcaatctgtgaatgtttttttaatacttgtcttatttaaacttcacatttcgtgcagaaattttgcgaaacgccaattgacatggtttcgtaatgagaaaatataccactggctcgacgcttctagacctttggtatgtcaatggagttgtgtttttcgatttcggtaaagtaaattgattattttcatgcccccttttatgcattacatcccattcggtttcggtaaagaaaatagacgcatgtattttactatttgtttgttcttgagcgctcgtgctcacggtagatcacacaagtaaactgaagcgaagcttgagctttcatcagtctttttcggccaagttgctgcgaaaaccggtgacattactcctcgttacgactctcattttgtttttcgtgtgtgatttttacaggacaaggttcttaacttcattcacgatgcatacaacgacaaaagtggaaacattgtagtacccgacgagcttaaaatgaagaaagaaactggtcaccgagaagcctctgaattaaaggcctatagaactagaaacaggtacaattttcgggatagttgtaaggaaactctttctcttcaacattatgctataaccgataaaaaatggcgtttttgtgcaggcaatacgttagacgagaagattgttccgagattttagaatggataagagaaacacaaagtgaaccaatagccaaagtataataattttctttcactttattatgatttagtattgtactaaaaactcataaaccgaaacacagagtccagatcgatttcatgagtttcattgagaggttagaatttgattgtttgtgtcaatatcttgatttagagcttatatgcttatattacaatccttactatttcatgtctgcagcaaccgacggctgctatcgttggctgctcatcaattttcaagcactcgtcttcagttcgttgattttagttagcatggcgaatttgaacgagttcattatcgtattttgtaacttaggtaagaaagaaaagtagaattggattgaatatgtgatgtaatttctattatgcaattttgttaattcgagaaagggtttatatatgcatttttcgggctcgaattcgaatagtgcctgaaaaatgttcttaattgtaccgaagtgaactcaaaattttgttggggcttcgagatatttgtgttgttgtgtttcttcatgtagtagtattaagtaaacgacaatttgtaaaagatagtactggtgtctaacgacgcataaaggtattatactgctattggtatcattttttaagttcgaattgaaattttttcattcattttttgttcttaattgtaccaaagtgaactcaaaattttgttgggggctaaaaacttcgagatatttgtggtgtattaatattaagtaaaccataatttgtaaaaagtaatagtggtgtctaacaatacatgaaggtattgaactgcaattggtatcacttttcaggctcaaattcgaatagtgttcgaaaaattttcattctgtttttgttcttaattgtactaaagtgaacttaaaattttgttgggactaaacatttcgagatatttgtgttgttgtgtttcttcgtacaatagcactaagtaaaccataatctgtaaaagattatagtggtgtctaacaatatatagatgtatcatacttttattagtacaatttaatatcaagttcatatattgttataggagcttcgatcgtttccatttctagaagggtaaagaaaagaatgtcaatcgtaaatttatttagttaaacacattaaatgagtctaattgctcaaaatcaaaaagagaactcaagttttgaagttagaggcatgaatgaattgattcccatataccaaaatttagtggttggtattcaattgatacttacaagagaaagaaacttcttttctctttgtcattttaggtacacttaattatttataaagtgaaaaaaaaaaacttttttttaaaagggaccaatgtttatgacattgtataaagtgattctttatcatttttttttttcaaacctaaattatttatttatttatttatttttaaaaaaataccttgtttatattaacatataaaaaatatatttgttattgtaattaacgcatgcatttttaattaaaaagaaaactatatattatacattaaaatgaggatataaaattgtttttgaacattttaaacaaccaacaattaaaccattattgtaaaactagtctcatataactttagcacctttgattttattttatttttcctatgtttaatttcaaaaagaatatatatgacaatgacaaggttctttgccaaaaatatgtcatattcacaaattttaagaaaaatgtcatattaaatttatattatattcctaatattaattagttttcccctaccacaaaacacaaaaataaaataaaattaattatcatatattttatctggtgaacaaaaaaaaaaaaatgaacaaccaacccaacagtgtcttattctcatttcaccaaaaaaaaaataatcatatattacacacaatttagaaaaaattacataaactgttattttttttaagaaaatttacagttttacctttactttttttttttatatatttttttaac

SEQ ID NO: 294962 - DNA, 3212 bp, Cannabis indica
ttttatgctgtcaggggttgggccgctcccagtctcgctgaaattttgtatttttatgaacttctttctgtccccaagaagggtgaaaaatttaaagatggtttttacaagatacaagctcattaggccaataaaaccccggtacccttcatttttcaaaagaacgttaaggtataccgtcaatggtttttcttttcttctaggttcaaagcctttgagcgcccaaacatgttgacaaactgggtcaggatccctccaatgcaccgcattgctccccactcaacttttcttgaaccatgcccacgtgtttgctggttacaagagagaagacttgaatgtgggggatttggtgatgattgccaactagcagagggctaaacagattttggagagtcaatcgattgaggattttaagttgtccaaggtaatttgtcccaatgcccgtaatcctaggagcaaaaaggcgcttaagaccgacattatttcaaccgctgaggacaaatataacaagtatagatacaggaaggagtatgagctcgaacatgctcaccttttgagtgcttctgagaggcctatccaggagaaggcaggaaaagaatagacgccagctaggcctaagttccctttccccgttttgaactcccaaacccctgatgcgagcacctctggagctcgtaagtcccctttaaaccttcactttgttcctaccatcaaagattattctaacttaaggctagtgggttttgacatgaggctatataagtttcggatgccccatagtcactgggggtaatattgtaaaaggtttttatttttcaaatttgagccatttcttgagtcggtctcaaatgggctctggtcctcctgttcctatacttttggatcattcctcctacatgacctcgagttggtttcttccctcagatagctttcaagggaatgacgacagtagctcttgaatttatgaatttgctagggcaaaataagatcatcacaaaaaaggattagccttcctttctgtgttatacttgcatttgtaattctttagtgtctctttttcttttttaactctatttattttgaacacaaaaatccatggaaaacttgttagccatgttagccaccatccacagccttgagctagaggtgcctaatcctcctcaggtgatggtgagtcctgtgggcccgactgaagaggtacgttagaaccaggaggtggtactaatcgaggaagagtaggaagaggttcccccacttgaccggaaatggaaaggtgtggttttccttccggagccttcgaaaaagcctagacggtcagccatccccggtcctagctcttactctgggatcccggctgaagctgaagactttccagccccacgaaccattctcctaaccccagcccatcctgacaaagagcgggtctagctccggattgccaaacacaattatcaagtggacgagttgtccaaaggcgatgctgaggccgaggctctgaaaaaatgggtaacaaaggttcatgatgggccctttcaagtgagtatactagggagttctgggactcaaatcttgatcccatgaccgactggttcaagcgctacctgggccaaaccttggcaccctttacctcttagatggtaagtcattttgatgttgacctaatccaactcccaactaaaaggtatgcagtctacgcctcctccaaccatgtgtatcacatttaggacatgagtgtggctctcacctccgtaagtatttacttttcaggcttctttttcttattattaccttttgaagacctgacctaacttttactgattgctatcagattactacggaggccggtcatctttctacgacattaattgaccaggggtttaatattttggagctgggaagaatggatggagttctgaggaagctcagggagttcgaggaccggacggagactctttgcaacgatgctctagcagagaaggctctcaaggagcgagatcaggaggcgctaaaggccaaagatgacaccattacttcaaaccagaaggacctcctaaatgcccgagaggagattcagggactcacaatgaaactcaagactcttgaagagctacataagaccaacttagagactaccgcaactatgttggtgaagctcaaagagttgtgtaagtttcggtaacagacacagaaggaggctgcaaaggctgtgagggaagctttactaactttggtgatctgtaagcattgtatgaagcgcttcgaggattgagtttttatgtgctggaaattgaacagtttgcctccacttcatgcctgatcctaaggataacatggtccgcttctaagaaaagaacaagaagctagagtaggccttgattaagcagatgggtcctcgtcttcctcccagagttgattaattaaacctttctttctcatttcctttcactcctctcccccttaagacaatactttaatttttagtttttattatcgttttctttttattaggggagaaatttttatggcctttccctaggcctattttttttagacaacttatactttaacgaagtacttgtatttatctatttgtcgcctctttttgtttttgagtttttgattttttcctatctatgcgtatgtttatgccttagtacccccctaagtgacttaaaaaggaatttcgggggcacttagcttagatttactagtgataatgcatatatctttgttcactacaggttaacttacaaagtgcgaagatgaaattaaatactgaattcctaactatgatagtatttttggagataatcagcattctaggctctgggcactatggatccgtccattcactttaatttataagtcccaaagcctatttcatcttcgactttgtacgggccctcctagattggtctgagtacccccactcttgattcttgggaggctgggaagacccttcttaggaccgatcaccaatggcaaatttcctgctcttgactttggagttaaaatattttgccactttcttttggtatgctaccatgcgtatttgtgactcttcccgaagttcatctactaagtccagtgccccttgtaacaaggcttggtttgttcctggatcgtaagtagttctcctataagaggggattatagcttctattggggaccatgactgtaacaccctaactaacataggcgtatacgtgatt

SEQ ID NO: 294963 - DNA, 5019 bp, Cannabis indica
attaattaagaaaaaaaaaactgtttaaaaaaatattgaaagtgatttttgttatttttaaaattttgattctaattataaaattgaaaagtaaaaacagttttatagaacatgtttttgaaaaatattttcacttttctacttttaaaaacagaaaactgattaaaaaagtgttaccaaacgccacctaaacgtcctcgtctgaacatattgaaagtatgattgtggtcgtgcagtactactgcatattgagtttagttttgattcgttttactctgaatgtgctttgttgatgggtacatttattctttgatagtattattttaattatttggtatactaaaacatctgttcttttgtagacttggtgtggaggcttctggatatgaagataaaggagttgatcaattaagacgcaatttgtcctcatttttccgcggtggcatcagcattatggcaggtctacctattcaaattgcaacagttactgctgcattaggcattctctctatagatttcaagacaatcatcgaaaccaaggaaaagttttcgggcactgcaagtgagtccatcctggttgatatgattagaaaatggttctttttacttagcaagaggcaacaagatttgtctttcagcattttacagactagtggtgtaaataagtagtcgtatacatggtgttgtgaaagccaaattagcaaaaacatcagtattcaagttaatgggaacttcagtcaatttttcaccatttgatagcacatagatattgaagaacttgaggaaattttagacagctctggggattcaatctatttttctttctctctttaatttcccatttatatgggacctgtaaatgttgactctaattactgaggattgcaaaagtgctggctcaatttgtttcccatttttgtaagttagttccatactgttttattaatagggaagcatttggtggattctatattgtagatctcagctgcgtagtatagactaattcagtatctgaagaaggtgtgtggacattgattgaaacagaattacaatatttgggttctgttctatgtttgttgagttgattattgttgattctagtattgtctgaaatcagactggcatcgtcagcagcaggaaagcctgaaaaccatcatgtctccggctataatcattttctattgcctcaacagatgtttagatacatttcaaagtgatgagctcggatgggcagtgctgtattacctgtatgtttatctaaccttaagaccattttatgtgtagagcttatttggtggtatgccctgttaattttccttttcccttttatttgcattttgaggatgttgaaaagttgagagtaatgcaggtttgtagttcattgtgtaaaaagttggacttgtatattttttgccttgttttccttttcggctaatggtagtgagatatgtgaatgtcttgtcctggactagtggactcatttgcaattacggtaacaaggtccactacaggactataagataatacttctttctttcttagcaaaagaaataaaactaactagtttccatgaaatccatacataaaaaccattttcttttcctagctaaacttttctgcaggtgtatcacatcatattaaatctagtagaggtggaatactctgttcatttctgaagaagttgtcaggatcgaccttgttcttcacttgaactagtctcttgaagttacccttgaagtactttgtaccccaaacacttgcttcttcaaagcttgtctttcccaatctatttgtccccaaatcaaggtctctatagttaatataggcagccctaggagagtttgaaacgtatggccgcatatacctatagagcattctaatccatcttacatgtttgtttgacacgttagttccatcctcattccacttcactaagtactgtatattgtacatatttcctttcctgtgagggaaatggagtttctgaatcaggaatctcattcatctttcccccaaaagggtccattatcatgcatacaaactgatcttcttccaaaagcctttcccaaatccctttcaatccagattcaggtataggttgtttcacaaagtcagattttcccttgaaagagcttttataaagagtcttcctatcaagtaaaagctctattggttgatctttttggtacccagcaaagtacatgactgattggatccagtccatctcaatacaatcttgggcctttaaacccaactcaggaaacctctcattcatcaaaggaatcagttcatccattcttccaagaaacagtgagttgaaagaagtttggattgttttctgatccccattccccacattttggataatgattctgatgaaaagatcatcaggcaattggtcaacaatggactgccacctatagacaagccaagtggcaccctgtgagagagttttggtaactgtaaagccagtcactataggtggtattttaactaacttgattttccaagaaagaacaatcccaaaactccctcccccacctcctctaatggcccaaaataagtcctctcccatactttttctatctagaagtttcccatttgagtcaactaaataagcatccaagacattatcagctgccaacccaaattttctcaccaatgtgcctaaaccacctccactaaggtgccccccaagacctacacttggacatatcccagctgggaatccatggctttcactttccttggcaatagcatagtaaagctcccccaaagttgcccctgactgaacccaagctgtttcatcttcaagattcacatcaatggatcttaggttaataagatcaatgattatgaaaggggttttggatagataggacagtccttcatagtcatgaccaccactacgaattctgacttgcaaatcatttttttggctgcacacaacagctgcttggatttcagactcgtggaaaggagtgataattagaagaggcttaagggctgtggagtttgaccatcttgggttctgttgagaagattctaagagtggttggtatagaggagagtcttttgtgtacatgattttgaaactttgggtaaaggatttgaattgggttgacatacaaagaaagaaattttctttaacatgattattacaatttgcgtccgagaaaaagattattgatagaaaaagcaaagaaatcagtggagtgaggctcttcatctttgccagtttataattatacatgaatgagaaggttatatatcaactttgaagattattaatttgtacatgttggtgaaatggaatatttagtagaaagattcttaagtcggcattgttacttctattagttttaaaagcattttgtacatacaaaaataattaaaggaagcgatatttcccatgaacaggatgatgagcaagagtatctatcaaaagaaatttgtcttttttatatctcagtttaactaataagactatgtataattatctatcaaattgcttagtttaagatcttggaaagaatccacaatgaatttaaatatttgaggtgttatttacacgtcagttatatgcatgacacgtagcattaacaataccacgtacgtttccatatgtccacaagtttggttgcttaataataagttaataaactttttgtacgttcactcatcaatatcattagcctctattgtgtcctatttaaactctgattgtcgtattctaatgaaaacagtttgtagtttattctggctcctagtagaacaatattttttataaaaaaaaagtagaactatatttgagctgttgctgtaactcatcaatattaacaaaaatttggccaacttaaaaaataaataaattaaccaaccctctaaagagtatcggaaattattttacaagagttaaaattattaatttcaaaatataaatatatagtaggaatatttatctaattcgatccaagtaagtgcacatttcataacatattagatccaattgaatctatgataatgtaaattgagtgcattggatcaattatttatttattaagaaaaaattactttattaatcaactaatctttagagtatctgcaataatgcactattttatcaagttatagtatgaaatattcattctatttcattccaatgatatactaaattatgcacttaattttatactattaatggtggtagattttgaatttacaccaatttagtattttttttaggcattctaacccttattttattttattttaaaaaacaatctctttaaattaaatttatcacaaaaataataattaattgaaattacaaaataataataacttaatattaaataaaataaacattaagtaaaataataattttataatcaaattgaccacttgaggatcttaaccttgaagaatatcaaaatattggttatatcaacttaaattattgtgagaatcttgatattcttgagaaacttcgtattgttgatgagctcttttttgcataatttttatttgctcattttgaaaagtttttagcggctaaaccctctcaactataatttcacttgcatttaacttttcaagctcaaattttggcagtaaaaccctccaaactactgaaccaatagtaaatttaaggtgtcatccgattaactgtcaccataaattgcttatgtgcatactcttgtacacgtgacacatttattggtatacaaaatattattatttaaaaattattttcaaaattcatttaaaattaaagaaaattataaaaataaaaaataaaatattataaaatttgaaatattttttctatatttctaaaataataatattaggtgaaccaatataaacgtgtcatgtgtataagaatatacacataaactgtctatgttagcagttaactgtagaaagtggatgacaccttaaatttgcaaacaattaagtagtcaaaatttgagcttagagagttaaatgtaagtagagtgatagttgagagagttt

SEQ ID NO: 294964 - DNA, 3659 bp, Cannabis indica
tatatgtataaataatatatatacacagtatatatgttctcttacataaaatgtagctataaattgcaattcacatatttaaagattgcaatttaaatttaaactcaacatatttaaaaaaataatttttttaaactctcttcacatatttgaaaaatattttctattaatgttttcttttaaaaaaaaataaaataaagaaagtgttcataatatgtgacttatctattttagttaccaaaaataaaattcttctaaaaatataactaaacatagtatctgtagatatatcaaaatataatgttacaatatttatcagccaattacatttaattaagaatggaccatattttaaaaaatcaggattgatttaagtggacccactgaaacagcaaaatctgatggatattatcacaacaacgaagacaatttgataggaaaccacaactccgaagaaagaaacgctagcatgttatgatatgatattcaaggaccttcaataccaaccactaatgacaagactagagaaagtgacaagattacatgtaccccatttatgatttattatcaccatacaatattttattccaaactggaacgctactaaatcacagtgcaatttaaatcggtccaagcaaacccactaggaaccgaaaaagcacgcaggggcccttacaactcactacccaggccatgccggccaaagccaaacaaaacccatatgtctaattttcgaataaaaaactcatagatttttttactaaataaataatacccacccaccaccctaatttacaatgaaagcacttgttaccatgtgatgactattttattaaaacaattgggtgtaggtaaaagtataaatggcacattaataaataaataaaaaaaatgtaatgttttccctaatctaaacccacaaacagtaacaataaagccaaaaactgattttggaaaataataaaataagatatagtagcgagaaatccagtcaccaaaaaaactaggcagcttgatgtcaccataattaatttttttattttggtttttttgcgtgaaagtgatttttataattatgatggccgacatgaatcagatattttaattaaaaaagttcaggcttttatggatccaaatcataaagatatataagaaaatggcatcaaatctaatccacagcactatttccataaaggaaaaaaaaaacgaagaaaaatagaaaaacaatcctaaactacatctgttgagatatcaaaattaagctaataaataaaatataaatacacaaacatataaacatgtctacatactcctataaacatgtatacataaaagtaaagagattcaatcgcatagccacgattcaataagagtttgtacaagtcagtatactaatttttcgaaagaaaaaaagaatttctttcatgtataatattacataaacatcaaaaaacgaaaccaaaactcagattaacgagcatatgatatgtcagacacatttcaacaaaataatcccttgaaaaattaactttgaaggaaaaaaaaaaagaggtcaataataatgaattccaagccaaacaatataataaactcaaagagctgggaagaatgtacatctagatcagtagatctaaataccattagactcatcacaagaaaaaatcgaatatcgtctggatcgataaacgtataccatatatattgaatattaattcagaaaaaaattagatttacagactaaaaataaataaatgaaccaaaaaaatacctgaaagcaagcgatagaagcgttctctctccttcgttctctctctctctctctacgaggtgagaaatggccgtttggaatgaggcggccctttctgaagggctggttaggcaatagccaccctatttaagcttttttctcagcccaaagggtccacttgatctttctctcctggttcgctaagcaatttgtccacgtgtcacacttttaatggactgctgtatttgctttatttatgtgaaaagagtaaatatgtccatcgttgattttgaaaatttaacggctgagatcgtgcctctatcagttaaaatatcttgcccctgcttcgttggaacggacttggtgggttaaataaagaaaataacctacttctttatagcctaattataataataaccccttttttatatgtaattgttttttaattttcttcaaaataatcataacaaatttaatatcaatatcaaacggtgaaaaatatctataactaaatttaatactggtgcggctgaagggtttcaatggcagtctcctctgaacaaataaaaaatgaatgttgatgctgttttacaaaacaaagttggacggagagttatcattaggaattctacaggtcaagttgttgcagctctttttaagactctaatcggtagatacagaccacaagaaatggaagcgaaagttttactctctggattagattgggcctctcatcataacttccttgtgagttttattgaatctaattctcttgttttagtcaattctattaagggacaatcaaacactatttttttctttagtgatctagtgatagatattaaaaatcatttattcaatctctttcatgtttgtgtatctcatgttaagcaagatgataattaagttgctcacggcttagctaaacatactttagtgttagataatgattgtacgtggtttgagaaaattcctctaccattttttctattgttgaaataattctttttaatttataataacaagacttttatatattaaattgaggtaaaattatagcaaagcaaaaatcctaaaaattgtgtattgtctttaaccttaaaaaaattgtatttttataagtctgttaacagttacttgctcacgtattgataagttttaattttgaaaaattacaataatagtttcatgttggaatttttgtgaaattgtataaaaataaaaaatggggtgtgtgaagtgattggagtcccatatggaatagatatagtgcaagtttgagattttggtataagcccaagagtatccagttttgaggagatgagtgaggtgtcacttaagatgagtgaggtgtcacttaattttttttaaagaaaaattatttaattaaataaagatttatttttttatttatttattaattaattatttaacgttaaatgaagtagtaaaaagcaatcagtcaatgatctgctcttcactgccatgttcttactcctccactactaaattactgttttcttaccgtttaattttagatcgacttctctatataagtcgtatcagaacaacagaagaaaatatctttttcaacattaaaaaaaattctttcttcctaaccatttttctcgaagcaaaatttagggtgtaatcgagcgatatagttcggtgcagaacatatcgtatatggagactatttgggaacgtcgtggttgcaagactgtcgtgcacacttcgagtagagccacgaaatgtcttaaagaaagtgacattgtccgcgactcagccagaatgttctatcggtaattcgttccagtttcattatttttaaattcgatctaacaattttaagatgttctgttctgctatggctactactgataaattttctagttctgcttctaacgatatt

SEQ ID NO: 294965 - DNA, 2020 bp, Cannabis indica
gtcaaaactaaagaattgaccaaacgatactaatttattaaaatgaaaattgtttgactagaattgagccctaaaatgttaatttgatccattttgtaaacacaatattcaaattatcacaatacgggagcatcacatatttatgatattttttctaagtttaattgttatattctactaaaaatagttctatattcacaagcagcatatacatataataattttgatagaaccttgtttcacttctagtactattaatattgtaataacctaaatcctctttttatgccattattatttatttcatttttcacatgattagaaaataataaaagagatagtttcataaaaataataaaaacaaaaaaaaaaaaatacaaaattttaattacataaaatacgacttattgattatattttttatgttatacttatgttattttgttgttgtatttttgtttatttattattttagttttttatgtttatgtttatgatgttattttgttgttgttttattttactttcatataattttctgttttttttatatttttatagaatacagtaaaattttaaactaaaaaaaaatttaacaaaaataacaatttatgtaatttttctaaaataaaaattatctattggatataaaaaaataagaattcttttttccattcacaggaaatgcacacggaaataaaagttacaataatttcatcttggagactcctcttattcttaatggtggaataaataatatttctttcctcagtgttatggttggacttccggtaatagtctttataatgtggatttaaactttaaatatattatttatctaatcatttcatgatatttttatatgaaaaaaaaaaaaaattcttactcttgttttttttttttgctaaggattctggggctttcctagagaagagatttgctggattaactaatgtagaaatttatagcaaatttggaaatgaatcttacaactttacaaattacgaatggggatatcaggtagccacaactattcttacaattacaaccatttaagtattttatttttgaaacatgcactttacaaacatctaatgtttgttttgttatctttttaaatataatgtgatggaaaaactgacataaatctttccaactcattataggtcggattacttggggagaagttggaaatatataaagaacaaaatttgaataatgttgaatggaataaatatgaagacccctccaatcataccacactcacttggtataaggtagtttaagttaaagtacaagataatttaatactcgagaattaattatcttgttgtaaaaaactcattaaactaaaaatgataacttgagcaggttgtatttgattcaccaaagggaaatgatccacttgctttaaaccttagttcaatgggaaaaggtgaagcttgggtaaacggaaatagcattggtcgttattgggtttcatttcttacttcaaaaaatgaaccatcacaatcactgtaagtactactatttttgttgggctaaaattagttaatacatcttttactaaataaataacgtattagttatcaaatcatttatttaagtgataaaattcaaatattagattttagtgataattcaaatattgaagtgtggatcctcatggattcttattgaaacattgattgcataaacttcattacaaattaaagacaacgtaaagaaccatttcattccatgataatttattttctaggtaaagctctttggcgatattatgagcaagtttatttgcttccttaggtatataagaaaggcaaactttagggctgtaaaacaatgtgaactactaagtcttaagagtaattccaacagcttctttattctattttttaaaatactttattaaaattctatcttttttttattttactatcatataccaaattctctataattcgtcgacatcatttaaataatacattttgaaataattttataattaaataataataaa

SEQ ID NO: 294966 - DNA, 1276 bp, Cannabis indica
agctaggatggtgtttgtacatgtcatggcagtgaaaactggagtgttcggtctcgggacatttggggttgttattttgtagtcgttgtgcgaccagactatatatattttggataatattgtaaaagtgtaaaaacgagatcccagcttttgtaaataaatgtttaaaagtttataaagtttagcaattaaatctaaagttttaatttaacacgattttcaagaaaagaaaaatcttttgattagcaaaggttgcactgtaattgaaaaattattgtagcgcctaagtatcagggcgttacattagtcatatattttatttttatcaattatgtttatataaacatagtctgatgcaggttcatttcttaaagataaggaatatcatctgtcatgttgtttaaatatatgaccatgattttctccaccataatgtacgaataaaatagcatagaaagattaataccatatttaaggtcatgtttggtttgatgtaattgagattggaacagaatcaaaactgctattataatctttgaatttatttcaaaaatgatgtaatggaattataatgtaaaaatttgttaaattaaatcaaattatttatgcaaatttagcttgaaaccatttgttccagattaaattaatgaagagaaagttgaatttggtcttacataagtagaggtagaaaactgagttagatagtaacacgagtcgaaacctggacggaataaatgagttttagctttccttaaatgagtttgttttatttttgggttgacacaactaacccatctattaaactggtaattttgtagttgatacacctaatcaacacatgacatgacaatgatctatctaatagtatacacttttatatttattatatctaaattggattaaattagttaaataagatataaacatcttaaacgactaatagatatattataaaacagtgtaaacatgttcaatttgttataaatatgttaatgggtagttgataaattaaacaaaaataatctttcatataaacatgtaaaaaaggtcgagtcagattaacccacttataaataagttgggttttgagttttagttttcaacgtgattaataaaggggttgaatttgggttctaaatttatttgtaatacttaatcatcgacatgatatgaacacgactcaaaaatactaattgccacgagaaaagtacatggtatacccagataagaaactttattatattatttgtaacgccctaatgctaaggcacgctac

SEQ ID NO: 294967 - DNA, 2837 bp, Cannabis indica
ttttagggatatcataaaagttgtcatattctacaaatattagttattatttgtttagaaaaaaattttaaccaaacgtaagcataaaaaatcaaatttccctttaggatactagtactaaagaaaagccctgtagttaaacttaatataaacatatataactaaataaatatgaactacgtacacaaaaaccattttagatacccaaaaccaatacttattgatggacaaaattcttgatatgtgacatcatttcctgagttcgaagttgagaataactagagttatgcagaatttgaaatgcatgaccaacccctttatacataaccatttctaccttcttccctgagctaaccaaagcgttacacagagccaagtttctgtctctcaatatatccatttccgaaacacaaaccattacacccacattattatgattattattattaggcctcatcaagtacttgttggctgattctccattaatattgatcaaagggttgcaccaagggtggtcccggttcgcacccaaaggcaaggacagtctccaatacgtgtcagaagctgagagagtcaacgccgagttattcgatggttgactcccatacttctcagacccagttctcgtctcacccccaacaaagggttgaatcagaatcacacccttcagtctaaacggcctcaaaacggcgtcgtccgaggctgcagcagctagccgagtagtggctacgtgataagctatgcttgctccagcgctgtccccagccaagaataggcttgacatgttgcattggcttagccagctggaattactactactactactactctgagtctgagcttggtgtttgatccacatgagggcgttgaagccgtcctcgtaagccgcgggaagccggttttcgggggctaaacggtaatttaccgagactattatgcagttagctttggtacaaaggtttgccaagaattcatggtagcagctccatgcggcagagcccacgcagaagccaccgccgtggaagtaaacgagcaaaggcttgagctggtggcccgtcaatggcggcgcagcggcagctgggacataaatgcgagcccataggttggtgtttttgtccatgacaacgtcctttgatgtgaccaggtttttgtttagtgaccatgtgggtgggacattggggatgatggccggcctttcgacgcggccgtctttagaaactcgaattaggccttcgatttcttcttccacggtggctccaccatttaggttgtggtggtggttcttgtatgatgagcggttgaaccgtgggtccatggaaatagcagccattattttagtagaaataacaaactaagactgtaattaatgttgtagtacttctgggggagtagtattatgaattgtgtgattggtattgggacttagaaggtgtttatatagataggtatacataagagaataagtaagaagaatattattgttagagaactcgtcatggcgatctttctttttctatattttataatatatatatgttgcaagtgggctatgtatgaactcattcactgcattgtatatccatcaccttagattctctcatggatatatctgagatcttccaaatctcatttcgttaccacatgatcgatcatatatttcgtggcttgtaaatttattttgattcccttatcttcaaatgaaagttgattttattcactggtgtgaaaagcagggaggctctctctcgatcgatcgatctagaaaagtaaactttgctactagatatatagctttaatataaatataataaatatatagatttatataacctaaaacaccacgtgcgaaaggtgttgttaaattgaaattttttagacatttactaacttcataatacatgtagaaaaatatcattaattttgcttatctatttcaaattttgttattcatatgtactgttttcatatttggcccttttcataaaaacaataatataaaagacaaaaggaaattatttccttatatttaagtttatcaatattggtagaatcggatgcatttcatcaaatccaattctactccttccatttcaaatatcatacactctctcttactcacttctctatctctcgttctctgaactcactccaaggattcgactcacaacccaccacccactacttcggtctcttctctccacgaccattgcgaccacaaacacaacgatccacaaacccaatgaccaccgcagacccaacgacccacggacccaacaacaatgaatctaaataaatcgattagataaaataaataatgaaaagtaaaaacaataaataaagagaacactagaatttctagacgttcggccccgtgacggtagtaatagcctactccccttttgattgtattgacttatgagacaaaaaacaaaatattctccttctaaagctcttgtaatagatctcataataattctctcttagatcgttagttatcacttgagtgttctttttgaattaatttcgtgtccttaaatagtgaaattaaatcactatttatatgggctcatatattagaaatattagtaagtataaatttaagggagaaattttaaaataatgtaagtataaaaaatcaaattttcttattgtaatatatacatggcacaaataacatcctaatatatatgtacatgaaactaaacaacctatacaaagcaaacaatccatactcacacccagccataatagatcacaaatttattaacttgaaatgggagtagagtcttagagcatgtttagtattgttttctgttttttgtttttaaaaaattgtt

SEQ ID NO: 294968 - DNA, 3456 bp, Cannabis indica
actaaattatatataatatattatagagttctcaaattttcatttgcaccaattgatattaaaaaaaacttaaaataatttttaaaaatctcttaatacttttcccaaaaaaaaaaaaactcacatcattttatattaatttcaatacttatttaatttttttttccaatttttttaatttttactaataaaattcatttcatataattgtttattttgatcttttgacaaaatatttaaaatatatatattttacttttcactacaaaaaatcttacttttattaattatcattcctatattgtgactaaaagattcgttgctaaaagtattcgtcacaaaaattacagtttgttgtgactaaatgtggttttagttataatacttgttgtgactgagaacttgtgtctaaatactatgttttagtcacaagtaattttttgttgtgaccaaaagtcacatttaatcacaaaaattttatgttgtgactaaaaagttgtcactaaaagtagctcttttttgtaatgtttgtttgataaatatattttttaagagtatgataattcgaaagaaaaaaaattaaaaaaatactataattgaatatgtatattttatacaaaataaaaattattaacatgcatgagatgcttttataaacttttgagtgtaaataaaacttactgtaatttttttatgtagcactatttaaagtaaatcaaaacaaattacgttacgtacatgataattattagcatacaactgcaaatagaagatttcataaacttgtttaactacaaattaaggagaaattaaaagtagggcagccttaggttaaaagtacggcagccctaagttaaagtaggctaggcttgcgattagggttcactcttattaggggccaaaattaaaaaaaaaaaaaaataataaatatatatttttttaataatgtttaaaaatatcatttattgttataaaaagggcttaaaaaaattatttttctaaggtctaaattaactcaaaaccagccctaattaaaagtcctttgggaatctcaaattatccatctttttacatcataaatgaaaaataaaacaacaatgcatgtcttaaaatgttcttcatttaatataatgaacttccaataataataatcttatttcatttttcctctttattcattactatcatgcaaaatatcactaaagatgagaaataatcatgaatagagattgatgatcactcatgaataagttaatcaccaaaatctagtcaccttattacatgtgtttttcactattggctcccttactatctaatactaattctgattttgcactacattgactagagttggcaaaagtggatgtagtagggctacacttggccaccatccgtacactgccaattagtgcctcaagggatgaattttgggacataacctcagatagttgttcaggacttatagccaacttcactttccaaatgtccaaatttccctttttcttcttcttcatcaactttgtcatcattctcgttatcagattcttctttttcttcttctttccttcttgtcccgagtcatcatcttcacaagatgagactcggtatgatatattttgaggggtcttacaagggttgttattattattattaattacgtcggtgatatcacgatgcaaaagatagtagagctcaccagaattgagtcgctcgtcgtggaggagtggattaggaatgatcacgtcactattagggtttcgacggaataaggcgtggccagggaactccgcgataattgagctgacagttatgggagcatagaactccattacaccgccgcttgacatcataactttgactttgactccatcatcatcatcatgatctatcatcatcggatctgacgtcgtcgacgacgatgactgatggaactctttcaacacacccacacagttccccatgcatgtaaatgaatctaaattattattaattatgtattgttattatgaatatcgattattataatgtctagagagtagtacttataataataagttgcacgtttatgcctatatctacaattagatcaaaatattcatttaatccattccaatccaaaacaaaatcgagtttttaaaaatcatcatcataaattaataatatttatggaaacttgtttagcatcatatactatatatatttatttattttattataataaaaattctatttttggtattgttatataaatttgatttatataaagaaataaaaaataataaaaaatgaaataatgttattaataatggtaattaagtttattatatatcgggaaacttaatttgttgataatttgttttttcagtactttttttgttttataaatttttttagtatttataattggtattatattttattagtgtaattatgtagcggatctcatataacttaaaaaaataatttttaaaaaatatcgctaactaattttaaggtgtcacctataaaaggtactggacaatgcttaatagcaatgctctatatataatatttataataatattgaaccaaatctaaaaaataaatgttattaaagacccttttttatggaccagctgattcgatgaccctaaatggatttagtaccttaatttaattcattaataaatgtcttttatgttttttttaattgctagttaggaataattgtaaatgaattgaaggtagctagctgtatattaaaaaatcagaaattattacacaatatgcaagaaaatatttatagacccaccatagacataggaaaaataataaaaatattaataccaaaatttgcatatatttcctgtaatggaaattgtgtcaaatttggaatttgtatgagtgttcattggtatttactagcttaagtaaatctttttaatcaggtaatttattattttttttcttttggtaattaggtaatttattatttgatcttgagaattttgatacattaagtcaacaagaagagactccttaattagtgcttaattgaaaattgtgaggatgtgttgtgttgaacaaccataatacacttttactaattaacttgtaatcggaattaaaataaattaataaaaaaaataaataaatctaaaatataaaataattgaaattaatattttattatattttttctattattaaattgacttaaaaagaaatcaaaataattttattttagtaatcaaaatgttctaatttcactaaattaagaaaatataattttttaaggaaatagttgttttttatttgtaattaataaaaattacatgaaaataaaatatcattctatatcctttctttcttactttatatgggttccacttgttaagaaaggaatagaatcaaatattatacaatgattcttcgcttttcaggccgactttgaagtttagtgggtcatacaaaaaa

SEQ ID NO: 294969 - DNA, 9504 bp, Cannabis indica
ttgtaaataaaattacttaataaaaaaactatttatctgactctctaaattgtactattaagaaaaccggttataaagagttagcttgtgattgtcctattagaggtgtcacaaacctcaaatggaggtgagggacttcataagtccccttatatttattatttttttcataaagtaaaaaaatgtaatcatttaataataatattattttcacaaatttaaaaagtgaccattagagatgctataatagcttgtgtaagtgtaaccatgtaattttagacattgattaaactatcaaccgtcacaaaaacgaccgcactaggatgtacaacccaccaaagaaatgctgtaaaaacagtagataaacaaagccaaaataagtatacaattcagcctatagaagccaaacgcactaatggttgagtaattgtaaagaaaagaaatatatcacattgtgaatgtatataacatatccaacctctcaaacaggattatccaactgttacagagccatcaaaccctgaacgtacataaaattaaatcaatacatgagaatacatctatagaatccaaaaatgagcagaggaaatagaggaaaaaaattctaagtaacaagaaaaattgaatagaggaattttatggctttcaagtatgccttgaatccatcctcgttaaacagataccataggggaaccagataccgaggaatatcatcgttttatatacacacccttttcttctcatctaaaaggttctactggaaaaatcatgagttggtgctgagaaatctcacccaccatgaataaagtgaaaacatgaatcgtcaatgaatatcagccacccatctaaaaatatttgtgtcctgaagaaccagatggtggtggaggaggtggcaatcggttaggagtgcgacggctggcagagtttggtccagaattaacatcaccattttgtgctggatcactgtaatgacgactgtgaccgttggatgaagatctagagtaatccccgtaggagttggagtcagccgggccattggcagcagcatcaaatgcagatctccagtcatcaccagatgggctgctgctagttcttgggctactttctgtataggacacaaagtcatcaagaggaaagtttagaaggaaagcatcttatcaccaatgacaaattttgaaggacaaacattaaatatcatataggattagtaaaactaaaaagtacatctagccacgtaccagctccaacactaccaccattggaccagctggaggcagcagatgcccggttgtcatgaatgctaagttgacgagttaacttggagagaagagaagattgtttctgataccgttccctccgacgttttacgttctggtcctcttgaagtagttcttcaatttttgctgtgctttgagcactaccaaaccaaaaaataataacattgagtgaagattacataatcacggcaggatcagaatctttataagcatatggagacagaaatacagcaaaagttcagaacatgaattaagaaaaacgattccaacctgacagaactatataactgattcagcatatcttcttttgccttctcaacttggcaaagaacaactgcctgctcaaccaatcaagaaaaattcacgtcagctgttcttttcttagagaggaaaaattcaacttttgaactctgtcagtaaagaatcaagaattgagaaaacctcaatttcaacatcagaatctaaccttaggtacattagcagccaaactgttcaaaactgcttcaacataaccacgtacttcttgagacatccaccgaagttcttcttctggatcagcaggtcttcgtgtcattgtatccttaaaaagagaataaaaccaagttaccctgtattcactaaattgagtattgagtagaaactaaagaatgcttatcaacctcctaaatattaaaacaaaaaatgttgagaataaaatacaaaagattttgacataattttcaacaactgacagccacaattaaacagtatctagagttgctctaacacaccaaggaaccatcagaaagactttgtcgcatggtagggccaccatcattggacaagcccctcccccctctcgaaggttggataacgtttctgattttatttatccattcaaccttgtcactcatactttcagccttcaaaatgacagcactgtgtgctgcaagataaaagaaaaccaataactggaaagcaaaaaacgcaagcaaagtctacagacaaacttttctaggattactgcccatgttcagatagaatatgatacctttcaacacagttttatatggaaccttgctagtaattttaaagacaagactgccttttccagaatctggtccattagccttcttatcctttgaactctttgaagggggttggtcttcctcttctgacgcttcttcaacattacactcctgaaaatataaataggtgttaggccccaaatacatttcacatattcaaagtacaaatgagacccatctatcagggaattagtactatttgcattttgaagtaaataatattggtcagagcgattgaacacttagactggttttccatgctagaagggtctgttgacttagtgtatatagagaagaggcaactggttatgatggtcgttatatgatattatcgaactaagctatgtaggtctcttaaatgcctagatactcttttctctattgtaattgcctagtaatcatccaaggaaatacacatcattctcttgcttgttatctgctctcaaattagatgatgaattgagtaggcacactttatgtatgacgatgaatatttcagactatacaaagctaatgagatgtaataagttacaattatattattcaggcatcgccagttataaaatgtgaaattttgttggtcaaaagttacttttctttgaagagtttcattaattagccccacaattaagcatcattgaaatctttaaggattgaggcaataattatccatacctccaaagtgattacaccacggaaatgtctttcttcctgcttcttagtgtaaccaagctgtaacagaaaacacaagtcaaagtaaatttacaagcaacaagacatttcaaaatcaatgatcaataagcttaatgtagagcatgaaataggtacaataatatgattcctttccaagacctcaaaacactcaaacatcaaatgaattgtgtgaaaatccattatttacagcacacatgaaggaagcaaacaatagctaaaaaaatctcaatataccattaaaatttatagtattttaagttgcacatagctaaagatgcacaacaatgtaagttgcaaccccaggtattggagaagtcatcattagttcccaatttgaacccagatatatatacatacataatataccatctactttttaaattaagattgccagaccttcccagtcttttcattcaaaacaaaccatcgcttgctccaaccattagtttttgcacttttctttaaaaggaaacctacacaaacaaaatatataattatacataattcatttagcaggctcacatatcatagtaaactcccgccaattataaacaaggtgtacaatatcaaattttatatcatattatatcttaagcagatagtatagttttttttttattttatctaactcacaaacctgctgtaatttctccttcaggaccagcagtcttcaaaccagaagcctctggtgcatctttctcagacttgtcagatttgtcctttaatgttttcaagcttcctccagcttgtggaccacctgtttgtggactagttgcctagaacataccaaaccaaggcaacatcattcaatatccacttccacgatattctttgcaccagttaaagatagacaacctaccctgtttagtattccttgctctgcatcttggcctttttttgaggatcgagtttttagctcctcttctcggcgttgcctctccattctaaagtcaaaaacgaaatgaataataagatagaatgcacattaacatccagaggagaactgatcacggaaaaaagatgaagtggtatttattaggtccacaaggaaattttctgtattaaaaaagaaatgactacaaatcttacatggttagaaataaacaagaacgtgaaattcttaaaagctacataacaaaaagctcatttcacgctgtagactactatatcacagagagtgatcatgctactggccaaataataatgtcaataatacctcctctgcactaaacgaatgaaatgctggggaggcacaaaagctctctccatatcaactagtgcaacaaccattttctttgcttcactcttgaaaacatctaaagcagaacttgcaatggccacaacctagccataaagagatgtttacaaaaatcagtgcaatgacaatgcagttacaattacgaaaacaatttactattgagtggaaactacacacaaataagccaaatacctctctcttgaaaggaggatatctaccaagaccaggtgtagcatttgcagctgcagacacaatatctaccaagacacggtgtaccttttaaattatcagcaggatcagaaaacattagttgtaacgaattaaataaaattgagaaaaaagaaaagaaacaaaatttaaatccaaaaaaaactaaaaagatacaaaagtccaatggttacctcgtcaacacaaagacgagatggctcttttgcaagctctaagacaccttttattagagatcttaaacccttttcaggggaaatgaggtatggctgataaccatcagcttccaaaacaagctgattaaaataaaatagagaattaaaaatagtaacaacaacaaaattagaagtcgtgattgcaagagataaatatataaaaaaaagtgtgattgaacagtccgaaaaacgatacgtactctcttcacgttgtttatatcaaaatgtcggtctaatggaagctgtttaattctattagggaaatttccttcaaaactggcaacaattttccagccagaaccctacaaaaatttgtaacatattcattaaaaacaaaaccagcaacaatattaattcttcaatttttagtttcaatgctctcaaagaaacaaacaataaagttgaaggaaacagaacacaaaccacttgatagaatatatttaagaactttgacagtgagcgaaaacattcaacaatactcacctcaccacttgtaatatgttgaagaaacttatcctcgaattcacgacaaagctccaaagctattgctctggtaccctctgcactttgcaccaattgctcaccaagcctaactaactcatcttgaacaacttgagacttgccttgtaacctgaaaaatggaaaggaatgccaacaatgtgaacctaacaatcacgtcaaaacaatctcatttcttgaggtaggagatgaaatgattcataagatcatatgaaaaagaaaagatttgatgaaaactaagttcaaatattgctaaaaagtaaaaatagtaacacttttaaaatgtatgtataaaaaatagtataacttgagagtacccagataggaggttaggaacccgaactttcatacggttacgaatttgttgggctagagcatcaaccaatgctattctgcccagcttactaggaggagctccagtcaggatagacttaagactttcactctcagccctccatgctgtttctaaagaattctcagagccaactgaaccagattgtgatgaagctattgaaactgactggccgatcaatgcaacccagggcatgtcagatgcctttgatgggccctgattaagcagaagagcctgaactgcagcaagagctttctggtctgaagcagcttgatctattttactaattacaccaacaatcctcgtacctataatcaccattagcaatccatattagcccctaaatcttttaaaacacagaataaagatgaaagaaatgtttaagcgccgaaggaaagtaatgactgcgataaaaatatataaacgcctcagatggggaaaaaaaaaggaaatgataatgcatttaaatgacattttagaacactcacaaaaggccaaaatagaatatgtaaagccacactatttatgtaaaagaaagtgggtggtatagaatagtatagtagcaattttaccatctccgtcatactccttagcaagtctgagagctcgagacgaagcaacttctggagcttgagcagcaggaattataactagcaatattgcatcattgtgctcaccatattcactaacctatgtaaggacaatttagagatttacaaagtaattttttattttaccaaaattcatgacaagatgtataaataaagctaatgcttacctacatattaaaaaataatagtaattgctcccagaaaacacattaaatatagccccaaaaaaagttattacataaccctcaactacaatccttctctagttagtaccttaccacattacataacccaaaaatcttaccaaagattcatccatgctccgctggtccaacccaggtaaatcaatcaatttaaggggtggtgctgaaaatttcataaaaggagcagttagaatctgaaacttaatatcaagtatagaagtaaaaccaaaaattcaaaatggactataaatcaccatgtacatatcgtgcaccctaatgtgcacaaaaatacacacaaatatccacatttagattataatccaaactctgcaggacaagtaaatgtacattatacagtatcattcccttgattttgtcagtgctgaacttcattcccttgttaaccataaccaaattttcttaaattttgttagtcaatagttgttgacactagcgtatatttccaagcatattttcttcaaaaacaccaagctaatgttaatccaactattagtgattcccaagataatatcttaacatattcaattaggaagtcccatcaaacaattattaaaatcaagtttaaagaatttctccttaaaaaagcgttattttacaaaaataactgacaactaaaaatcaaatcttggacatgttacaacaaaatattagtccagaacaaacctgtacttgtccgtagctttagacctatttcatcacggctcttgcctgaagaacccttactcagcctatcttgaagagaatgacgtaaagcacctgcttaccattacaagaacacagcacatcacaaaagaggaaaagaccaagaacagggcaatcagaatgcaatttaccttacagatgaacatatcaaaacacaaaacaacctaaaggtatccatgacatcaaggataccaatcatatactgctggccgtatcatatgttatgttttgatactggcattaacagatattgcctagtaacaaaatagaggcccagacattcttaaaaatagagaaactccagttatagctagagatgtcaaaattagtttgaaatgttgaaaatagatgtaatgaacacaaaaaatctgcagagaagaaataaaaaagacatgcaattactgagtactgactcgcagaaacttgctgagatttgctgtcaatctgcaatataattgatttgctgctcaaagcaccatccctttgtaaatcaatgcttatgggagctcgagtagcaccattttcaccagttggctgaacagcacaaggagaaaaagtcatatcaaactagaagttttatgaggttctactcgaaagagtatacgcccacaaattatattccaagaaaaccttcatgaatcaaacttaccaaaacaggatgtccaattaaactgttcaaaactgctgatttaccggcaccctaaaaacattgagcaccaaaaatcatgtaaaaaatttaatcaacaacagagactaatcaagttatgaaatctgatcatattttagggactaaaaccctgaaatatggtcgccctcatgagtaaaggttcaacttaattcgtaacaaaggtcagtactacagtttacatttataaaattattcacgttgcagcatctaacttatcttataatacggaagtacgtggtcatagtacaataaaaggaaaaagatggaatcggatagacatattcatgcacacacttacatatatagcatatataagcatcctagatcgacataaatactagtgatgaaattatataatcatagactcgcattagttaggataaccacgattataccccctctgcagtcatttttcctaaccaaaaaggctgcaattaaaaacccacctcaagtccaaatcatttatcaatcttagaaatgacgaaatctgtacatcattcgactcgagattcagaaaatacacagattcaaagatctccatcacttgaagaaagaaagccaaatatatcgaatcctattaaaatcaccctaagtcttccgtactgacaaaacctagttacccaactcacaattcaatagaacaaaccggatcaaatccatatcgaacacaaactaaatgagtaaaaataaaatcaaagggtacgggttcacttacaacattgccaagagcgacaacattgagaaaagtggaatctcgtcgcgaggaaccgctggaggtggaattctcatccacatcttcgtcggcgagcagagccgcagcttggcgcatcgattcagagagctgcgccaattcctcgatcgcctccatgggtgatgaaaaaaatcgagatcaaagatctaaaaagagaaatcgaatccggttggtagaaatatggatcggatcgaaaccctagagatttgtggggaaatgaatgagatctgtgtgagtagcaagatttgagagagatttaaaaagagaaggaaggttttgtaataatgcgaagaagaggaaaatgctggagaagaaccctgctttcccactttctatctctaagaaactctctcccccactttctctctctatcgcgttttgaatatttttgccaaacactctcatttactttgaattttttggttttaatttatttaaagaacttggcaatataacgcttatttgattttttttattataaaaaataataattacttcaaaatctgtatataaatctaaaggaatgttcaaacaataactatgagtcagccatacaaagtttatttgctaatcttcattttcttaagcttctctacttagttaattttttttcttaattacttatcaactaggcaatatagccgctcttcgtgcagctaatttaatttttttaatactataataaaaaatactataatgtcctttggtaacactttttttctaattttttaatcacaaaatgaaaataaaatctttattttaaaatttttgtttttgtaaaataaaaatacgttctataaccacttttatttttcaattttaaaaacagaaaacaaaattgtgttctgtaaagttcattttatttttattttttttattttatttaagtctagtctaggtc

SEQ ID NO: 294970 - DNA, 6434 bp, Cannabis indica
gatgccaagagacggaagatggattctgattttgctagagttagtgattttcatgtcatgacttgttgtgtttttcagttttattgataaccttaatattaatggtgtaattcttagtataaggaagaagaagcaaaagcaaaagcagaagcagaagcaagagcaagagcagaagctaaagctagagaagaagcgagagcaaaagctgaagcaaaagctagagaagaattaagagcaagagctgaagcaaaagcgagagaagaagcaagactagcaacgaaaacaagagaagaagtgataatagcagcaaatgcattactaacagcagtagcaaaagcaaaagaagcagccatagccaaatcacatagttccaaggtttctctttaccttcagcttgagattctggttcttcagttcttgcttttccttcatagttattattagtatttttttttcagaatatttcattgttatttttcaaacttaattaaaatgatgtactccacaattatcacaatttcttagaaattaaattacatgccattattcaatccattatctatacatcgtacatgttgctttacaattggaatgtaatatatggtatgtgagtttggtgaaattgaaaaatcatatcattatcatggtaggcctttccatataagtgataatatacaatgagtgggtatgtttgatgtgattattagttttcatagattattttaaggcagggtcttcaaagaggaacaagtgtaaccggttgaaagccgaaccaaatattttgaggccttgtgcaaaagattaaaattgaggtttttgttaaaaaaaaattatgtacattaagactaccattactagttttttatttctatccttgtgcaatgacccaaggtgcccaaagcttgggccggcgcttgtccggaaatagccctttgaagtgttacacttcagtttgtgcatgagatggaaaatgatattaactccgtgtaatatatagttttagtttcatcatcatcatgttgtcttcttacattcgaagatgtaataattgtattattttaattcattaatgaattgtagtgacatttttgccatgttcggactcggagggttaatatttgatatcatacattaatttttgttagctgctctaaatgcatttatagattattagaacatatgtacagaactctgttttttcatatctctttatttttaatggaagcaagttccaccaatgtgggagtaggacgttagttgcagtagcatcagttggccttttatgatgtgatttcatagcagagtggcgtttggttagaggtagtgagatgaaaagaaaaaaaatatgaaacaatttttgttctattcttttcatggttgcattttgaagtactgaaatatctttccaatagaataatttttccatcaaattactatttcattttaaaatagaaaaaaaaaatcattccgatataagatgagaaataatttaataatctttttatgcatttttaatttgatttcatttcattcttattcttattctcattctcatttttattcccattttcatttctattcttacgtttttattccctttaaccaaaacgccacctaaatggtcattaggtggagaaagatacaaatattcccatacatgcatggcattacttaattgaaaaatttatctcattaatggatgcttgctgtgaaaagaaggggcaaaaacataaatgacagtgaagtgaagttggagcttgtgaagatgatttttgtgaaactctctgactgatcattgggcaatttgactcagctaagaacactcaatctctctcacaagtatctcaaagccccacttccatggtcagtcacttttcaattcaaacagataatagacttgtctcaaaactgttttgagtgtttacttccttttggtatctgtggtaaaaattgttcctcactccaagtatcaaatctcaaagtgaattccttttctggtatcatcccacctgaactaggcaactgtagttccttggagaagctctatcttggcatggattgtcttactgggtggtatgactgatagcattttcgcctgcgaaaactctctgagtctatctacaaaggaattggtaatcttactaatcttgttattcttgatatattctcaaatagttttttcaggaactattccaaatgcttttcacaagttaccaaagttgcaatcttttgttgctgaaaataaacagtttcactggttttttaccaccatctttgttaaattattcttcaatgatctgctgaatgtgacaacaattccttggagggttcaataaaatctaactgttcagcaatgattgatttggtttctcttgttttagccatcaatctctttagtgggtaacctttcaaactgtcaatatctgagtcttcaagaattttaagtctcactgtcttcttctattcaaccaacctcaagcaactccaatctttcttctgccctgagaatcccacagttcattttaagaaactgatgaaggctctcatcattgccaattacaaactagaggctcaataccaaaatgttggagagaagaagcagccacttggaggttttgaacttgtctattaaccaattagatgggaaatttaaaccttgatttgggattttggattcttgttttacttggacttaagaagcacttctttccaggggagattccataattgggttaataagtttgatcccaagagatgtgtccttagaggaatttttcccatattccatcaattttcttaaagcttcttgtttagataaaccatagtttacaattgagtaatatgtacaactagattgtataaattagatgagaaatagatacaacatgatcacttgaagaaaattctgaagattttcaagagtacatatttggttgcaaccataaagatgggtaatccatcatctggaaccaaaatgaggaaacaattcaaaatagtcattagaagtgggagaaagacatagaagagagtagctaagaatgcaactattgcaatatttccagggaaatcaaaatcccaaatcttatgattagtactcccactaatagtaagctcagatttcttctcatacaacagtgcttttgtgcccatgataaaggccaacacagaggagctaatggatagcagagttaaaatcattgtgaactcaataggatacttacatgcctttcctcttaacttggagtacactacaacagcaaaatgaatcaacatagaggccgccgagcaaccaaaagccagtgaatcgaatgccatgaagaatttgaaagcttccatgcctgttgaagtgttgaattttccagccccgggcatgctaatggctgcttgaaatgtgatacttgctatcagtgttgacactactaagttcatgtctgccatgtgctttacatctttatcattagtttctgcctttggtccaaattgactcctcattgattggatttcttcagatgtcttgtcacttgttgtgtttttttccaccattgcagcttcttgtaaacttagaagagggccttctttattcatttttaatctaatcatggcctgagaaataagtagtaattagggtaaatagcgacacaaatacctaaagttttgaatttgtaagcagtacaaacccaatgatcttttttagcggcataagtatccaatgttagcaaaactataattttcgtccaatttcgtcagtacaaactctattagtgtcttaaacaagacacatgtaagacccaattctaaattattgagtttggacaaaaacatgtaataacacttgcttccaaatcttggattaataaattcaaaaagaaatttgtacggacgaaaattacagttttataaatttttggtacaagtgagtcattttctagtagtattagacaagttagccaaatttaggaatatgggacataccttttcaacaggaccaagtagagttgatttgccaataatgtcaaaagcagtcaatcccatctcattgatgattctcttattggtctttcgattacttgctaaatgtataataatctcataataaccatgaatagcagcaacatgtagagctgtatttccctcattgtcctgctcatttataagatcaatgaaagctttcttattcaagaaagtatttaccacagaaacctgtttgtgctcaacaccaatatgaagtgcagtccggtctctattgtccaacacttcaccaatgtcaggacattcttccatcaatgttctgatcactctgatatgtccattctttgctgagatgtgaagagcagtcataccttgtttgtctttgctataagcaatacatctcttagcttccaaaaatagcttaacaactcttgattgtcccatgtttgcagcatagtgatgaggcatccatccaaactcatcggaaggaactgaaaaatgttggccaatttcggttagtgaaaaaagctagagttgatttataaagcaaagagggagtaaacatgttgtaacttacagtcattatccttgataatgttaataatgttggctatgttaactgaaagcaccagcctatctacaattataagacaaatcatatatataagtaaccgaaaaaatatgtatggaaatgatgaaaactgtgtatatgtatatatacctgggctgcatgaacgaatgacagcagcatgcatgacagtcatgccatttctcctaacaaagagcaaataggaaaagtagtgtccaaaatgattgaagcaatgttataaaatccaccatcgacagctagaaagagaggagattccccagccttattaacaaaacatgtcaaagttggatcttcttcaatcaaccgcttagcgatttcaaagtaaccattgagaacagcctcatgaagtggtgtgttttccttctcataattcaccttcctcagcagacttctatagtcatgattattatggcctgttggtgctaatcccctagcatgatctatcagaaccgctgcgaaactctcattccctaacctcgccgccacatgaagaggcgtgtcacctttgttgtttggttgataggcaagcaatgaatgcagcattagcaaggcctgcacaggcactgcttgtggatttgctccacattttactgcaatatgaaagacattgttttcttggccacaagttatctgtagaggatctaaattgtcaatgtctactgaattttcgccatcaaatctaccgaaaaatggattagttatgctttggatgaatctgaagagtctttcctctggtggcatcaaaatagaagtcagtagctcaactagtcctgccattgttacctttttttggggttccaaaatgcaatctataaagaggttttttcccaaaatggactgacaatgataaagtcaaaagtcaaaagccaaatattgacaattaaaacacgtatatatgtcaaatataactagttggtcacatggtcacttggccttatggtcataatttattctcaatatagatatatttgtcagtaagtacatgatgatccttactcactaataaaatatgactaaaaatctttcattttcaaatggacaatggcacgttcgtctcagtggtatggtgttctaaattatagaaatcgacattttttaagagttttgtcattttttttatagtagtatttattttagttacagtattctttttgtaaatttttgaatttttttgaataatttacaataacaaaaatagagttcctgatatttcaatttactacgtgtgttcaaaaaactttaaacgtatttttagcactataaattatttgaaaatttacagagatgatgttgtaattaagtacaacgaacactagcataaaaaaaatttgaaaagaaaaattccgacatatgtttttggacatggagattgactaaaaaattgtaatataagattcacattaacacttctcttttaaaaattaataagtttcattagttagtgtaaaatcattgaaagatagatacatatcaatcaatttttctcatagataatcttgtcaaatacttaagtgggcacacaaaattgagttgcttccatttggtagagagaaggaaaataggagagacagaaaagaaaatttgcaggattggagaggaaaatatttttcattaagttgtttggtgttagagttgaaaaatggaaggaaagagaaatagtgtttgaaaataggaccttagagcataacactagaaggggaggagatgtaaagcttttcattaagatgatttctttattgattgttggagatcaaagcatgttgatcttgttcaacttcagcacgaaaccaaagacacttcacacacacatgaaccagaacacacacacacacactcgagagagagagagagagag

SEQ ID NO: 294971 - DNA, 2057 bp, Cannabis indica
  modified_base (20)..(20): a, c, t, g, unknown or other
ctttactatataaaaaaaanaaaaaaaaaaaaaaaaaaaaaaaaaactctttttttagggggcagttgttatgttcatatttcgagctataaatatggacatgacacgtgaaaatttagacacaaaaaccatagaagactcaacaataaatgaaatgtctcaggaagataattaatataacaagcaatgtcaatctcgcattacgcgcagacaatacaattgaagcaacatatggtgagatgataacactagaagtcttctgaggtataacagaatgaagtcatattgatggaaagggtagataatgaattctttaagaacttgtagctcattgacccacatacttgtgagtatgttgaaaaattaagagaaataagcataatataacttatttcaaacgactaagtctcagggttgccctggaaaggttgagcgagaacaaaacaatttaaacatcgtctcgtagaatataaccaattattccatgtacattgttgaataacatgagtcatagtcagaatgtgttctcgattaaaaccgcttcaaagattagattagaagacagttgctaacagttattttatttgaaatagttacctaaacagaatcgaaaagcataattgtcatagaaaattcttataaatagggacaaaatctaaagagaaagggacgaccgatttcaaaaagagagaataatttagaaatatttatatcttatattctgtaaacactttgtgaaatctcaaaagtaatatgaactcgtggagtatgaaaaattaatttcaaaaccatgttaaaaacctttttattattattattattatttattattattttagagtttatttatcatattaagattcatttattaattaataaaaatcggtattaacagaatgattgtaatcttaattattatgtttagttaaatataaatatgtaatgaaataaaatgtgtattatcaaaactatctctactttaatttaataaattagttatgtaagagtattaaaatcatttcattttatttttagttaaatgtattattttattcaaaagacgcgacaatgtaattctcataacatttgtttatgtacatattaatggtaattacaccatccaatataataaagcattaaccctattacaacaacaaaaatagagaaaacaaacatggtaatggggactttgattatacatttcattcaaccaaacactaccttaatttgttttgagtgtgattagaataacatggaatctaaatctaatattattaagggtggcatcatgatcagctgggataatattaattggtgcctatatgaagctggaatctatatatatatatatatatccctatatattatacccatctaatccaaatccaaatccaaatcctaatgatcctaatctaagaacatgatataatctctcataataatctcacaaaaaagaaaaaagaaataagcacacccaacaacacacatagagcttcacttttaacacgtacatatcacaaccttcttttctttactttttctttttcgatctctttgttacattttttttttttttttttttgtgggtaacgacaaatcacaaacctattattccattattttacactttctttttttcttcatatacaactttttgattctatatatatcatcataaatattctccttccattactcaactctactgattaataattttcttttttcccaaacttatattgtaatgatatatatatgtatagatataattatagtgtttctattagggataatattttatgagattagattaggtaacattccaataatactattagagccgactcaagcatttgtccttgtccattattgttttcttcttctgttttttgaggtaacacaataccaaatttttacttattattaagacaacattgatgtatatttttggaaaagaaatatgttattgttatctccatttagcgtttggttgagaggaatgaaaatataggaataggaatgagaatgggaataagaataggaatggaatggaataa

SEQ ID NO: 294972 - DNA, 2274 bp, Cannabis indica
tttttcaaaaaaaaaaaatatttagaaggaagccagccacttgctgctgcaggcaaactcatcaacaacaatttttaggggcataacaaggagttgaagtgcaaaatgcattcgttggactggtttttccagagaggccgacttgctgaaactggcgtttctctcagcttgcacaatacgcattttctgctgggttctctgacaaaaaatgagcaaggtcggcggttgaagcttcatgttcttcaccttgaggacaaggtgaatttcgggcggccggtagtgataggatattaaataagaggggtatatgggtaattgtaaagagaggtagtggcaatatatatatatgagtgagtagtgaggggatttggtggggaggggagagaatgaattagttaatgagcagtagctctccggagagcactgggtctctcgaacacccagcaactcattgttctgttatcttcgtatcaatataccagctattattgtcctatatttcctactgttatattaaattgatacaaattcgtatcaaatattctctgcctaaatctaaaaaggagagatcctcgaagtattttgttttaaaaatccaagttgctacccaaagtttatttttctcccacacttcctcttcctcggctgtacactcttttccttaaaagttaaaacaattctagagtttctctcactccatactgtcgacaaatggccaacaccgctgatctccatagtgttgaccttctcttactccctaccatcttactctcaatcatttgagaaccacgacagggtatgacctatagaatcccgaactcaacaaataacttggacagtaatgtcttggaaaaggtacactccaatagtaaatgatcaattgattccccactaaccttgcaacaaatgcaatatcctggagtaagcacatgatatggtcatttttgtcgcaatctatcatgaaacctttcccaaagttgctaaccagccaaagacattaacttagatgcaccactgtctaagaattcagattagatccatttactcactgaacaactttaacttgaattcctagtgtgttgctcatctcatattgctaaattcctacatcacttttggttattttgtgataagctttttttatggcaattttgtgatacactattgatctaatccaatgcttgaaagaattagaaaattaggtattttattgataccaaagagaaattgcgaagtcccaaacttttcgagacagtttggtatctccttactcactttgtaacaaaacaattcctcccacttacaattgatcagccctctatttatactaaccctctcttaactgattttgttaaaactaacaccttaggatataagatagctcacttaaagcccctaatcaattatactaatgagactaattttaaggtgtaacatttttgtcttgcacctgatggatatattgcactgttctagggatggctattctcatatgacccgttctggagacctccacaaatgaaggttcttgtatattatttgcctttgttgtcgtttctttactttcctttctacaatttcttatttattcaccaagcaccaattaatgctttgttgcatttgttggtttactttcaggtttaatttcgtgttttccttgtggttgactataatccttgtttgcaggcacttttgcattccgtgcctctaggcaagctggtagttttagatctgtttgctgaagtcaaacccatatggattacttcagagcagttttatggtgttccttatatctggaaggtcatcgttccttttttaattttaagtcagtaccccaattatcattctatatgtatattaattaatatgcatgtttctctctaccaaccattagtttaggcttgaaaaataggacacatctttttaatgaatgaaagataggttcaaataaatcacacatatgtaatggttacttttctgactatactttttttgtgtgtcttattttcttattccatctggataataagggtgtatgtcactgccacacacacatatttgagattgctatgttaagcatcctcatcaatgtgaagcttgaatttgtattgatgtctacaaatgaataactgtgactcacattgtcataaatattgttattctgcgtgcttgcattatatgtcaacgtatcaagatgcttcaaagctttttttctttattgacttactgtatttataatttcatgggcacaatttccctgtttgatcttaattt

SEQ ID NO: 294973 - DNA, 4792 bp, Cannabis indica
aaaactataaaaatgtaatcttttcgcgaaaattgaagtttacctgcaaaaggaggctcttggtttcttcgaatttatccctcaagagctgtccaaagggctgaagttcctcagaaacaaggagtttatcatacagcgcagaaatcgcggggtctcccttggcgaacaccatctcaaccaaatctattgtgaccctaaagaatggccatgagttatacatgtcttgcatcatatgaagattcctaatatctttctgaatgatgtgtttgaatgctgctccgaatcccaaccacactggaagatggtaaccttgtttgtgtccaagcaaagatccatgggattgcacgaagggattcgattcctccacttggctttcgctttgaaggacgactaccaatgttcattcgtccatactccaactcaggtgtagcctgcgatcggggatcataatatggttagttaagttaagatttgattataagaaagtgattagatcatagttggttgttgaaatgcttgcttaccagacggaagtactcgacgaaacgaggctctttgaagacgatagagcggtaatcctctgtagcaataatcgccatttcatccataagtttacgccattctggcttaggtgaaactggtgggttcataccgtgttcgagtgtagcagcagcaaaacgctgaagtgttctaaaacacaagtgttcctcaccgaacgattgttcgatgacttcaccttgaacggtgacacgaagtgagccgtgaactgtgtccggtggttgagacaaaatagcaagatgacttggcccgcctcctcttccaactgtcccaccacgaccgtggaacatagtaagcttaacaccgtactttttcgcaacattgataagctcttcttgagccttgtacaattgccaggctgcagagaaacgcccagcatctttacccgaatcagagtacccaatcatgacttcttgctttccactaattcggtttatgtaccaatctattgagaaaagccgagccaaagcagccggtgcagcctccaaatcatcgagtttctcgaagagaggaacaactctcaatggagtcttaacatgacattcgcgctgtaggagctccacagcgagcacatcagaaggagcagtcgccattgagataatatatgcaccgaaattatcagaaggaagttcagctatgacatgaaatgtgtccaacacatcagcaatctcttcagtcttgggaagatcagggccaaacagaggacgtttgccacacagttcggataaaagccattcctgtcgacgatcttcagaccattcacggtatgaaccgatttccaaatgcttggtaatagcatccataacatcggtatggcgatctgattcttgcctaatatcaagtctcacaagagaaagcccgaaagttgaaaactgtctcaagaagtcaagaagggaaccatcagcgatagctcggtcaccacaagcacaaagtgatcggtagcagagctcgagaggctccaagaactacaaaagattaaaagaaaagagtaagtaccacatcgaattattataaagataacatacagattaaagaagttaaaagaagcgggaattacatcgtcgagatttgtaaatgttgcatcctctggaatgtcagagtagccatttgctaacaaatgacgagatcgctcacgtgtttgataaagcttgtctctcacgtcaccaagtatcactctgtatggttcactaacaggaatttgcttccaaaattctacacaaaataaagaaaaaataaatcagcaattaatactaactggaattgatagaatgttaaggaaaaatgtaaaataatttatagaaatattcgataattaccaatgtagtgtttagcatctcttctcgaggagctgtggatcatttctgccctaacacgaagttcatcgttgcagcgccacatagacaactatacaaaatcaaaagaaaacaaaatatcaaaaagaagctatataatctattgattaagaaagaagagaaatgtattacatgtatacctcaaacataaggtcctcgatttgagaatagtacaagttagcggccatcattcgagccaacaagcaaacatccctagtaacctcgggagttactcttgggttacctaaatatcaaaaccgaaaatagcactttaatagggcaatggagaagagactacaatagagagaacaagcacaattttaggagagaaagggaaataccatcacgatcaccacccatccaagaggagaactgaatgagcggtgcattgtaaggaacacgctcatcaatccctatgttcttcaaagcagtgtcaacacggcgaagaaacttcgggacacccttccagatagtctcgtggaagtagctcattccagctctcatctcatcttgaggagttgggggtgttctcctaatctcatcagtacgaaatgcagcttgaatctacataaatcacaacaccgaaataaagaatattagtaagaattctaccaactctaatcaacttctttgtccactaagaacttataagcatgaacttaatgacatttcagtttttacaatgtcttcatagctatagattttcaaagcatcaaaagaagagtctttatacctctctttgaagggcctcatcgagttcttgcttatcatcaggagtaatgtccttagcatacaactgagctaaacagttccgaatcctaatcacacataaagagttaggattagaatcagagacactaagaacttatcaaatgtatgcttaattgaattaagagctaaggaccgaagcaaaccttccgtgcttctgaagcaaagatcgacgaacagattgagtaggatgagcagtcaagacaagatccacagtctgattcttcaatgcatcaaaaacctcttgaggagacttgcctatcttcccaacaagtctcttaagagtttcttcaatgtctgattcagttgttgcagaattctcatcaataaaatctcccttcttaagcttgttccgtctgcgatatgcaatctgaacttcttcagccatgttagccaagctaagcatgtgtgaaaatgattttgcaatcacaattgagtcccctggatccaaacttgtcaacacattaccgagctcttcgagctttttcggatcatgctttccttcatactcagcagaaagttcataacactcttgaacctataaacacacacatatacacaccaataagaaaaacaatatcacaaactggattgttttgtataatattataatatataatatatgatacataacccaatataatataatacagcataccaaacgagcccatagagatcacgaacactctatacaccacttaattgaaaactcaaatttcttaaaattcaatcattgaaagagtcaaatcataaacagtaataaaaaaccttctgatttaaccatctaatcaaatataatattataatatatgatacataacccaacttaatacaatactagctaatacaatataccaaatgaggccataatcatcattaacactctatacaccacttcattgaaaactcaaatctcttaaaattcaatcattgaaaaagtcaaatcataaacataaatcaaaaactttctgatttaaccatctaatcaaatgatctatacacaaatctataagcacccaaatcaataatgatcaaaaacatatatatagagagagagagagagattaactaaccgtttccctgagatcttctccatgcaaatcttgaagaatgtcaagaaaacgatccaaaagcaaagcatcatattcaacaagcttatcatcttcactaactttcccaggaaccaaaagcctaagctgagcatcaattgatgccaacttctccaaattcctagtagccattattggtctcaaatcacaaaaaaaagcttccttctttctcacttttgggttgttataatcgatacccaaaagaagaaaaacaaaaactaaaacaaagagaaagaaaaaacagaacaaatatggtcagaactgaaaaacccaaaaataaggagagctaaaatcatggagattgaatcaatcacaatagccacaaattattatgatcatcatgacccacaataagaccacgtgtacggactacactggactatagacagtagtgattaaatcaaattataattaaaaaaataaataaagatcacttttttaggagaaaaaattgatcttttgtaagacccagatgggaattaagtgattagaacgaagtacctgaatctgggcaagtgagatttcgaccagtaagaagatttagagagagaaagagaagagagagagatagagtcccgagtagtgagtgtgagatggaaaagagtgaaagtttatggctttatatagagaattttcaataaaaatcaaagcttttttaagtttcccttttaaaaattgtatttttgtcttattttttaaataaaaaataaatctttttttaatgaaaaagaaaaaacagagatagagagaggtgtaattttaagtttaaaaattttatctttttttcttatttttgaacgaaaaaataaaggaataattagataaggtatttttatgtttaatgaatttttttgacatttttataatttttcataaaaatatacgaaaataacaaaaaaaataacatctaaataacaccaaaacaataataaaaaataacatatataataaaaaattaacaataaattaacaagactacaacataaaaagatcgtattttttgta

SEQ ID NO: 294974 - DNA, 8610 bp, Cannabis indica
gcattgatgcgtttcgcttcttgatctcgttctcgatctgcctccgtcactccgatctgaattatcaccggtatgtttatctcttacgtcgttagatctttcgttttttttttctttgtgtttttttgatctttatgtatcgaaattcagattcatatatgcgaaaattaaaaagattcgaaaactaattggataatgtaataaattgttagatcgtgtttgattcggtgcacaatgacggctgatgttcatgaatctgtggtcgttaatggcggtgaggcggtgattcaggaacagtctgatcgggatcttagccctacttgtactgttacttctattactcacgatcctgtcaatgctaaggacgatttcgacggttcgtacgtttttgtttcagatacggacgacagggataaggatctcgttgactctgatctcaataatggggaaactcttcacttgcctgttgaaaataatgagagtcttcaattggaagagggcgaggttgtagtagtcattgaacaatcagatcacaatggtgtcaatgatgataaggtcgagggagaaggagaaaaacatgacagtaatggtgaatgtcaaacagagaaggagtcgattgccgttgaccaatctgagcaaccagctgacaatggcgtggtggaggctgttgaattcagtaatgatttatcgacctctgaccataaaactgaggccgagacgattttagttgaccaatctgagcaaccacctcataatggtgaggtagaggccactactgaccatgaagctgagaaagaggcagttcacattgatcaatctgagcaaccggctcacagtggcgatgtggaagctgttgaaatcagtcgtgacttgtctactcctgaccttaaaactgagagtgagacggtcgccattgaccaatctgagtatccggctcacagtggagatggggaggttgttgaaatcagtggtgacttgtcgactgctgatcgtaaaattgagaacgagatagtcacagatcaatctgaacaatcagctcacaatggcgatgcggaggctgttgaaattagtggtcaatcgtcgactcctgaccataaaattgagaacgactcaattgtcattgatcaatctgaacaacctgctcacaatggcgatgtcgaggatgttcaaatcagttgtgatttgccttctgctgaccatataaccgagaatgagacagtagccattgaccaatctgagcaaccagctcacaatgccgagttggaagctgttgaaatcagtagtgatttgtctactgctgaccatgaaactgataatgggacagaagtcatcgtccaatctgagccaccagctcacattgttgaggtggaggttgaggaagacgcaagagctgaagatgttcgtggtagtttgactactgagagtgagatggtagccgttgacttccctgagcaatcaacttacaatggcgaggtggaggctgttaatgatgacaaggttcaggataaatcagatttggctggagatgaaaaagaaaatctggagtctgacactggagttacagatgctcaaagtcctgcacatcaggaagaggagaaggaacaagttgagccttccaatgagattccttctgaagattcacctgggagttcaacaaatgatttggagcaggatcccacagcaactccatgtgttgaagccgaaatcaaggatttgtctatctccaatgaaagctgtgatgttgtacctgctgctggtcatgaacagaattgcatttcagaagatgttgtccatgaaaacccagctgaagaaaatgggccttcagctctcgataatgagaaaccattgagcgtctctgaagaggttcctgtggaaggctcccaagcggacaatgaagtgcatttagatcgtactttggaaacaccttcatgttctgaggctgatcaaacgacagaaacagaacctaatgaaggtcctttatctgaaaataaaggagagggctcgcctgctggtcttgaggagagcatttcagagaccgttgttattacagacttggttgatgcttgtcaaaatacacctgtacaaactgacgagtctgttgaaaatgctgaaagcttgacatcttcttatgattgctccaatgcacttgtaagtggtgaaatcgctcccgatgccatagcagagaattctgacgttgacaatgaagcttctttgcctgctggtgatcattcaacttgtgatgttgaagatgtgagatcagagactgatactggaaagtcaaatcaggaaagcattgagattaatccaagctctcctgctaatgaagtgagtttccagcctgagaattcttccaatgtcgaagagattgtagaatctgaaaattcagacaggatccctgaacgtgctggcagccagtctatttcttgggccgaatcagttgatgatgatagcagtttgccagtggttgttgctgctgatgtgaagcctgaggctgaagttgagaacgcatctgctgtaagcgagagagatatgtccggtgttgatgttgctgttttagaaggcaaggatagtgaaagtggagtagatagtaatcatattccggagcatgtaggcaacgatgtggaatcaacatgtgaagaagttgcaagtattgatagaaatcagaaggatgaagcctctacatcattgccagaagattcttcagaaggacaaaatgttgaagttgaggtggtgaaaaaaccattctattacatgataagagttcccagatttgacgatggagacttgagagaacagattaatgatgctcagttacaagttgaagaaaggactaaaagtagggattcatttcgtgctcatattcagacgaaaagggtgagaatttgtgctaattaccgctatcatatttgattctatgattattatctctcttaataattgttgtgattcttttaatggtcaggctgctcttaaggattactctgataaagttcaagctctcttaaaggaggagagagccgcaagagacttgtttaagtccaaacgacaggaaatggattctgctgtctcagagattaacaaagtgaagaatgcattatctgttggggatattgatggcagggtacacattttcatctctgtttctctcatagatattgcttgcttttcttatttgatttcaattttgtgaagtttacactcgttcatatcttcaataaattgttgctcattaacagatacgcagtatggaacacatgattgaacatgaaaccctgcctttgaaagaagagaaacagtacattcgagaaattaagcaattaaagcaacatcgtgaacagctctcttccagcatgggtacacaggatgaaattaaacagactttagaccagaaagacaaaattgaagagcgcttgaaggtactgtttcccactaaatcttgattttctgtacataattagctagtgagaagtactgagatgcccacttgatttcttaggtaatgtttaaggctacagcggcaagtcacatgtctttagggcatatttgaatcaaagttattgtcttaggtgaaatgtttaatttatataagcttttggtaattgtaggttttgaggaaagagttggatttactcagagacaagcttaataaagctgaggaagccactcaaattgctaagaagagttttaaggatgaaaatgagaagttgaacagcattctatcccaatacagagctgccgatgatgttcgtcaagatgcttatgcgcatttacagagtttgaggaaacagcaatatgaaaaggtacttttatttattttgagtcagttcttttctctttctatcttttttttcactagctgaatctttatgaaattatgtgcacacaattattttcattaatctaatggaggtaagagcaatgtggttgatactttttattttgatttgatttgcagaacaagaatttttggaggtacaaggatgatgcaaaggtggctctaaatttatcattaaatggagataaggagcaattgcagcgtctttgcctcgatcaggtgatttcatcgaatcatttcaaacttttcgttattttctcttaacaaaaactgaagatctgattatctcattagccaacccaattatttgtctgtgatttatacaggtcgagagaactatggaactctggaacaacaacgatgctttcaggagagaatacattaaatggaataccaggagtacaatcaggcggctgagaacattagatggtcgcgcgctcggccctgatgaggaaccacccgtaatgcctgaaattgtaaacaacagagtgaacaaggataaccatgtgaaagtggcttccgttccagacgtaaaacaagattttcctgtaaaagttgagaaaccagatcataaatcagttgcaaaggttgtggaaagagaggatcgaacagctaaaaccaaggctgctgcgaaatctgctatttcttcagggattagtcctgttaccatttcggatgaaacaaaagagaaagagaaagagaaagagaaggtgaaagaagaagagcttcgacaaagcaaagaggaagaggagctggctagaaaggctgatgagttggccagaaaggcagaggaattgagaaaagaagaagcagcagctaagttaaagcagctgcgtaagttggaagagaaggctaaagctaaggaagcaatggacaggaaaaagaaaatggctgagaaagctcgagttcgggctgaaattagagcacagaaggaagctgaggaaaaagagaaggtacatatattgtagtacaattttcatttataagggaataaaatgtatgttgcatttacaggcggagttaattctggttattattctcattgttgaactgtatgattctttgcaggaaagagaaaggagggcaaagaagaaggaaagaaagaaggcaaatgaaacagatgttacgaacgaggaagaagtggattctgctccaacttcgagctcggaagttgctgctgctactcctatcgagtctgaaactaaggagagatctacgacaacagctgtgaagaggcctcagaaggggtctcaattcgtaaagcaaagcagggccaagtctatgcctctgcctcttcgaaacagaggtaagagaaaaatgcagccatggatgtggggagctcttacactcgtcgttgttgttttggccctttttttggtgggcgttgggggcttctcctataaatcctgcctgcaatggttgggtttgtgaatgagtgaatgaatacgaggcttatttaataggcgagaataacacagtttcggtgggacattcccaaacatataaaatatatttttatactaatatttatctttaaatatataggttgattctttggtcatgtttagggggtttgtgttcctctagtttgcatttggtttacaatatcattttttttttcttttcatttcattgaaacacaccggggttgattggtttgcttataagtttcacttattactattattaagtttatagtgagaggaacaagaaatttagaagtggtgttgatcctaattattagtattgataataaaaggaattgtttttggtagtttggattttaatgctcttccttttgtatgttctcaatagagatattaccaatatggaaatattatttggccccatttgtttcaaattcaacttagaaaattatcaaacatagaatttcattgcaaaaagtcataaagacagaatggtgagggaatgttttgcattgaatagttactatacaaaagtagtagaggctcaaagagaaagtgtttgggaaaacattcaagaaactctcaatctcaatgtatcaaatgcttgataccatgtttagatcaaagttgacataaaggtgcgaatttccattggggcgagttccacaactagttttgcaggatcaactggtcgacccctttttagcttagaatcgtctctgttttcagaggaatggccttcgactttccacaccagtctcttcttctccatctctgttctctcttggttggcagataaactcatctccgtcactttgcttatctgagaaagaaacacgaggaactcgaatagtaagaaacaaaatatcaagaacaaaaaggctggctaatgctgaggagtttcaactatgctcttctctactaaccttctttcctggaaatagcttctttagttccacattcgactttacagatagatccgcatcttctccaatctttgtatattattaacaatcgaaacaagtagccatgcgaaacatcagaagattaacaagctgaacattcaaatattatcaaagagtttttaaatagaagaacaatgagaaagtaaaaattataacctcatatagatgcgctaaccgaagaagcactttcccactttcaagttcctgtaaaatttccagaaaagcagcagtttttataaaataaaaaaggagataacagggctaatacaactactttgtaattgctacataaattcataataagcatcaaacaagaaaatgtagtccaaggtaaaatcggtacctgaagggtaattatagcaacattatcaggtaaactgtaggagggatcaatcccagaaaaagttgctctatgagaattaatactgctatcactatcctgcaaaaaataagataataaaaaagaagaaatgacctatgagtgaccattttagcaattaagaatacttgaaatatgaagtgtactcaaactaatgtcctttgtatttttgatttgtttcaattaatcatcacctgctctgaaaaggcaaatagaagtggagagtatatctcttgcccaaaagaacgacgccacttagcaccttctccgacggggtcaattctgtaataaagttttccttgaatctgaagaaagtaaataagaatgaataaaaggagggctttatgttttgatagtttatgacaaagaaaagtgtagcaaattactgaatcctgaattattaagaatgagaagaccatttgtcaagaaagaagaacgataaactcagaacgaatgcaggccctccagaagctataacaactaactaactccattcaattgagagaaaggataatagatataccacataaacctattacctatggttcaatgttggaagcatagaatagatgctgattaaaaatcacgagtacttacgattagtcctttgcaatcatcgaggacacacactgtctcgtttagagcctcagcaacacctctggagtcatctaaaagtagtctcctgtattacaagagaaaccagagaaatttcaagtatgacattgagtttctatattgaaaagtctgcaaggaaagaattattggtttcctaagtaatcacttgtatgttttgtgatggagaagcgttttcgaatatcaccatacctgtggagcatcagttcgatttgtccatccaataaactggatcccccaacggagcgatctaccaaaactgaaaattctttcttatcatcttgcatgtaaattccaagattaatctgaaataataacacaaaaaatatgtcatattgttttgaaccgaacatttaatgaatttcaaattcatagtgctatagtctttgtaatataaacagaaaaacaatgtttagggatacaagatgatcataattactatcccaaacttttcatacataagaaagtccatcaaggcatactaagttttaataaaaatttaatggttgaagtttcaaaaagattatcaataaaaaaagagaaaaacaatgcaaagttggtggtttttacgggaggacgttaacatactggataataatttccagcaacaggttggtttactttaaggtcccaatctgctcggtagtcacgaatctgcaaaaagaaaattcaaggatcaaatcgtatgaacataaaaagaagtagatatttcactgaagtagaagaataagctaaaaatacccgtttaataaaatcgcgtccattagaatcagtgtagaatgttttgttgttatccaccgtcgatgttaactgagttacaacttctttgcctgttccatcattaatgggtattggtccaacctgaagatgcatttagcgttgttatcatgagactaaagtatcgggtcaggggagaaaacaagtagataggcaaagaagtattcttacaatgtattcaacttcaacatgttctcttcccttgtgaagcctggtgatctgcatacataattgacacaacattaatgactcgaggaaactcgaagctctataccatactaacaatagaaagatgtatggaaagtttaaaaatcatcatataataatctagaaaatggaaatagaaaagaacaaggagaggttcggggtgatttttcaagcttttaaactaggtaatctagtgtccttatgcatgaagataacaaattccgtcagactctaccatagatttctgaccacatccttcatagagggccctttcttttggtttactagaggcagaagaagaattagtagcaggttatcaaatcgaatactcggagattaaatttggtttatttatgttgcttcctatctcaacttattagttttttc

SEQ ID NO: 294975 - DNA, 1331 bp, Cannabis indica
acttatactttaaaaaactataaaaataaaaattctccaatcttttatacatatgactaaagtatatcttaaatgaaccaatttctagcacaaaaaatacaaaaaaaatgtaattatgttcataacacatccaactcaaggtatattatgatttattttaattaaaattgggcttccaatattattatataagggattttacaaaaaaatactagattttgaataaaagtttacaattttactattatacagaattttttacaaaaatactatctttttataaaactactggaaacaagaaaacagaacaattaaaacaacagtggaacaactaaaaataatcacggaataacagtgaaacttaacacagtacatagtataaaacttacacagtatttttgaaaaaattctgcccacattaaaaaagtaaaaaagttagaaatttaagcatgtggtgtaaaaactcctattacaaaataccaacttactcaaaaaatgactttcacacactgatgcaggtagctctattcttgcccaggagcttgatacaatgctacacaaacggatgctcaaacattaaccattgattgattgactagaatatgtctaggaagaattgattattttttctctcaataaaatacctctaaaatctcaaaacacacgtcaatttatctatctaaacacaaaacataattttcaaactcacagataacagacattaatcatacaatttatttctaaatcaataaatctatgaataaagtcatacatttaaccataaattacatagaatattacaataaaatgaaatggaaaacttacattcatggctcggtggtcgtggttcagagatcctgggtcttgggtttcattggtggattggtggtcttcagttggaggcgcggtggttggcaaccgtgggttgctaaggtcttcgtgtgtgtgagaagaagagagagagagagaccgagagaatagacgaagtgagagaggaggggtgcgttatgagagggctatttttggatttgataaaaaaagtggcctatctaattaattttgatattcttagtaggggttttcataaaactgctcacacaacacaaatcgcccccaccgcatcatactgaataaaaaatatgtctttaaattttttacggtgtggttgcagtttgtgtatttttttaaatcacgcggtgcagtgcggtttgtgattttgaattaaataattgagattcaaactacaccgtattatatattacaaaattattaatttttacattataatttttattctttttcacataagaataaatatatgtaatatatgt

SEQ ID NO: 294976 - DNA, 2401 bp, Cannabis indica
attattatttttttatttttaaatatttattttattaatattaggtggtctaataaaatttcgccaagtgtacacttgtgtacacaacggcaggtctatttggtacttaacagggaaatattaacggaaggatcattgaccaaaacaattatcgagttgagggagtttagcccgaatttttcgagtaaaggagttaaaccataacaaatgtaaaaatttaagaagtttgggcgcaaattgcccttaatgccaaataacttcaaggcacacacccaaataatacaaacccaaattcacatacccctaatccatccccatttcaatccaccctaccctaccaaacaaagcataagtgcagagttttccccctttctttctcttgactctgaagaaatccaaacacaccaaaaaccaaccaaccacgcacggttcgttgtcatttcccctctctctcttctctctcttctctctctttcgttcggattgacatctacatttttcttgaataattaatatttaggaaacccaacacaaatttcatcttgtctaattgtatagattgttatatttcactctatgaatttgggatgtggaaataagtgaagtggtcccagttagtgttttctgtgatgcttacccttacttgcaatttttttgttcaggatcatattactatttactttggctccaactacgtactctacttttagagggagcgttcattttcaatctcgttatacttttagagggtttcttctaatatgcaacttattttcttctttctctttaggttcccttttccaatgtagtgtatatagaacgctccgaaaagattttcggatgaagattcaaaagattactaccacattactagtgtctctctgttatttattcgaggatttgttgtagactttgtcctaatacttcttcatgttgggttcagatacgctttccctatcaaatgcacggatgttatcctaaggagactgttcttgaagttcgggccgagtatgatccatctaagaagacaaagccaaaggtatttgttatgatccgaggtctttacaaatgcaccttctttcttgttcattctttcattctccttagaaaatacattgaaatttaacttattttattctttcaatgcacattagaatcctggtgaacttgaagactggcttgctgatctgaacccgcaatccaagacggttacacccaatgcatacgctgtttaattaatttgcatgatataattgcagttggccaaaactataattgaaggtgtttgatccaaagtttaaccatgtggtgtagggtattttgtggtcgataaggattcaactccggagaagcctgtctttaatccgacggtgacacttagagacagctacaataagagtggaaagttcttttttcttttctgtttgtataagatgttgtaagaaagcattcacaaattctacttgagtctcatatagatttgagtaatcaactactaattgtaatggtttgctaagtttttgagaagtttagtgagtccccatgtcctcactaaacttttggaaaagttcctgttgaatgaagtgtttggtctttagcaaaaaagaaaactactactggatagcatagacttgctaccactgtaattccaaattcgatagcataaaccttgcaaattcagaagggaagacttgcttttagggcaagtcccaaaagatgaaatatccctctggacgctctcggagcactggtacgagtatgtgttcgactgtgagtggacaataaagccaaattcgatagaatcgtgatccaaagtatggctccacataaggctccactacaagtactgcttgtgctaatggtcgggtggaatggggctgttggcgcacaaatatcctgggaatcgggaggaaatcggccatgttaattggcggcaccagatagtaggggtgtggcggtgggaaatggcggtacgacccagagtgggcaaatgtggtcaaatgctcaaaagttgagacgggcggcgtatccattttttagacctgtttttgtttgaaaaagagaaacacaatcaataaatatatccaaacaattaatgaaagaaactggactaaaaaaaaatttgcatgcaaagtttcgtgctaagattgattggggtattgtttataacacacaagacaaaaacacaacatctaacagaattgcatgagtgctggtagattgttagggacttatttttacttatttgtccttacaccgtgagcctctccttccctttcctcattatatgtatatatatatatactctgttcacctatatttctaattcaatcaatacatttgctattctctcaagattttctttctgcaacaacatcatacatttgctattctctcaaga

SEQ ID NO: 294977 - DNA, 5497 bp, Cannabis indica
agattagtacataagcaatcactgaaatagtaaaattaaatgaaattagacaaaagtccttaaatccaacaatctcaatagttcaggtggcattttcaacaaccttaaaagttcagggggcatgatttggtacatgtcaaagttcagggggcaaaaatcctaattaaccaaaaaaaaataataataaaggtattttgggtaaagtgggaaattaatagaattgttttgtacaaagagtttttttttttttttttttttttgttaaatagggatttttggtaagtatattaaatgaaatctccctttaaaatccaaaattttaataaaaaaaaaaaaacaaaattttcttgaaggtgcttgatggaaactcaataaaaacttgatgggtgcctaatgtcattaaaataggcataattgagtgtgcgcttgaggtaaattctatttaatttaggttttttgtataagaaaaaaatatttgagaagtgtagcaagtaaacataccaaacttcaatactattcctcaaggtttgaaaatttacacttaatgaaatgtgtatcataccaaccaagtttagattacaataaatttaatcgaagtacataacgaaatgcaatttttgttgtcacaaaacccaaatcccctagccataaattaaacgttacatttaattaagtttccaaagagattatgcatgggttttcaattctatttggtatgatggagcaagagaaaatgaggatgaatttacaaagaaatttgtagcattagagaaaacgggggactatgaagagaaacatgttaacatataatccagctctgagaagatactgtcaaagaacagatccaaatcagccacacatgtatgagtaggcgcttgaaaatgctaaattgctaaaagcatttacttatatcgtatatttcatcttcgttagaaccatataggaacggctaaaagtagaaatagaaatacatgaaaagaatactgaaaaaagaaataaaacaaagaaatatagatccctctatttattttttttgacaagcaaaaacatttttataaaatagaaataaaaacacaacattcggccctaaatgagttctttgttctggtggcttttggcctagaggtttaaccacctgcctacagactttcataatatggaacaagctactgtggacgattgggcatggcgcgtccacggcctcttccattgtacccatatccccttccgtagtaaccgccacctcgaccacggccaccacgtccaggaccacggccacctcgaccacctcgataccttgaaaattctccaaaagtctgtaccaacatataagaaaagttgaacaaaatctctaaaacatcaacaggcaataaataaaaataaaagggtggtggtactacaaattcctcattacctcagtatcaatcttcatttgctcagagtatctgggccttccatgatgagactcattatcaagtgcattggaagaaagagaatcaaagaaatcatctttattgtatacaggctgcacaaaatagaacaatacagcagattgagtgacgaaattcaattgcaagttcttcgtttcatttagatgccaaactgccaacataaaaagacacaacaagacaatctcaccttggactcaagcttagataattcagcatcatcaatattttgagtatcatcttcatcactgatttctccattcccttctgtgtttgaagatttactattcttgccaagatggccccaaacttcatccttgttgaacttctcattcattgccatgaaatcaaaatcttcagtaaatttcgccactggacgtgaagtctacatacatagagaaagctcaattttcaatccttccaaagctttcagtttgacaactcccagagttcacaatcgttactaaaatgaaaatgcaaacagaacattaccccagttcctcgtcctcttccacgtccccgataaccatgttgctgatttaggtaaggaggtccatttggctgggagagagagcaccatatgtcagggagcccatcataacagagaaaatggagtatattatattatataaaaggtcatgtttgataagataatacttcaaattaaaatggccacctcaggtaaagggcccgctaacaaacttaaatgttaaaagttaagaatatgacaacctcccttaaacacagctaaattaatttcttttaacttataaaaccttgtaatcttctcttacgacaagaacatttatcatgctttcataatgctggtgaccatcaagctttctcgcatattcaaaaatgtttaaaaagaggacggaaacaaaaataaccttataaccagctcgtgcaggtgtgggtaatggcaatattgggggctgagcttctggcagaactggcattgagccttctgaagatgatgctggtacttgaacaacctcaacatccttattgacagtttgtgacggctgaggtgatgaaaccatggcagaactagactgcaacagctgaccaggagtgaccagtagaggtcctgttgcctctgtgcggacagaagtggatggtccaacaagagaagaagtggactgagaaacactttggtacatcaaagtttgagcagaaattgaagtaggtttgttagatatcggtggtagaatagtacttaaatctgaacttgtagtcaaagaagacagagatggcaggccagcgctaaaggtagaagcagagattgaagaatttggtgtcttgttaggcgctgtactcaataatggttcagaagctaatgaacttggaggtcccgcagacagaggtgatggcaaagttgatggtgcagcagaagttgaggttaaattaggtgagctagtagtagcagcagaaagcaaaggaggagcctcgggcaagcttggggctccatttggtaaaggaagattaaaattagggtatggcattggcattggctgcggcatggaagaaggcaatgataatccaggtggtggccgcagcaaagattgttggtgcatatgaggaaggccacctgcaggtccataatatccttgccagtacattggcatagcaagcccaccaccatttgcactcggtgcaggaggagaagctccccatgaccctaaattccccccaggttgatacaaaggcaatgaaccttgaaaagtggacccaggaagtcccagttgcgctgtatgggaaccaatatcagtcaaaggcccagtaacagctgatggcaagcttgaagatgaggtaactgggcgagtatagtgagactgcaacatagattcaattttttttaaagcaagtcaacatttatttaccattttggaagatgtattatcaataagttaaaaaaaacattcccaatctcccatacctgaatgatagccggatcattgttaattggtggtgtaggttgggcaggttgggcaggtggagaagatttgacctgcaagtcctgtaaaataataataataataatgtcaatggatcaggccaagggtagggacaaagcagcaatattctataagtacacattgtttttgtttgaacatcatcaacttccactaataagatcatgtaaaaaacaatggggtataacaatttagggagttaataattctcaccaagatactgtcaagtgtcaacaaaagttaatcatgtcaataaataccaaaaacagaaatgtcaaaataccatgacctcttgattgtgtaatttcttaattatatagaaatggaagtacaaatttacaataggtaactgcttttcatagttataagaaaagggaaaaaagaagccagaactatttaactttaaccatgaaactatccagcatatactgcgaaggataggttcagtccaatattcttggatttaaattattatatataaaataccttgatgtcacttccacggaatagtatatattcatagactttatcacttggtggaatttgtggaccatcctttttccttccctctgttccaaaggatcgtactgccattaatgaagcaaattacatagtgagtacagaaagaaatatacatataaaaaactataagaaaaagaaaatccctttatatgagacttgaaaacttgaaacagcttataataagaatgttgttaaaaattgcagcgagatattaaattctacgcagaaaagggtagtgtgaattagagataaagaaacaaattctggcatatgcacaaggattgttcaaaaattcagttcctcaactcaaaactgtcttctctctgagttcaattaagacctaaacaatacgtgaagacatatagttataatgtttctactatgcaaatgtgacagcgtacaattcagcctagaatttggatgaaaatgtattgtatgcctatgggaatctagttattgttggcaacacaactacacgcagcgagtaaagtaaaaaatgtgacgtcatttagacagtttgagcaagaacttaaacaagatttcccttccaattacgaaatgaaaaactccaaaaacgataccgataaatctcacatccaagaatatgcatacagcgataccgagtcaaataactcatttcgtttcaaaaaataatgccgccccccaaaaacgatatcattattaccgtcacattttcaaaatttaaacaataagttcatccaaagtaaccctaaaacatctaataagcaaaacccagtaaaatatatttcgaattcttggaaatgaaagtaaaccgaaattgcagaatcactcaaatcgtatgaaaaactaaaaactgtagaaaagttagtaaggaatggagaaaaaaccatttctgagcccaatactggactcttcggtgttaatattgtaaagaacgccttcatatctgatctcactcttggaagtcaaacttatcaagctccctatatacgaatcggctgctgagctcgatcgtgaagcactttctgtagccataccctgcgagccaaaaactcagagcatggatatacaaaacaatagagaaagggaaagaggagaatacaggttttttagggtttgtgattattattggtattcttttgggagatggaaaggggaagatcctaatatgagcataaaaattaaaacacgattcccttttacaccgttcaaccaatgggaggccaccacgttgacccaatcttggacttgttggtcttttcagtagggaacgcatgtatcctctgtctagagatgcctccccccttccctctttaccgtatcccaacatgacatgtgtcatctaatttaaattgccattggagagaaatatatgtcattttataagggaaatttgaatttccatgcttaaataacctaaaaatttgtctcctaaatgcaaagttattaaaattggtaatatatgaccattttatcaattttcctaaactacccctctcatttgtaatcagctctcttcctctctcttcgtctctcttccccacagccgatccctttcccattccaaca

SEQ ID NO: 294978 - DNA, 2341 bp, Cannabis indica
agcctcagaatcatcacacttgaccttccccaggcgatgtgggattgcacagcttacctggtgtttccccttacaaatcacgggactactgactgtcacactattggctaggacttttgaaataaccttatatataatattacaaagtgatatcggtctcagatcacccatgttaacagggcatttctttttagggatcaacacgatgtttgtattattaagcccagaaggaagtgaaacagacgcaaagaattccttcactaactgaatcacatatttaccaagaatactctaacactattgatagaaatccaaggtcataccatctggccctgggaatttatcagggtgcatttgataaagagccttcttaacttcattatccaaaacaggggctaataattcaacattatgctgctgagaaatattgggatgaatacaatccacaacaggttgccaatgagaagatctcgaggaaaacaagtcattaaaatattcagacaccaccttggatagattcgagtcccaatcaacccaaacacccatggaattctgaagcttttgaatagtattatttttgttactaaaagttgttttggcatgaaaaatcttactattttgattgccttcatgaagccataatttctttgatcactggcaccagaatacttctttttgaatgtaaattttagccaaattcttttttgcttcaacatactggatagtagaatggtgtcacaaagaagcttaagcctcttaatttctttcttacaactactaattctctcctaaaagttctcagtgtaatcacgaccccaactatttaacttatcaccacaagcttatactttcaccataacatcacaattagcacacatttcccaattgtcttggataacttgaaagcatagtggctcacaaagccaagcattttcaaagaaaaaatgcttaatttcggatacaaattttatagctggggatttagaagaatggggaaatggtctgaaaccaagacttccaaattaaatagttaagcagaatttaaaatagtcagccaactatcactaaccaaagctcgatccaattgaacctcagtccagttcgcaccacctttccctctttcccaagtgtatgggtaacctgtaagaggtaggtcatgcagagaacagcccaatagcatttgattaaagccttcaatcaaccagcttgggtatggataaccacccttcttatcctcattagaagtgacattattcaagtcaccaataatacaccaaggtataagacaatcatcctataatttacaaatttgggtccatgtttcatgttagttatatttggttccccatataacccagtaagacgctaactcaaagaaccaccattttgaattataagatcaatatgattatgagagtagctcacaagttaacctcatccttatgatgccataacaaagccactccaccacttcgacccctaggctcaactataaaaacaccatcgaaatccaattgaacccaaagacgttccaacacatctttcctactaatcgtttcacaaagaaaaataaaatcaggtttcttgtggacaaaaaggtccaaaagaaattgtgaagttcatgggttcccaagcccacgataattctaacttaaaagactcataatgcatggtgggcctggataccagtgcccaccgtaaagccatttttttttaaacggagactccatcttaaaaagcaaccgagtcttccatatggcactcaccattaccaaccccatcataatgggcctcacatccaccaaacacattaggtggcctattaatatatggaccaataacatccctacccgaggtacgcctcctcttaccatccaacaaaatcaattgaccatgaatatgaacattatccatatcaatagtttctttcaaaattagagtcaaacccaccagctgtagaatcctccacaatatcaaatcttaatatcttactcacgtcaccagctgccatattaatctctttccttatttggacaagattttgatgactaacattcgtaagtgtagggatactgccaatcacacaagcttgttgattacctccggtagtgctgtcgccatcaaaagcttcatcattagaccctgttctcagccatctagcactgatctaatggtttttgtgacgaggttgagcacgtattcctaccccatatggcttcaccccatatttcaatgggagaccaaaaaactttgggcaaaactatttagagtttcctataatgccacatatgaaacaaaaggccgggacatattcatatttaaaggtgttgggttttatgcc

SEQ ID NO: 294979 - DNA, 4274 bp, Cannabis indica
acttcacttagtctaaaaattaaggtttattaaaattctctttcttaattgctttactatattgatactcatacacttttttgtgttagatactgagaaactctactcaaaaatttcttttctatcattcaagttttattgtctagctaggggcatttttttcttatatgtaaatcacaatattaagttaatattgtaacccataaaatattagtttaacatgtccttaggatagacaataagcttatttagattgaaagaatctcttcacttttgtatttggattttttctctaacttataatggtgatctttacaaaataaaagatatatcatattatataggggtgttcataaaatacctaattaaatccaatccgtacaatttaatacaatccagtttgcaaaatgggaatatttacacttgtgcggatcgaattagattagaaaatttaaaatcttaaatgttatgtaaaagtaactaattgaatctaatccatatatatatatatttatatatatttaaaataattatatatattaattttttaatgtagaaaaataataatttaaaaatatgatataaatgtattttaaaacttaatacatcaaacttatattttattcttatttatataaaaaatataatttaaaataaaattaaatatttttatatatatagttttaggctatctaaagtctttattgttgaacaatgatttatttaatagttttaagttttctaaaatttaatttattggcactaaacatacaaataataattttgagaatgtacatacatatgcttataatttattattagacttaatgtatttattttttgtttggactcttaaattgtactagattaatattatgttagtgttatatatatcaacaaattgtttgaagaaattaacacaatgtaactgcatgaatatttgtaatgattttgtataactcaaaattttttatgcaacaaaaaaaaaatagggacaaaactctacaataatcataatttaggaaggataaatcctagttattttttatcatttaacataacgaaagtccaataatttttgcaaaataagtacaaatatttaccaaaaaaaagacaattataaaaaaaatgattgcaaattaattattaaaaaaatcaatttacataccattttatcatgaattatctctaattaaccgcaataaagaccgtagacttttcttattattattattttgataaaaaagagaaaagacaaaattatacactaattaccattttggcatttcccatgcattatatatataaaaagaaaatattttttatacaaaaagaagataagcacatttgccacgtcattcatcttcaccgatatatatcattcttaattcattatcccaaaattaactgtataaattaaattcattttaattaaccaaatcaaaaaaaaaaaaaaaaaataggaagagctgaagccgagtccacccaactcatctccactaaccccattaggctttctagaaagagccgccaccgtatacgccgactcaacctcaatcatatacgacgccgtttcatacacctggtctcaaactaacgaccgttgtctccgtctagcctcgtcaatcgcctcactcggaattaaaaaaggccacgtcatctccgtcctcgctccaaacgttccccaaatgtacgagctccacttcgccgttcccatggctggggccgtccttaacgccgtcaatctccgtctcgatgcacgaaccgtctccgttctccttcaacacagcgaatccaaactcgtcttcgttgatcatctctctcgcgatctgatcctcgaagttatcgcgttgtttccgaagggatcgccgattcctcgcctcgttttcatggcggatgattcgggttcggattcggatttggaaattggggaagaattcttttgtagttataatgatttgattgaaagaggggatccgggttttgagtggatccgacccgaaagtgaatgggacccgatgatattaaattacacgtctggaacgacgtcgtctcctaaaggtgttgtgcatagtcatagaggaatatttattatgacaattgattcccacatcgattggggagttcctaaacagccagtttatttatggactcttgctatgttccatgctaacgggtggagctacccgtgggtcatggcggcggtcggcggcacgaatatttgcttgcgcaaattcgacgcggctgtaatttacgacaagattaaaaaacacagcgtcacgcacatgtgcggcgctcccgtcgttctcaacatgatttccaacgccccgggatctgaaccgcttgaaaaaccggttcaggtcatgaccgccggagcgccgccgcctgcggcggtgctgttccggattgagtctttggggtttgtggtcagccacggttacgggctgaccgaaaccgctggactagtagtgtcttgcgcttggaaaaaggagtggaatcgccttcccgcgacggagaaagcgaggcttaagtctaggcaaggtgttgggacggtggcgctgacgaaactcgatgtgattaatccggtgaccggtgtcgccgtgaaacgagacgggttaagtttgggggaagttgttcttagaggcggttcggttatgttagggtacttgaaagcccgaaaagcgaccgcgaaagcgatgactcgcgacgggtggttcttcaccggtcgacgttggcgttatgcatcccgatgggtatttggagattaaagatcggtctaaagacgtgattattagcggcggagagaatttgagcagtgtggaggtggaatcggttttatacggtcatccggcggtttcggaagcggcggttgtggcccgacccgacgagttttggggtgaaacgccgtgtgcttttgtgagcttaaaagaaggattggagaaaaagccaacagagaaagagattattgagtattgtcgtagtaagttacctcatttcatggttcctaaaacggtggcgtttaaggatgagcttcctaagacttcaactgggaaagttcagaagtttgtactgagagatttggccaaagctatgggaagtggaaggagtcggagccgtatgtgacacgtggatcgcacgtgcctttatgatcggtttgttcgttagtactataaacagtaaacttatgttacttgtggacaagagttagagttacgttacgtactcattattttgttttttttttattgaatattacgtgcatgacagatatatatataaataaaattggtttttctttgaaaggaaataaaattggtttttattttgaatagagttgataaaattttactacccaattactgccaaactattatgtactatttgattgtactgcatggtgaattttgtgtttagtttgttacatgtgagtatatatatgttagagatattacacaataattatcaaagattaataaagagattaaataaatcttactatataagaaaagtaaaagaataaaattaggaatatattatataaaacgagagaactctcactcataataagattaacatacatatataaatatataagtgaagaatgtgtgtaagaagagagaactctcactcataataaaaatagctttggatattattgggttttctaacaaagtgttgatagaaaattagaggttaatcatcactttagattttttttatatagtgtttaggatattatcatttaaaattctaattccaaacaactataactcttgtagtttttaaaatttttaaattaagatgtggttacacatagtaccacttaactcatactaatatatataacttgctctagtatatgtagagaatgaatagtgtattctctaatttaaataatatataaataatattttatttatgtatattgtatatatgttcaaaaattattattttaatagtgtagaaaataaaaataatagtaatttaatgatgtagaagaaaaatataaaaaaaaaaaaataaaataatatatggtataatataaagttgtaacataaaaaaataaaatttcaataatgtattccaaatgatagagtaaagaagctgttgaaagtgttcttacaattattttctaaaagctttgaaacgatttcaacaacaacaataacaataataataataaaagttagatcatactcactacactcactacgaggtatatataataactaaaatgtaaaataaaatagctaagagtttaaaattaagctcca

SEQ ID NO: 294980 - DNA, 1280 bp, Cannabis indica
aaaaaaaaatattaaaacattacttatttacataatcatcacattcatttaattcactagatttgtgatattaaaatgcacctcacgtcttgtcctttgacatgttgatgcaagttttgtgatttgtttgattgtggtaatatttgtttgcttctggtgagtatggcttctagcagtaatcagggggtaggaagatatgagcaatatggcagccgggaaagggagtatacataaaggaattagatacaaataggtatctttttcaattctatcatgagttggatgttcaatctgttattgatggaagtccatggactttcaataagtgtcctcttatttttcagagaattaagagaggagaagatccaaagaaggttctgttgtacacccttgatatgtgggttcaaatacatgatttgaagacaggattcatgctcgaaaaggaggtgcaaagtgctggggaatatgttggtaagtttatcaaggcggatccaaaaaacttcaatggtttatggagggattacttgcgtgttcgtgcctccataaacattgagaaacctttgaaacgtcgtatgaagctctgcaaggagaatggagaatggatttgggcgaattttaagtatgaacatgtgcctacattctgttttgtctgtggtatcattggacattctgagaggttttgtacgagacggtttgatcaagctctagatcaaattgtcaagccgtatggaattggaatgaaagctcaaattagaaggaagaactatctaattggagcatagtggcttcgctcagagttggatgcggtggagatagctggggacggtggagattctcgtcgaagcagggttgttgatggagcagtaatggagccgaaaatcatggaaattgacaatgttgacttgagacaggatagtgatcccatgattctagggaaaaataaaagtgttttaatgagtaaagatggtgttactaatgtacagcctggtgctagtagtaaggaaggaattccaaatgaggctgaaattaatgaagatgatttgttgttgattatggagaacaaacgtaggcatactgaaatggaaaaaggctttgttgaacctgatttaactggggtcaatatgggccaaatgaatgaagatattgagggatcaaaaaacgtttcaaaggtgggccttgtgtctcaggcccacccatcatcatgagtattatttcttggaattgccatgggcttgggaacccatgggctcatcaattcattaaggatcttgtgatccaaa

SEQ ID NO: 294981 - DNA, 3237 bp, Cannabis indica
aatcacgtaatacgcctatgctagttagggtgttacatcttgcctccaagatgtctgcaaatctcagtatccactctttaagaaacggtcctggtgctcccactccctcctatagatatcaagtttgaggttccaatggttataacaatcaaccatctgaaagattatatggtcttggcaatccctcaatccctcggctactagtttgccataagcctagacacattgtcgttgtgtatcattacagatttaataaggcttttgttacccccaaagttggagaatcaaaggcctttcttactgaacttgatgatcaagaagcaccacaggcctattcctccagctctgttcttgaatttttgatgattatgattggtatgctaacacagacgcgacaaaccatgttgctcaaggaatggagaaatttgactctaagataccctactctggtttagaagctttaactattggaaatggtaagagactccacatcacccatgttggtaaggcctctttaccctcctctaaattctttttaaatttaaatactatcataaaagttcctaacattgttgaatcttgttagtgtccttcaacttacaaatgacaataatgttttcttggaatttcattccagtacttaatgttttgtcaaggacaatgtcacaaaggctgttttctcaaggggagagttaaaattttcctgtacacattgtctcaccactctttttcgactccaaatgtgcaacttcagtgtcatctagccacaactaatcctagttcagaaacaccatccatttctcaatattcttgtaaatttgtagctgctaatttagcttcaatcaatcgaaatgaattgtcactaaataaaataatattttctacatctacatcttttatttcccctgaagttttcaatgtttaggcattaaatgttaatttgtggcatgccaaacctgggcatcctgctccccaaaatcctagccaaaattttatctcaacttaatattccaagtaatttaaaaggactaaaattttgtgaggcatgcaaacaaggtaaaaatcacaaattttcacattttatagttgagcctagagcagctcaactacttgaattagtccatatagatttatggggaccgtctcataccccatctaaggaaggatacatatattatattcattttaaagattatttttgtagagtgggggtccttggacctaaccatgggaaggccatacgaaatacagcacaagatatgtgacagaacatacaacctctaaaaactgaacgggttagaaattccacgagcatggaacgcggaccacctgcgctgatattataattaactggggtggtcggatccttttattgtttgtcttatttccatgtacacctcaggataggaattaattgcctagaaccatttgctttgaggatgaacacggttattaaggaagaaatcagactagcaaaaataatagtgagttattaaggaaaagaagaactcaacaccagcagaggctgctgcagacaatgtcactgctattgatgacttcaaacatgtgactaaaggctggaaaccaaaagccaaacccccagcagctagtacggagactgaaaattcttttcatgtctttaatgattagcaagcgacatatgctactatggtgattacagaaggagatcaggaaaatgttattacacaaacagtgaagagtggaggagggggagggcttcctctacaaaacagataggctactaatttggaatgtccgaggagtcaacaaccaacaaaagcaaaatatggttaagcaattgatctactcacaaaatgttggtttggttggcctcctcgagacaagagtcaaggcatccaaacttggaaccttgtactcaaatatgtttacaggatggtgctccaggatggtgcttcactagtaatttagcttggcacaaaggagggagaattatagtagcttggaatcctaattccttttccattaacatactcaaatgtacaagtcaactttccaccttgaagtctcttcttcagatggtaagaagttctttgctacatttttttatggctttaatgatgcagaaggtaggaaaatactttggaaagatttaatgggaattgctatccttgacccttggactgtgatgggggattttaatgatatacttgcaaaagatgaaagggttggatctaaagttagacacaacactacatcagagttctcaaactgtgtggcttactgtcaactagaggatattaaatacacggggaactttttcacatggtgcaacaaacaacaagatacaactataatctattcaaaaatagaccgagtgcttgctaactctaattggattgatacctttcctggagttgaggctattttcttaaacgaaggtatctttgaccactcaccagcactacttacttttcaccataattttcaaatggggaagaaacctttcaggtacttcagaatgtggtcttcacacccaagctattctgagtaagtaagaagaatttggcaactgaattacgatggcactaatatgttccatgtggtgtcaaaacttaaggctctaaagaccatcttcaaagagataaatcagtagggcttttctaatattcaagctgcagtgatcaaagctaaagaagccttagtttactgccaaaatctgatgcaccaggaccctttcaattctgttttgcaagaaaatgaaagggaatcgagacaagcttacaaagaggcccataactactatctttctttcctctatcagaaggccaagcttgtttggattcgcaatggagatgacaatacaactgcctttcattcgagcatcaagaccaaaaggaaccaaaataaaatcctttcaattgaggattcacagggggtaagcgttgatgatccgaggaaaacaactgacattttcttatcatactatcagaccctgcttggttccaacaaaattgatagaacaaagctccaggtccgaatgggaactcaagctattccgggaaccaaagctttaggtccgaatgggaactcaagctattgttttcaagataattgggaattaattaaggaggacatttgtgatgcagtcagatatttccttcacttaggacacatcctaaaggagatcaactgcactacacttacaattattatcaaagtcagatgccccaactctccaagtgacttcagacccat

SEQ ID NO: 294982 - DNA, 2160 bp, Cannabis indica
ccctaaactggtggaccaattttagggttctccctagaaaaatagttcaccatttttgaaaaacggtctactatttttctatagaaaaacttaaagacttcataaacctgctcaaacctcctccaaatgaaaccaaacattccaaaacacctaatttaggtacaataagcatatttcaataattaaaagcatcatgaaagcttggcttgaattccaccattgttgagttatgtctaagctttaaaactcaaacctacctcaaactcaactacagccaaaaaactagctaagtaacgacttatttgactcaaaattactacagaaaccacccccaatttacccaaacttgaacagaactagaacataaaacttctcatagtcaaacttaactttatcactaaaattcaaatagtacttaggttagggcttaccttggagcaagctccagaacaactatataagccttaaacaatctattccaacaaaaattttaatcatcaaccctaaaaaatcatgattaaagggtcaatcttgagcttgaaagctcaacacaatgttaaacctaacaaaaccagcttaaaatagaacaattaaccaagaaacaacatcataaaacattttcaaacattcttaattcgaacaataactaatactcaacaattgcatgcaaaaacctattctttaactaaagaaaacaatggataaaaattttaccttggcttagctatgacaacccttagcttactacaaaatacccctttaatttttggtctaaaatgaaggaaaaggggcttggttgttggggtttgctaaggtcaaaccaagaggaaagagagaaagagacttggttttttttcttttgatttctaattttggataaatgagtttcttttaatttaattaattaaataaaatagggtctgaattattctaaaccattaaagtccctactaaaggcaacttatgggaaaattactaattttcccatttcttaaccatgaagtaaaattaacctaggactaaaatggtccaaaatcacaatcccgtctaatcccaacaattttaatgtctagctattttaccccattaaatctaagatactcaattgtatttatgtgactcaaattggccaaatcgtcacattccactgttactaggaataaaatacgaaaaacatgtaatctcatatatagcataaatattatacctaaaattcaaatatatcaccataatcacaaaaataataatttaaaacctacttctaactataagccctaagtatttgctaatttccataataaagttaagcgatcattacaaaaactatttgctttgagtttaagtccctgaaagtgatgtagtgggtcacttaccagtttaacgtaaattgtgacttagggccttaaattttcgtgcaacagtttccactcatagttactggcatacaagcattcagaatcatgataagattagtgttatgatatgcatgttacatgtttaacgtatatgttttataacttcttataagatagcatatcagtaagagcgctattggtgtacatggagctacactaaatattgatgaatgtatgttaggcaaattctaaagccattagttcaacatattagtaagagtggtatcaatgtacatagagtttcattggatattgatggatatatgctaggacttgtcgtacaaagttctagactagtacacattagatgcaggataggatagtaatgaggtgtatgggctccttgttgggttttgtgccctaaataaaactcatttcaatataatcagatttactaattaataaaacatctgaaattgttttatgttacatggttcacatgatttatttcatgattatacttaatgtataaattaaattaactccagaacatatataaatatatacatttgttcatgattatagtgtcgtcaacacgtggaatataatcatgattatatgttcaaaagtttaattctcatgatttgtcagttcattggatttagactgacatgataattggcgataaggtatacttacaccttggataagtgttatgtcctttctagggtattggcaaagtttaccattatcagatgtgtggagtatacattggaagggacaaatattgaacttggataagata

SEQ ID NO: 294983 - DNA, 2752 bp, Cannabis indica
tgtgatgtctctgctgaaacggatggcacttacttgtggcttgcgattttgcttggtcctgtttcaatgttgctggtttagcttctgtagcaagagattctttctcttctttgctgccgtggcttgaggctactgctagctgtgttaccagtgagatgttggggcgggtaataatgctgtgttgggctttatgggcagcgagaaatgatctggtgtggaagcagcgggtgagaagggtgagtgaggtggtggcttttgcaaatttgagtcttgaccaatggataaaagctcaaggaaagggtaatctacccttgttgtctcctctcaaagatggagatggtgcggagcagtggataaaaccgtcttcaggtatcaaactcaatgtagatgcagccatttttgcctcctctttcaagcacggcttcggatgtgtggtgaggaactcggatagtggtttgatctctgcttttgcagggattaaagatggctcagtggcccctgaattggccgaaatcataggtattagggaggctctaagttggctcaaagacaatgcttacacacgggctatcatcgagatggatagtcttgtttgtgttgaagctattcggagtgcagaaattctagcctctgcgttcggattggtggttgatgattgcaaaaatattcttcaaaatttgttcaatgtttcgattttatttgttaagcgttctgcgaaccgtgctgcgcactatgttgcccgacactctgttactttagctgaacgtatgttttccattaacagtgttcctttgaatcttatgtctattctggagagtgattgctcattttaataaaagaacacttattcaaaaaaaaaaaaatatatacatatataaatattatgtttacacaaaaataattttattatgagtaaaacatctacaaaattaacctaattatgcaactaaaaatatacgttgtgcatacttttgtttatctaccataaaattagtttccaagaaaatgtatactgaatagatgtaaccaacaaaaggcaagggttttgaatatttagaactgaagagaacctttataaacacacaaattcatttaataaaattacttgtaaaataactaactatcaaaaattataagttatgtcaagatcctcaatagtatgaaaacatgggcaattgtctcaagtgattcatttgtgcccttacaatagaaactgggtcatgtttttcttcaatgtaacttaattgtatacaaaaatttccttgaaattaggtaaaacacttgcatagaatgagcatgagagatcaaaattgaaagaataagatatattttgatttacaagatcaaaatatcgcccccccttcctatccaaaaacagataccatcttttccattcaaacaaaaatggccaaatgacctaaaaactaagcctaaaccttaatctcaatcttcaattttcgggtatcaatcttacaaccaaaaacatgattcaattgtcctgaaactgatgcagacatttggtacatgtgtaaaatgtagtttgcccttcatcggctgatctcatctgtctggtataatacgaagcttcatcgttaccacatttttcacatttcttcttgattttcgatagctcgactttctcctcactaatttgtgatatccctagctcccttttaatgtcctcagcagtgacagtgtaagatatttctcttccaagaatatctttggcttttcgcctaaactgacaagagggacattcggcatacctagctgatttcataactagcattgttccacacaaatcgcagaacatgaaatccctccctctagaataagccattaaagctctcagctactgtgttttttttcttttaggggtttgagtgttgaaatctccaaacaaggttgctctaaaacaaatcattggcacacatgagggatttagtataatcaattggctagtttcttaaagcaattatgaaccaaacaaatagagcatatgaacatacaatttgagtgtaaacaagattttacatatatgtattcatgcagaacaatatacaaaattattaattttacagattggaaaacaaactcagaacacttataaaacttgcaaaaaaggtaaaaaaaattccaaatatatgatttaacattaatcaatacaaaaacatattcctgtttttttctcgaaactatcttataattagaattaatacaatgtatttctcgcaaaattcaaaggtgtatttaagtactttgactatgatagcacaacataatttcgaatcttggtagaaacgatcaaaaacaaagcttttctcttgcactaacaaaatcccaaaactgtgtttttagaattacattaacacaaaatatacatatacatatatcgatcgagtaccatataattgaggaccgatttgtaaaatttattgataaacaacatcattaagagaagaagtgtacctcaattgttgagtgcagcagaaaaagactggatttttcttttgcatcaccgagtgaaaccatgtgcagagacagaagagagggagagtgaaaccctaatgtagtgggctgggcttgggctctgttttagggaacaaaacatagagtaatgggctgataataaacaaaacggcccttttaaatataagatttttacaccaaaatttataactcttttttttttttttactgtaagatagaattttttttcaaaatactgttttttttatactttatactatat

SEQ ID NO: 294984 - DNA, 5014 bp, Cannabis indica
aaaactcccaaaccataaaatatgtttttaatcatcatagagatagtttagaatacatatcaagcatgaaaagccaacaacaaactccatatttcagattatgcaatcaactcaaaatccatctccaaaccaagaaactcaagctcaagaacttaagcttctactcaacaatctccccaaattatccagcaacaagaacacaattaaatacatgaattcagacctaaataataccccataatctcatccaacaatcaacaatataatcacaactaaaacttgcgatttcacaaccaaaaccaaacaagtcaagagctaatctctcatcatgcaagaactaaaacaacatcagttttccataaatattatcagtagtgaacaaagatcaaaacccataaaaattacctcaaacttcaaaccaagagcaagcttaaggttcaacaataacaaagctccaaacaatccaaaaatcaagcttttcttcccaaaaatcaagtttgagcaagaagagtgttttgagagagagaggggtcgtgtgagagagagattaaaccagaatttcctttccaatttctcaaaattcaacttttattaaaataaatcaattaaggttaaaagaccattttgcccctagggccttaatacacattcacactcatacaagggtacaaatgtcttttcatgcttaattaaatccaatttaaatttcagattatcacccataaataaaaatgccaaacaattcaatccaatttacatttcgggcccgaacccagttcggcccgaaatacccggttgtgactataccgcgccaacttgtcaaaacacacttgaaaagacagcacaggcatactatataataatataattctattaagcacgtaattaaattaatttcatcaatttacccttctcgggtcttaataactaaaatgcccctagctcaccaacggggtcttaacatattataaattaattaaattcacatatattgaactatataataatataattctgcacttattcataattatctaattagagttttgctaatccatttcttaattccatggtattacatctttaataatgggtgagggtcccactagttaagtagtcaacaatgggtgtcatccatgatttttttgggatatcaataattttaatatcttcttcacttggggtgatacttttttcggtcaagtgttctactagaaccacattgagagtggcagcttcttttgtggtggtgagttgcgcaagagcatcagcattggaattttattctcttggaatttgctcaattgagtaatattcaaatttttggaataagctttgtgcctttgccaagtaagaggctattttggctccccttgcttggtattctccaaaaacttggtttactactaattgtgagttgctaaaacatcttattgatttggcttgtaaaccacgtgcgactcttaggccaaccagtaaatcttcatattcggcctcattattcgacgctttgaacctgaattgcaacgctgttggattcggtagccattgagcgtgaccaatattattcctgcccctgagttgttttcattggacaacccgtcaacatataactgctacgtatgctgagggagcttttgaatgtcttcttcttctggccacctggtgcattcaactatgaaaccggcaagagcttgagattttatggtagttctttgatgataggttatctcaaactatcctaattcgacagcccacttgaggagttagcccgaggcttttggttttattaatacttgtcaaagggggttgattagtgaacacatgtatctagtgtgcttggaaatacgggtggagttttcttgatgcatggactagacaaaaagcaagtttttccatgacttgatatcttgactctacccccaagaggcgcttgctcacatagtacaccggtttttagcccttcttttcctctcgcaccaaggcaccgctaatggttgtttcagttatggccaagtataaatacaaaatctctccaattttggtttagacaaaatttggggctctgccaagtgttttttaagtactcagaaagcttcttcacactcttctatccattctactttgttgctgcctcaaagtaagttgaagaagggtaggcacttgtcaatcgactttgatacaaatcagtttagtgctgctatgcgactagtaagactttgaacatctttctttatttgaggtgagacatgtccatgagggcttttatcttttctgggtttacttcaatgcccatagaattgacaataaagcccaggaacttttcagatgaaacaccaaatgagcacttcaaaggattttactaacttgtcatccacgtagacctccatactttgcccaaattgatcggtaaacattttgttgacaagtcactggtaaatggtgccaacattttttagtccaaagggcattacgttgtaacaatataatcccatgccagtgatgaaactcgtatgttcttggtcagcgatattcataacaatctggttgtagccagaataagtatccatgaatgacatgagttcgtgtctggcggtggcgtcgactaattgatcaatacgttgaagtgaaaaacagtccttggggcctgctttgttcacatctgtaaagtcaatacatgtgcgccactttccatttggcttggggaccaaaaatgggttggccacccaaatgggatagaatgactccctaataaaattgctagcaagaagtttttctacttctttttttaacgtagcatatcttgtctcatcaaggagcctccttttttctcttttagctgggatgttcttatccaggttgaggatatgcgttattacattaggatcaattcccaccagtctgaatggacccacgcaaagacaacttggtgatcacgtaggaattgaataagggattttttttcatttcttattgaggtgcttgccaaccttcacagttttggtcggttcttctggatttaatacaatttcttctagttcttcaataggaccaaggtcggccctatcatcaccaatgcaagggtcgatttcctaaaactttggtgcctttggttcttcaatttcttccacgacggccatgataggtgccgccagtgctaattggggctattcatcgaacaattttgcaaggtgcaattcaccgcatggattttgaactatttctgtatcaatttttctgaagagtctgcgatttttgaaagaataaattgatgagttttccaaggggaacatagtcaaatgtccatcgtagcactctcaatgaaagcaccaaactgttgacgcagttttttgtcaactgatctaagaagatcgtaaaataaaagaggaccatagtgaattaatctgactaataaaaccgcaaaaaattagagatttatagtagttcacccccatgtcgcgatggtaatggggctacgtctacttgtagttttattgattagatccgacacaccaaagttattttctcaagagtgtgtggataaaaatacagcaaaggatttctaggtgaaatcttaatcgagattaatgaatataaggctaatgagagacttgatattcataaatctgttgtaaattaaaggttgtaaagttcttgggaacaataaaccaataatttgtggaaaaaagatgtattaatggtgttttgaggactggtgtcgactgagtatggtggatccaatggagaaggtgatcgaaataatgtggtattcttggcttctatcaagtgaacttcaaggggaaggtcacgaagagaaagatccaaaagagagaaaaagggtcccaaaaagaagaagccaaggagaagaaaatcctttttccagcctccttcttgaagtatatataggctagagggtttgttagtgatcccccacacatcgggatatctcattgaataatcccatatcccactcttttatgaataaaacattacaagtaaataaatatcaataacaatctccttgtatctagaaaaatatcccacaaatattggacaattggttaattatttccggttgaggatgcaccaacttgaaatggagtgatgggatgtcacatctctcctagaaatgcacgatgttgatgatgagtgctgaacacatgtgttttggagtgtcaattctcgcgcacaatgccacataggctttggcagtgtgctccaccaaccctcgcttagacgcatttcccaattctcgattaaaatgtgccaacttttattgtaagctaattttgggcctgataaccttagaattgagtgatggttatgagacacactttgatccatcttgaaattatctttccaacgcatgttcaaccaggtcatttggattaaaattaagagagtcatgcctattttactgaaggttgtttatactatcttgtaccaattgcgagcactgccatgaccaaatgctagaggtcggccatgcatgctctcagaccccttgggataagttttgacttattttttgatggtgagtcatattatgggggtcctgggacccaaaagtctcattttaatgtttgaaactctaacgggtgacgactaccaccagttggagccggataatggcagtggtcacccatggcttgtgggaagccataggtggtgtttctcacttgtatttggtacatggatgttgagaataaaatttggccaatgaattcttcttccttgtgtagtaaccaacctgtgcctttttactatggcagttgtctccaattgttgagagcactgccatttcctcatggcagtggtcacctatggattgttgggaatattttaccaggatctagatttactaacaagtatgttgaattaatatcctaagtatgaattctctaaaacaatgaaaataaacacataagggtttaagaaaaccttacattgattgtagcggaatattatgactcattcgttcaagatctcttgcctttgattcctttctgtagca

SEQ ID NO: 294985 - DNA, 962 bp, Cannabis indica
ctggttttgttgtttgtttttcttgcttgtttgaataaagaatactcttcttgttcaaaaaaaaaaaaaaaaaaaaaaaaaagaataaaagtgcataaaggaagtttccttccacacaagttttgctctagaatactctaagagggcatgagtaatggtctcttcactattaaaacacagggaaaaaataggagtgcttaggatttgcctcgtgtagaggtttaagccacaaagataaaatatgattgaaggccttctatacaaagtacttaatcttaggaggtattttaacagtccaaatatttttctaccagcttttataacttgaagcgtttgaagattaaggaacatgtgaaaagaaacgagatttagctaagtgataagtagaatttgcagtgaaaatacttgaagggtgatgcccctatatgaggaagtctcttgaagacttatcaacagggatttgtaatattttatcaaccatctttgagtgaagaattgattaagtttgttgacatcccaacattcattttcctcaataaaaaataaaactgtattaatcggaggaagagaactattaagaaatcaagggatattagcagaggggatctagttaccatctcccacattccaaataagctagcctttgagaagcaactctctaccgatgttgttccaagcgatgtcgtaagagggacgtattaactgatggtataaggagaccatatgtcgtcatttatttataaaatgacttacgacatagggggataattagggttattttgttcattacggcgttggttatttgcaaataactgatgccggaagatgtttcctaaaactattgaatattaaatatttttgtttattttttacatattttaatttttattaatttatataaattaaatattaatttcatataattaaaaattaaattaatcatatactaaatatatatatat

SEQ ID NO: 294986 - DNA, 4577 bp, Cannabis indica
tttttttttttaatttttgggcttgatgtaccttaccattaggggaagcctccacaattctagaagcactaaaaaagactggcccaagcttctccttaaataaattagcaacttaaataacatgttgagttggacatttagataaatccacataatcgtcatacaccactttgaaggaagaatcaactttttgaaaaacgacatgttccatgccatctgtctcaaccctagtaaccccactagaacctccagtacgatcaacaccaccagggccctcagacgacacccccacctgaccatccagtgccacttgacccgcaatcgaagaaggatcacccggaaccacacccaccatgccactaggcgaatctaccctctcatctgcaatgatcttggatatcctcaaattctaacatgacaacgatatttttaatcttagcctcgtcctttaaccacgagccatataaaggaattattctatcatattctattataaccatccttttacgacttgattagtcatcttccatgtggcgaataacatcacatttaaaacaataaatcggtaaacattcatatttaaagttgttccaaacattcctatttccttcatctctcaaggagactcccgccaagagagaaagtttcagtttcttctcattagatggatgttcttctgtatttacattcaagtacggaaacaaatttcccactagaaatcacttaataagcattgtactaaaattgcgtgtaggccatagccacgtgttaaatatggctgaaaattatcaatttggaatagccacgcacacagccacaagatgtgctgacgttgcgtaatagtagtttgttattattattgatatgaataaaatatataaagaggcgttccaccgcagaactcttctctctctcatttaacacttcccccaacggcactccttcctggctcctccttttcccaaccttcccaggtaacattcttctaattcttcattataatttctcgtttgaatttgtagaaactaatttgaattgtagagatctggtttggtgataagaattgtggaaagtatatgtcgcgcttcatgccctaatctttcactttgagttttgaatcttgaatcgacaatacattatcagatattgcaatttcaattatattaaagcttatttccttcaaacgtttaattgtgcatattataaattaatcatcgtaaatttcctaggcgaaaccctaattcatttgcgatttttattcatcgttcaattctggtgttcttttggctgtctgcagatttgatagtttgatcttcatgaattcaacaacaactgaagcatccgtggtttcctgtaaatcgggaaacaagagcgacctttgctttttctggattttgttctcattgctgccgaaattcttgggaacgccttttgtattcgtgaacttcctattgattaaggccattgatcgaagtccctcagcagtaggattgtttggggattttcagggaattgaactgtagctaagatttgacgtacacgactcctaattgctccctgcttcatcattgttctgcttacaaaaatggtttcgtctcagttctgtggtttgacaaagccccatttgaataaatcaattcagaatcagttacttcttccgaggaatcccacagattctgtggtctcagagcaacttgaactggatttctctgatgtatttggccctctaccagtaccaccgacaccgatagaagcgaattttggtgattccgaagattcaaatgagctcgtgtatgatgacccagtagtaatttacaatcgttcgcattctctggttgggccgtcatctttcgtcagccaatccttgaatctcaacaagcttaccataagcgagacagaggaggtggtggaatgtgttgatagagacactaaagctgttgagaatgagaaagttcagaaccaggatgcttacattgaggatggaatggttgagaaagataacacgccagtacaaactgtggggattgaagattttgaggtgcttaaggtggttgggcagggtgcattcgctaaagtatatcaagtgaggaaaaaagggacattggacatatatgcaatgaaggttatgcggaaagacaaaataatggagaagaatcatgctgaatacatgaaagctgagagggatatattaactcaaattgaccatcccttcattgtccagctcagatactcatttcaagtaataaattacttactctactatcttaattatcaatgattatttgctctgaattttacctttatttgtaaactttctttatattcttctttccatcaaattcgtaaatgtgatgaatctttgggcatctttctaatagagttagaattgaggaaaaattgaggatgctgtataatttagcttttatatcctaatactactgcagtactaattgaagctcactcatgcagactaaatataaactgtatcttgtgttggattttgtcaacggtggccatctgttctttcaactttatcaccaaggccttttcaggtaacctttaattgtaaaattttgacgtttgtttgccttcaatgcttaatatatggactttaacacgaaggttttccttttttcagagaggatcttgcacgtatatatgctgctgagattgtttctgcggtttctcacctacatgctaatggcataatgcatagggatcttaaacctgaaaatatattattggatgccgatggccatgtacttcttttttccttctttctctttgtgctcacttataatgcaataacaaatcagtgaagacttactgtaactgaacctgttattatttaatcaggccatgttgactgattttgggcttgctaagcaatttgatgagaacatgagatctaattctctgtgcggaaccgtagagtacatgtcacctgaaattgttcttggaaaaggccacaataaggctgcagactggtggagtgtaggaatccttttatttgaaatgcttactgggaaggtttgtactcttcttattcgggatttgttgttttctcagtactgtagcaacttatttctatttgtgagttctttggactaattacattgctcctttggatgttgaaaattagttttttctcatcaagtcgcatctagtagaaattgtttccccttgctttatataatgtatctgcgtgtgtattctgctgtttggataatcaagtaggagaacgctgtttggtaacctactctcttcctatatttttaaatattttggatttcatgtaaatgaacaaaacagattctgcctacaagtttgtgaggtatatatagacacgtggaaattatacaattgtatattataaatcattagtaaattacacgtgtcaaagagagtgtaatatatattgtatttagcaattatcattcatcattaaggacattgtagaataaagctacatgcatttatatctactaatgtgaggtgtgatagataagctgtttctgttgtgacatgatttgtgtgtgtgtttttgttgctttgcagcctcctttcactggaaacagggagaaaattcagcagaagatagtgaaggataagatcaagttgccagcatatttatcaagtgaagctcattctctgctgaaaggtctgcttcagaaggatgctagtaagcggttaggcagtggagcgggagggagtgaagaaattaaaaggcacagatggttcaaggctataaactggaggaaattggatggccgagaaatccaaccaagttttcgacctgaagtggctggtacacactgcgttgctaactttgagaaacactggactgacatgcctcttgtggattcacctgtcgcaagccccattgctagtggcaacgtgtttatgggcttttcgtatgtgaagcctgctgcctcgtttctttgcaacgatgcttcctgctagagttactacagtattttatattatacaatacaattatctcgttaataattgaattataatttatgtttgctatttcttgtcatttgagaaagagatggatttgcttgcagcctttatggtattaattaagacattgttggtattgttttctatttttgttttgaaagttatgttttcagaaatgatgtcaaaaagttattaactaggaaaacaaacatatagatactagttaatattgttataaaattatatagaataatataaaatagatatgaagaaaagaagaagatgagagaaagaaaaagtgaatgtgaatttctcaggtttttattttaatgggttgaacctctatttatataaatacaagagttaaatattaagaaactaagaaaaaagaattattacaattaatggtaataaataaaagatttggatatctacattattattaatattataatactctcctttgaatatctataataattgtcttattaaaaatctggctgaaaaacttgatcaaaagataaagagtataagtgtaaactaactcccctcttgtaggcattcgtggagattttctaatcgactaatttcgattttgtctaccgtct

SEQ ID NO: 294987 - DNA, 2538 bp, Cannabis indica
atcaatcaacatagtaagttattcagtttgttgattgtcttattaaatgtaaactaaaattatacatggatgaagtgaactaaaaacgtattgtcccttttgatatatatctcaacttgttgctgttcttcttgacccaactaatagtctcccgtaataataaactccattacattgtaatttatgtaattagtaatattgataaaaacatttgaacacagaaatcttgtacgtcttaagaaacaactttttcaaaacttatttgtttattccatatcttaatacatttttatttgtaagttttcaatcttaattccctttattcatgtttttatttttataaatcaacattttactatatgaacttatgaatcttatccttacaaagtattaatgatattcttactaccaaaaaaaaaaaaaatctaatataagaacttaaaaaaactctataaataataataatttattattctaattaacattaacttttattcatacataaaataaaagtcacagttattacatgatgaggatatatattcccattattctacccctccctaaattcccccatattaataaacaaaaaaaaaaagtaaagttaaatattaaaaactgttattaccataaaacaccttaaattaagcttccatatataattttcctattaataaaagcttattttatcatcattttattttacatcctaattcaaaattaccaaattacccctcttaaaaatgtccacctcggtcattagagggtgcaaagtcaaggagttgcttggaatttctcatccaaggcttcaccaccaccaccgaatcgaacactctcttctccgatcctccgccgccgtcgccatctctcttcaccggcaccgccgccaccttcaaataatacttgatccccgaaaccacttgtttctgagcctcaacaacctccgagaacctcaactctccgtcgacggcggcgctgtcgccggcaagtcggccgctgtgtgtacggattaagctccggttatactcctcgacggcaaatcgaccgagttgttgaatttccttgttagttttgacgtcttttatgacggttcttcctccgaccattttgcgcgacggctctccgccgtgtacggcggagatgaggaggaggaagagggtgagggatgagaatgtgagagagggtgagtttagcattgccataattgaattggaattaatagagattaattattattggttttgtgtttgggaattgggtttgggaatatttatagggagaggaaaaggagaggtagtgtttgtttggacacgggaattaagaaaggtgaggttagggataagaggaaatgcacaaacggcgtgccgcgtataatggaatacgaccaaattgtttttgtttctttctttctttctttggttaatattaatttataacgtatcaaacttggaccaccacatcacacatgcttttctctcttcatatcaattttacgattggttaataatattctttaaaatttattctttttttaagtttatatgaaatttattatttagttacattaaaataatagtatgacattaaagatgagtgagatattttttagtaattctctttcttttcttaataggtttctccaaatataattttattctttaaaagttattttattaaattatataaaattattcactacttaactacactagtatgacattaagaaaaatattaaacactataatattttttatcaatgctctttccactctcattatgttcctccaaatgtaattctaacaaaatagataggaggacgaaattgggttaattataagaaagaaatatatgtataatttgtgtcaaattcatgtatcgtacgtggcctgaattagtagtctctggttagatatttttatagtatttattaaattaaaaaataatagttgatattttgatgtatattatatacgtatagtaattgccagctaagagtaagagtgtgatgtttgtactttgtatatgtatgtattaattgggaaatttgggagtatacagtatatatatatatagttgtagtatagtggagtactgtactatagtctacaggttttatcacctcgattggggtttaataattttgtagaaaatagtgtacgcctacaaatttccaattattatacttgcttttacgacaatgacacgttatatatatttttggatttttgccacgttctttgctgcatgcttatgctgctacgtacctatctacactcctacacccatcacacacacatatatatgtcatttttgttttttttttttgagaaatactaatattatttattggtgtaattgttagatgttggaatgaaagtgttgtgtataggggtttatctagggcgggtcctaaggtatatggggcttaaggtgaaattaaattttagggcccctatatatagtttaactattataaaaataatagttctagtgattagtgtaatgataaaattttaaaaaactatatattatatttat

SEQ ID NO: 294988 - DNA, 1519 bp, Cannabis indica
actgtttatcacattatttcatatataatgatgccactccatttaatgtctatatatcatagacccacatgttacactcacacgtctcttttacatataaggccttaatagagtttatcttagttttagttatcgtgtctaacttaattatgccttgatcacataactcttatcatacatgcataattcatacattcttcacaaggatttatcctgatagtgcttatcaggcctaatctagttatatcttacacacacacacaactcttgacatatatgcacacaattcatttaacacatactcaaacatagaaacttttagggtaatagccctaactcgtttaaccatactcatttattcacattacatattattgcatattatgacaacacatatttaggataataaccccaattttacaatatttgtacttaaggtaataatcctaattcacgatagatatacttggggtaataacccttaacttgtaatatatatacttagggtaataatcctaattcacgatttcacaatagcaatcaaaatacatataactgcgtcattgtgctatactctatgtgcttaatttattgtcttacctcatttctaatgtataaggagaaatctcaattcctagtcacaatttatggatttcacacaatagggttagtgttaaatgctattttaaaatattcacatttaagattccaatattagaccaaataatagagcccagaacaagcttttcaacgatatataaaatatccaaaatgaagttcagagtgaaaagttatgctcaaaataaaataacaaaaattgaactgtcgctacatggtggttgcgaccatttatcattgcaaccagacccatgctctccaagactagattaggcaagggcttacccctgtttctggataaaaccgctgtggcgactataggtctggctacggggcttataacccaaaaaatactaatttactaaatttaaatattttccaaatcacaccaaacttcatcgaactacaaaaagtttatttctaaactatttctaagtataaacaagcttaaatttaacgaaataacacatgctctcatccatacatacaataaagctataattctactaaaatctcatatccaagctgaagagcataaatacaattatgctcaaatactaacaagaatacaaccatcaattcaagtaaaatttaacctatagttcagatttataatcaaaaatagcaacatagcaagcaatctcctaacttccacatgatatttcaacacacaaacatcaattactttcaacatgcatataaattcaagaaccaatttttctagcataaaaacccactgaattcaaacatcttaagaaagactcacaatagctgagatgttgctccaagcttattctagaaataaaactaattccttctttaattttcaagtttttgttggatattattttacgaggatcttagatctactcacaagtattgtttaacaccctaaatatga

SEQ ID NO: 294989 - DNA, 2618 bp, Cannabis indica
tcaaaatgttcagccctaattaatagtaacagaattgaataaaatatatttagaaatataatattaaaacgagtataaaaaattataaagtacaaagggtaatgtaaattttttaaataaaataagaataagattttagtgaactattttaaagcataaagtaaaaaagtttattagagtactttaaggtaagtaacatattttatatgagcattattataaggaactatgctgtctagcaccagcataaggtgacacctatatggttagtgattttctataattattattaggaaaatttgtagtataaagattcaaagttctgagtttgtaaaaaacataaatccaatgagtttttttaatggcataaattcaatgatcttttttagtggcataaatactcaatattagtaaaactataattttcatctaattttgtctatacagactccgttttgaatttattaaaaaaagatttagaagtaattaatacaacatgtttctatccagacctagtgatttgatatttgggtgttatatatgccctatttgagacactaatagagtttgtacagataaaattagacgaaagtttcagttttacaaatattgagtatacatgtcaataaaaaaattattgaatttataccacttatatacttaaaatgttaagtacatatggcgttattaactcttattattaaaataaaataagtaaaatttgatattaaattacactgttagtgattttacatctgatgtaaataccgtgaattccctttgcatttatcattttagataggtgcgcaacaagttaaagttttttgaattagtgttacacactaaagcgtgaaagtcaaacttcccttctcaaattttccgtgtaaattagtgtcctagcagtagcattactgttttatataaattagctacaaaatattaaacgaaaagagcattacaatttcgtttagaaagaatgatttttttttttttgtaatacaataaagaatgaatttaattaaatactttttacaggggaaaatgaacagaaagcagttgttgagctatgttctttcacaacccccatttggaatgacagattcacaagggattggaggatactgcgcttatgtactctaattttgcctatcatatgtactagctttaaccctacaagccctttgaatttggaacatcaatccactgcaactgaagttcaatttcaccacactccacatttctgagtctcagaaccatgtcctgcacaactttgccatttgagaagtaaattttactctcttccgctaggcagttatgcctattgggctggacttttgagattatggttccatttgggaggccctttaagcccatcttcaaggccttcaaatatgggcttatctcaaactctgcatcacccatgctgtcatcaaagctgaaggtgtccttgtcatatgcaaactgaaaaattatgatagggagtggaaagagttagtacaattcacatatggaatttgatcaacaaaacatgaaaataaaacttgggactttggattatgattattaccagcttaactggagtattaaaattcgaaactgtgagagttagaagatcattccattctggatttacattatgagacaccacatgagtcttcaacttctgcagttaagaaatatttttcaagatatctttagaatgaagccatttattccacttaaagccgaatcaccatatatctacatttagaatctttaaaaagtgacaaaatccatataatattacctgctttcccattttgacaactacataagggtcactgcttagggcgtctctgatagcaagattcactcctctcttgatgtgaattctaagaagacccaaccagttctccattataccaaaaatataaaagcttaggaggttagtttagcagcttaaaaccagaaaagtaaagaagaaaaacactgaacaaatacagaaactagacttgggatttttaaaattattatggtttttgctgtaaaacaaagtttgtttgatgagctaactggaatgacctctcatttatttatacccaaccctaaataaccccataacttgtttctttactttttccaatgtcaatgtcaaattgtcaattttgatgaccacgtcatcacgtgattcacgcgcgataatgctgagggctcattctttgtttctttatatttatacttagcacaattttgactaagcagagaaactggaggcgcgttgtgggccttcgagagagactcatcacaaacatcacttgttttggaatagtattcaacgtaaattcacatatattatgattacaagtggcttcaagttaaacctaatttactttttcttatttaattttaaaataatagctttggatttaacgacgtccatacatatattcatattatatatcatatgccacaaattttcttataaatatatttagaaggtaatacaataggctgtgtaagattttaagtattgatggtatactaatttatagtgattgattgaatcacatggttcaaattaatttttgaaaatttaaacataattaataatttttttatttataattaattttaaatat

SEQ ID NO: 294990 - DNA, 1769 bp, Cannabis indica
tatttttttaagcatgtaaaatgaaatttctctttcaaaatcatcattcttaagcatctgttaaggatataactaagacgaatatcaaatttacagtgcctcatagttcaatttacttgcaaaattattcattaacatatgtaatttataaatttaacatgcgagtggttttaactattcaatttataacataatccattcaaaaaaaattataaccataataatttctcatagcaaaatgtctataataagcacattaattttgtcattattgtaagcatattttaatagccatattttttgtgtaaaagtttcttaataataatattagattggaatttgttactaaaatttagcaactatgattgttttttactttcaaaatttagatcattattagaagtttttgtaagtttattatctaaatcttcgagtgtctttaatttatattattcataaatactttaaatagatgaacagcttatttatttaactagtttactatcgagggatatatagtatttttaatgtgtattttcatgaatttgtaaattgctttactcctaacttagccttattacttcactcagatccatatcaaatctaattttcccggaaatctttcatttcctgggaaaatttgtgaacttgatcgttcatattcagagaaaaatccatggcaaatgcctggaaaagagacagaggcacgaatttcgtttcacccagaacgctgttctcactcttctccatcactttcctcttcctaatcttcttcctcttcttcttcacctcttcaaatcgcaatccttaccccagccctaccgtcaatatcaaaaccacattccctttccgcacaatccaacctttcgattgccagaaatgtccccaatcttacccggtgattgcgaacatcgtcgaaaatttgaggcacccgttcctgtactcgctcgccgatttgggaaatttgcctgaaaagccacacaagaacatagtcagattgctcaaggggaaacccttcaggaagccggacatctcagctacggttcaggaggttttggagaagttcagacgtgaaggcagagatgggctttttgttgatgtagggggaatgtgggtatggctagcttcgccgccgcagtgatgggttttcgggtgctggtttttgaacctgttttggagaatttgcagcggatttgtgatgggatttacttgaatcgagttggggaactggtcactgtctttgaggccgccacctctgaccatcttggaaatatcacatttcacaaggtattgtttgtttctaatgataatttagtactgataaggttcaactatgtagattttaaaatatgcatttcaatcaaattacgttcaacggtaatgtgaaatcctaattaggaaatttttccatgaatgtgaagtatatattgtttcctttgtgcttttcgactttcgacttgttttatggttgttttgaacttttcttcttgcgcgcgggtatttgttaggttgttgaagagaaagtttgcatttttaataaggtgcttctaaaaattagttgggttgggtaagggtttggatattataagtgtcgagtaaatagtagttatgcttgcttaacatatagaagtataattgtcccaaatggagttttaaaataaattgcattaaaatctaatgcgaagttcctaatctaccatattttggataatcactgtatttagctatctaggtgagctttttctttagaaggtttttttttttttttt

SEQ ID NO: 294991 - DNA, 1766 bp, Cannabis indica
ataaatcatatgttacacaatttatttaccaaacacttaatatatatcattcacataataacatatattaccatattttaatttacatattactatattaaattatataacataatacatatcgtcatataaaaaaattaaattataattttttaaaatgtcaaaaatagacatgcatttaccacgaagagtactgatatttgggtaactctccaatgcagcccaaaaaagattacactggtaggcttcaaaataactttgatgcgcatgaatattaaagtatgtttaattttattttcattatgcttttattccttttaatagactgtttaatttttaatatatttaaatgatttttttaaaaacttttttaattttaaaaagatttttaaatgtttaaattaattgttaaatacaatatataaattaaatgatgtggaccaatcaaagagtgacatgtgctcaacgattaggtacttataaatgcaacaaaagtataatagaaggtatttttactgccaaaaaaaatatttaagtattaatctacaactaaaaaataaacttaagtattatcaccgtaaagtaatctattttataatagtgtaaggacatatttagaagaaaattgttcttcaagagaattgtttgataattgagaattaatattttaggtaaaaattacataaatatgggaaattctttgtatcttacaaaaattatggcagttattatgagtaatttgtggcataatcccctcataaatgcctagtttattgcaactaacccctaattctaagattttagtgtaaatctacctaaacctcaaaactgtaagcaaaaatacttccccatccaacaaatcccatcttctgcctatgtggctcggaagccaagtgtcaagtagacttacaagtgaccagtcataaaaataccaatgatgtggcattatccactgaaaaaacttggaaatataacttgaaattaaaattaactaataatattttgagaaataaaacttatgaactaaaatttaaaacaaaaaaattaaaataaaaaaagaaacgggtaaataaaataaaaataaactctttatgaatacaaagctacaaaacaaaaatcctaaatcaaactaacctaaagacgaacacaccccataaataattggaaatcgaagaataagcaaacccaaaccaatataagaaccataataaacccatttttgtaaaatcgaaggaaatccatttttatagtactcaattgaaaatgatttaacaacttctaaaatataacaatattttactacttgagcataatgttcaagatgcccttataaatttatgtcaaccactacaaagttacaaaccgtattgagacaaatattaaaagcggatctaagttctaatattctcattgtgaaaaagacaaaataataaaatgcaccacctaccatttaataaaattaaaatatatgaggaaacaaattagcatgccatctcaccattttaaatctctcaattatataatatgtagattttagttctctctctttctctctctttattccaccattgcagttcactgtcctctctcttcttcttactcttacctctcacaacacttcaacctttctatttcttcatcgttgttcgtgatcgcatccccagtacttgcttctccatcgttctgatcctccaacaaattatcacggtaaatatctctctctgtgtttcttttttatttttcgtagactgaattcattccatttt

SEQ ID NO: 294992 - DNA, 4254 bp, Cannabis indica
acaagaaatgaaagagatacaattacaagagttgagtttattggaagaaatggcaatgaacaaaaatatatgttccaatggggcaaatgatggggaggccaactctaaattgttgcttagacttattcatgccaaaatgtccacgaattttatttcaaagttggggaaggtggatctactggttacggagaagacaattaaaaatttattttattatacaatgatttcaaaaatcaaacaatggtggattcaaaggatttcaaggggtaaattgggctcctatcgtagaaatgttacaagactgactgataagccaaattaaaaagaaaaaaaagagaccaaagaatcagagttagattgtaatggaatgaaagttgcaagatgagatggggttactatgaagctatttcagcaaagttgggaggatctaagagaggatatcatggaggtcttcaaggaattttacagtgatcgcaccatcaacgtgcgcaccaggaaacttggtatgataactagcctataaagatcacgataagcaaaatactaatgatgataagaaaaatcctatatgaggtcatgtttaaagttctatccaaaatattgagaagacaattcattaacaatatcaaatgtccaaggacgtttcacagctacaagacaaataagtaatgtggctctaatagtgaacaatgttgtaaaagaaaacaaaatgcatgcgacacaactgcaatgttgaaaatggatttataaggtttagaaagtggctttttttaattattgaaacttatattggaagagaaaaagaggattcaaaaggaaatggcgaagatggatcaatgattgctaatcattagcaaccttctcaattttgagcaacaatagaccacgagactagtttagaggatcaagaggaatgcaacaaggtgatttgtaccaccctttcttttgactatagtgggtcatagacttagaagactagtgggcaaagctaaggcattgggcttgttcaatgagctaaatattggtagtaaataaatttagaggattttgtacaacaattggcaaacacattgtcatgctcaagggagtggcctataagatatttggtcatactttagaagcgatcctaataaaaagtgattcatgtagtccgatgatggataaaattagtaaaagctaaatgagttgaaagaggcttcctatatataggggtaatttcacattgatagaattctttttgtcaacattatcgacggcatagaatgaaaagattcttatgggaagagtgtgatagggaaggatgtgatcacccggttggatgggagaagtaaacctaaggaatttgaagatttgagaaattggcaatatcgtaaagccgtaataaagccttacttgtgaaatggttatagcaattcttgacggaaaaagacaccttgcggcttaaggtaatcaagagtaatattattacgaaatgactccaattgggtggaatacataattgtcaattcacataatagttaagagcaaatagaatcattcccttggaacattaagatccttcataacttaaacaatagaaaaatgcaaagttttagcattgactacagcattacaaacttatacacgctacggattttgaggctttctcatccaaatcaacttcgagaagttagccaaagaggatggtgtgctcaatttaagtctttccaattcacagtattcattaagttggagaagaaaaaaaaacaaaaaaaaatggatgggtagtagctttgaacaagatgaatactctaagaacttacaaaggtggaactttttcttaaaaggtcttgcccaatcagcatgtattgtgtaaaagaaactttccagtgaccacatatttctacattgatgaacgtttataggggaaatttgggttaaattcctacaacagatggtatttgattagatgtgaccagaatcttcttgttaggaaataatgcaacatgaagagagtgtagggcgtcatggatagcattgagccaaagaaagacgatattgtggaatgcggttgtctcgctgttctttccgcaacatggctagagatgaacaatagaaccttcaacaatgtagaagagattgtgggatttattttggaaagacttttaagcagtagcttaatggaccctcaataataaagactttttaaggaatactatttgtgactgatatgtgtgatagtttctgtgatagttcacagtttatatactatctgaacttttttttccgtggctcaaaaggactgtaagaaagctgataaccaatcgtctcatgtaatataatttctgtttcacatctataagaaaaaatcacgaatccaagggccatgggtattacaattgcacacaggtgttgtatttctaaacctctctagtatgctatatagatgacttttctggctttgttatgggcttctacttatattgattttgaaaacagtccttcattcactgcatgaaccactaaaaggataatgttctcacacaatttctttttcttttacctcttattgaaggtggccttcatgttctcactatcttatatcgtgatatatttcttcaatcaataaacatatactgtaagagcttataacctttgagtaacataataaatagaaaattgatcaaatttcaaaaatcataaaatattaatatacccactaaatataaaatagaaacctacccagttcatccaaaatctagaactacgttactgtgcataaagaacggactttgtttcaaggtcatgtcactaatagctgtaatttaacatggaactaatagttttccttcaatgctaatcatcattttctaagcaactaaacacagccaattgaattccaatacaaatacgcacaaataataaacactcactctttaagaataaataaataaatacaagaacacttactactagagacgatcttgcactgagaaggcaccgagatcggaccggagaccggtgaatcggcgaggaaaacagcaacgaggccaaccaagaatgataatacgaaaaatgaaactatagggaaaaggagagccagagaccaacggagtataagaaagggcaagctgcgcttccttgttctcctctcagactccatgaaatgacgaaacccaaagccgccttttgagtcttatcgcaaattaagagaaatacgaggagcttctctgcaaactccggccaccggaaccatttatccggtgatcggttagattttcaaagaggagaggagaaatgagaagaaatgggattcatttttctttctttcaattggtttctttttcttttatattttttttcttcacaatgaacctttcatttctttagagcaaaaaaaaatgaacatgaacctttcattttcatttcttttttttattattataatttatgaagtgataaaaataatttgaattattaaagtgtatataattgtagagaaatttgtgtgttatattcacgttaattgaaaagtatgaattaaaaaatataataaaaaatattttttttttaagattaaatagtgacttcattgaaatattaacattttgagtacaaaagagcttctaaatcagcctaaatattatgctaaaaaatactacaactagaaagatatctagagtgtcatgccacaacacgagcaactctattagctgatcgtttgagaaaacagatattgacattacaaagtgaggatagtaaaaattggcaatcttgtataataaggccgaatgtggagcacatcttatgattgctgcgaatgctttgaacagtgagcatgctatccgtctcaatctcaacattttgccattgtttattttttacctagttgagagcttctttgataccaatggcttcaacaatttctgcagagtagacattaccctgatagcaagatttggcttcaattaatttaacacaccaaaaataagatttaagcagtctgttgcacgcgttactattttattttgtatgcatgtaaaacagacttttcaaacactggttttggtattgtaaattattatgaattttttaaaaaatttcaggatgtcttgttagagagtctcacattgctaatgtgcgaaaaaatagaatgtattagaccatcttcgatggaagatattaaaattgtactatatttggcacaaaaaattagtttgatggtaaatttacatcaaattttagcattatcctccaatgcacaattacaaaatt

SEQ ID NO: 294993 - DNA, 3122 bp, Cannabis indica
gttacaagttatttttatttatttttatttaatttctaaattaatcacaaccatttaatagtaatctaatggacttaaaaaatataaccatgatagttacaataaaaatgtattcattaaaacctcctccatatatatatatatatataggtatctatatatgctaataagtgaaagtttggatacttttgttgtcaatttttcttctaaaaaaattgtggcatatatatatgaaagaaaactagttgattaagcaacatttaaaagaaaaatcattattttttattagacttttatttttatagatttgtttttctacaaatttgactaagattgttccaaaaatgattggaattatatgaccaagttgatttttttttaaaaaaaatatatatatattaactatgtaattgttttaaaagtgtggcaattttagtgcaaatatactttatttattttaaataaatgtaaaaaatttaaaaaaaaaattatggattattttcccgttttgtttcataattaataattattttggcataaaaataaattaattcaaaatttcctgtaactcttcttattatcgaacttagcaattaacaaagttgatttgaaaataaataaataaataaactatagcaatttcatcctattgtaaaaatcatagacacatttatcatatactaaagaaaaaattctcaaaattagctatgtatttagatttaaactagattttgatgtcaatatttgaagtgagatattgatagttgatatgattaaagaatgtcacaacatcggtcacaagttcatatatagatgaaacatttataaattttatactatgtacgatatttttactaaaggtgagtaaactacgtttaaatatataagccacttatgctatgttatagtttctacaaatgtcattgcaaaatataacgacttttttagatggattttattctaaatctaacgtattactatatattataacgttcattattaggcataaatttcttcagattttattcattatctgaaatgtgatgacaaaaattgttacacttttataaaagtaggattttttttttcagatttttttcttctctcaatacatttgtgtatcttacatgtagaaaaaaacaaatttcttagattacaaattttcatggtttcatgcactttctcaaataaagtgagatatgtataatctcataagtttcaataagcgcacaaacaatatctagacttaaatggttgacttgtatatatgaacttgaccctttacactactatataatcaaacacacaacaccacaaagctaatattctatcctagctaaatctaatacaacctcttgtgaaggtattaattttacacttatatttttttatataatacataatatttatatgttttacatttttcaatacataatatatatttatatgtttttgcttacagaaaaaaattgaaggagaaagaaatggtgctaggtaatgaagttgttggtgcaacccatgaccacctagaaggaaaggaaataacaacgagtaatgtgttggtggagagcaatactaatgctgatgatctcgttgatctgacagctactgctattgccgtagagaataagttatcatcatcaactgttgttgctaatgatgatgagaagaagccaacaaccgtcctgatcgtggaagatcaaaaatttgctcgaatggttcacaactccttggctaggggtttaggtatggaaactcatgaagctgttaatggaaagatggctgttgatctacatcgttctggggcttcttttgatcttattctcatggacagggaaatgcccatcatggacggtgcaaaggtaattatttaattttaagaatcacatgattttatctcaaaactaattgatgataataagtgaactaactcatattattttgaacaaaccgattttagggcaactctaacttctatcatttctcttctaaattatttatattaaattattttcttatttcatttatttttcaatttatttatatactattaccttcttggatataattttattattatttatttatggattaactaaaattttgagtttgccattgtttataatgcaggcaacggaggaattgcgagcaatgggagtggagagcatgattgtgggagtgactgcgagtgatcatgaacaaatacaagcattccttaaggctggtcttgatcactgcgttgttaagcccttgactcgtgacatgttggtctctatcatgcagctcttcaatgagactaagcttcagaagaaggagaaggatgcgcctactcacaacaattaggtggtgggggaatggggatgtgtcgtctttaagtatatatcacaataataataataataatatatagctaataaataaaactatatgtatatggacataagtcattgtatacatatatatatgtattggttttgttataatataagcattttcgatgatgtgataatatgtaaccttttttaattttaatgttcagtctacataatataataaagtaataagtacataatattacaaatctctctttatattattatatattacatatgtgtcgatcaagctagttatattttttttttgtaaattgaagcctatatattgttatgttaaaagaaaataggatatataacacgataggacccaaaaaatattcactaaattaaataattttgattaaaaaataaaataaaataaaatttagatttacttgcctaacttgaaaatagtacaaaaacctcatatttaaaatatgctcatttatattattattcaagaaaaaaatatgtaccatatacacattaaggtattgcctcttaaatatgttaaataatttaaatcgtcaatataaatagactacggagtgtattattaagagttttataaatatatttgttgggtgtacaaccaaagtcgcacattggctagaaataagaaagatcttgggtatataaagatggacactatctctattagaaagaagccttttgagaaaatatccaaaaacaaattcgtgggttaggccctaagcggacaatatcatatttgttgggttttatgcc

SEQ ID NO: 294994 - DNA, 4474 bp, Cannabis indica
atatatacataattttatattaatttatttttgggttggtgatcatatcatgagaaaccagcaagctctagtgcttataagaacttgtgatttaacctctcataatgaccctcaaaagaaagttcagtatcaacatatacacatatatatatatatatatatactacatatgaaacgatcatcaacactgaaaaaagaaaccctaacattatattattaattaatctcgatcatgaaccagacttgcatggaactttgttgtagcagatcatgttcactttggaaatcttcaaacttttcctgtacgtacgtacggtgacttctcactgcactactatagctatatttataatactatatacatatatataataatatgtttatatatataatgatgaagatgatgatcaagtagcagttgaatcgatagctagtgcaaattatctcccatttctatggcattgagggctttattcaactcaaaatcatcaaaataagaagaatcgaataatccaaaatcttgaatcccaaagtcttgacagtccataagccatgatgatgagcaataagtatcctcaaaagatggtaatatatctccattaatacagcttgatggtggtggtggtggacacgagagatgatcatcagaactatttatactactattattgttccacaacattaatgaattagtataatcatcatgatcaaccagctccgggggagactttatgttattgtcgtttatccacaaatcgttcataaacgactcgtcgttggaaaggctgttgttgttattattatgatcagctaacaaccaaagggactcctcatctccagaggaagtagtggagttttcggccgcggccggagatgaagcggacgagttttccacctccgtcgtggccgtactaccggaactttcttgagaatgatgagtagtagtagtggtggtggtggtgttattagggttttttttattattattatcatgttgggatggttcgattgttgtttttgaaggtttattaagttgatcattatctttattgatgataatcagaggttcgtgtgtgactggatcaattcccatcttaagaagctttttctttatgtgtgtgttccaatgattcttgatctcgttatctgttcttcctggtaatcttgatgcaatcttcgaccacctatactcaattatatttggaaaaagaaatattattaattgatttataatgaattagttaaccagttttattaaagttattattataatataattaagttgctgtatttatatatatttaacttgtgctcataaatttctaattattttgtttaatgatataattattattatctctcttttatcatcaatatcgaatcttcactattaagcaattatgcaaccatataataattaattggtcaatagattccatcaatagcccagaataagtaaaaaataaaagaagtttctaccttatgtattgtgtatatatatagatatagatatactgtattcctacctaacgaaaataagatgatcgtgatatgtgctatttagtataaacatatatataaaatatataattcgtgtaaacatatttttgtgaaagtcaaagaaaaaaggcgtcaattataagtttcaaactaatattttattgatgtatatatattgtaattatcgtttaaaattacatgataattgaagacaaagttagtattgaaaacaacttagtaacgtactaagttgctagctacaccacaaaaaactaaaacttagaaaaacacaagaaattacctattgtttataataccaattttaattaattaaaagaaagttaacataattgtgatcaacaagaaaaaaaaaatagcatgatatatatccttcataatgaacaaattaattaaaacatataataaaaagtaagcaattattttattacctatttccaagacgagcatgaagatcaatgactaactgttcttcagcctcagttaggagacctcttttgaggtcagggcggaggtagttggtccaacgaagacggcaactcttgccacagcggcggaggccggctagtttcgggacagctcgccagcagcagtggccattggtgagaatgaagttgatgagtttcttgtcctcctcagctgtccatggccctttcttcaccccaagtttatcacaacaaggttgccttcccataactatgtaacactacaaaatactacttattattattattattaactctatctctctgtctagatctccctctctttagctagctatctacaatttttactcaaaagtactataatagtttcactattaatatcaaaagcacaaaaatttgggctctctctttctttaatttcctcaccatacaaataaagacctaaaaagtctcacacccacctttatataaagatatactctcttatgtatttaatttattttcttcttggctgcttaatattcaacatatcccatctttattataaacaaaacatttgtcacacaaagtaatgaatattattattattatcaaatttgtgtgtgtgtgagagagattgagacttagatgggacccattttgggttgtgaaaatgaaagaggaactaatgcgattaatggatggtcttggatctggtggaaccgagtccatagtagactcaaattggtggccaagaaggttgaaagtgacctaagaagggtgtctaagtcagcaatttttaccaaaatgtttagcttattataattattattattactcccatttttcctacacaagccaaactgaccttgattgcaatcttactcaaccattccatcacctatttcgtcatcaccacgtttacgtgtccttgttgtggactctcttcgtatatatgctgttgcttacaagtctaaaatcttgctctttagtaacaccatccaatttctattccaatactgtatgtatagtttgatatatataatatatatatgtgtaatttaaaggaatttttttaagtccttaattgggttttgttttattttgaagaaattagaactctcaaaatcgttgtcatcttcatggaggcagtttttatatttggaggatatatatgtatatatagtacttaataatttggtcatatggttctttcgagtgctaccaatcataacacgccagaatttttcaagacagccaattatttttaagaaaaataataattatacttatttctaaagattattattgagaagaaattgaaaatttcgatttagtacattaattaattgcatttccaatagtaataactcgttctaagaaaattaagaaacaaacaaaacaaaaattagtacagcatccattaaactcaatcttagaggttgtatatatttatatatatttatcatataatcaatggattgttcaaatctttcaaattagtataatttattataaatattgcaatcaaatatttgtatgtataataaggttttttctttctgcaagtatcatgtgaattaattatatagaaacaacatggcatttgcattaatattattagtagtagattatgacaaattaatgtgtccaaaattgtatagttaaattaccctagtcaacccctctaaaaaaaataaaataaaaattaccctagtcaaatatatttgatatatagttgtttgtgcgctctctcatttgaaatagttatataaatataacttttaagagttggaaaaaacccaagtcatatatagttagtaaacaaacacttaattaactatgtttattgtctttagcttctactgaagattcaactacttagtagacatgtcattaattatattttactaaatcaaattcaacatgatatcaataaacaatgaaacgactctcacatttagacagaaaaaagaagacaaattagctagccatctcttcaaactagctaatatatattgatatatatatcttaaaaatgcaatcttaaattagttcccaggttatatcaaccatctagtaattaaatcgatttatgattattaatcaagtgtccatgccaaaacaactatttaatatatatttatacatatatacgtgaaactagtatgtaattgttgttaagatatatgcctaattactttgcctaatgactctatttttagttagttagtggtaatgaggaattggttggtagtagtgtggtcttttcactaattttctttttattatactttttttcttttgttctgtggtccaagctgtgtaaaggtgacaacagggccgactctgaaaatatatgggcccaagacgaaataaattttgtggccctaaaaaatacataaaaaaatatgggaaatttacaaaaatactggaatttggattaatttttacaaaaatactgtcacacggaattttttttaaaaatactgtgtttttataaaacactagtaaaacacaaagcagtataa

SEQ ID NO: 294995 - DNA, 1520 bp, Cannabis indica
aaaattaaacataaaacttaaattttcttaatattattcattaaaaattcatccgtgtatatttaagtgctaaagaaagaaatataggacagagaaaatcagcacaagaggttccgattctatgcaaatggctatatagctgttaaaacgtacgaaagcaaaacaacatgtacatacatacagttgaatcaagaaaagaaaaaatgttataaagttgttcggcctttaacaaaacgctttaacttttacaacatttcctaacaaacagccgaattgagtgcacatccatccaaaccataaaccacttctcatattaattcttcaattaatgaacaccacatacttctaatcattattagaagtaattaagacttaacaaagaaaaaccttttttatattttcttcaaagaaatatggagtattacgttaacactttcttcctcctctccttactaaccattctttttctctctcattcgccacaatccgccatagcaacaaccgaagaaggaaacaacaacaacaacatcaacaacaaacaaaaaactggtcaccacagaggggccaagcttatctcgaaggtttgccagaatgtgacccaaaaagctttctgtagttcaatgcttctatccgatcccaacacccacaatgccaacctacgaggattaggtcttattgctctgaaacaagcggccactaacgcttctgatatttcggagttcattaagaccaagttaaatgatcccaatgtcgatcctgaagtccaggatggcgcctcggattgcctcgaattctacatcgatgcggccgagcagctcgaggattcggtgtcggcgcagatatccaaagcctataaagacgttgaaacttgggtcaatgttgccgtcagcgactcgaaatcgtgtgacgtcgtacttactggttacgattctgtgttgggaaacaagagtcaagtgtttcgttggctttgtgaaactgctttgaccatcaataagatgttggtcaataaaaagaaacattgagtttatgtgcgaatgagttgtcgtttttatttaatatatgattatatatattttttcagcgatcccatgtgtatgacattttagcacccatatgttaataagaggctaatttgtgtttgggtagttgaatttatatgatgagtgtgtgatttgacactattttatggtgatctattctcaacttgcaacgatatcatcacgagctatctaatataaatatataattatattttaaattttatgggtttgtttgataattaatgaatgtgtgttgaatttcgaaaacatgaaatgatgtcttttttttttatttttttttttttttttaaaataaaaaaatataatttattaagataaatccaatattataagagaatttaaaaattgtagacaagcatatgttcatatgtacttttctaaactattaatagatgctgccaatgtgtgggcaaccatttgatgatcgtaatatggtattgcaaaaatcactactaaaag

SEQ ID NO: 294996 - DNA, 5264 bp, Cannabis indica
ctttaactctagttagatagtgtgtcgtaggtaaatttttttttttggttgaagggaggggttataaaaccccattcattgaaaaaaacggcatagccgaaacagtacagtagaaaaaaattacagatgaaagcaactaactgaaaactaacagcaacacctagaaaaccaaactgaaaaaacaccatccacccccagcctaaggaaacaaccaaccacacccaaagttgcaaatttggatcaccttaatcagggttccattcattaacatcagagaacacattctcatccataactcccaagtcaagagtaccagtaaccccctctgcagcagcccacttcgctgaattgtgagccaaaaaattgtagtttctgtctatcttcctgatccgaaagtcctccagttgcttgactgatttcatgaatcgatacactgcagccttaatgtcgatgaactggttggagatgctgttggtagaacagctcgcaaccactacttcattatcacaatggaaggccactttccccttcagatgtaatcttgcgtactccgctgcactagccacaatgatcgcttccgctaacagagggtttgtggcagaaaatctctctataaatatagtaacaattctgtccttctcatctctaaagaccgccgctccaaatgattggtttggctggatcgatacatccgtgcaacaactccaccatccaggttcaggcatacgaatatgacttttcttctcgtgcttcggattccaactggataagtggtcgttatacgatcgatgtactgagttgatgatgtccgatattgggcggattggcgtgccatgtattaccccattacgagcctcccaaattgctttgaaaatacatagggcacctgtcatgaactcatcgaaagataagcatcttggtctgcgattattatcttggaaccaagttacccaatctggccacgaactacaataatgggagtctgttctcagaccccacatactgccaaaccatatggcctttgcaaagtagcaatcccaaaacagatgaattgttgattcctcttcttctgcacaaataggacagtccattgattggagtgataaagcaagtccaatcttccttctgttagggagggcatccctcataatttgccaccaaagcagtttcaacctcccgtggataggcgagttccaaatgattctccaatcccaggtggttgatcgctgagaagtggaattggtcaccagtttaaacgctgatttgaccgagaagcatccacggggatcacctatccacctccaggagtctggttgaggttgaggagggagtccgatattgaggatgtttcttgcatctaattcactgaaccacttcctcaccttttcttcgtcccaagacatattctcgtttatgaagtatttgaccaagtttgcaccttgagtagcatccatcagtggctgcggcatgtggacaccattgggtacccaattatcaaaccaaattgaagtagtccgtccatcaccaatctctcgacatagacctactttcagtaaggttcttgactttagaattgctttccacagagcagactcagaccctttcatctcgacatcaaacaaatttgacccttttagatacttctcagtgacaatagaactccagagattcttaagatccttaagaagtttccagccccactttagaataagagcctggttcatgtcttttattctgcggatgccgagaccacccataaactttgatttgcagattgagctccaagaaatagtgtgcattgcgtttctcccttcctttccaccccaccagaattttcttagactttgctccattttacttgctattccacaaggtatcacctctgaagccgccacataaatagggattgaagtgcctactgattgaattagacatgtgcgtccaactttcgatagcaggcgagccttccatccttctattcttgtgagaactttttgaaccaaatattgcatgtctttagtccgtttcttggacctgaacaggggtataccgagatatgatgcatcattcttcatctcgttcattcccaagagggacgtgatgtcattgattcgattttttgggacaccttttgagaagaaaacggttgatttttgctggtttatcgcttggcctgaccacgcacaatacttttgcaggcattccataaaggactgtgcttctttgatcgtggcttgcccaaaaagaactacatcatccgcaaacataagatgaataatcgcaggggcagaccgagttaccttgattcctttgatgcttccttctgtagtataatcctgtaacagccgagataacatgtctgaggctaagatgaataacgtaggagaaagtgggtctccttgcctgagaccactcgtggggtggatagtgccttgtttgaccccattgatcatcaaattcattttcttgatttgtatacagcttttaatccatcctagcagcgggtttttgaaaccatggaatctgagaggctccaatataaaatcccaatccattctgtcgtatgctttctccatatcgagctttatcatcataaacccttttgaaccttttttccgagccattgaatggataatctctttggcaattgctgtgttctcggttatacatcttcccttgataaatgccgtttgcgtcggagagatgatgcaaggaagaatatctctaaggcgggaggttatgattttagagatgcatttgtagatcacattacacaaggcgatgggccggaaatcgccaacctttgaagggccctcctttttgggaatcaaaacaatgttggtatcattgatgtaatgtggcaggtcagcagtatcaaaaaaatgtttgatgaaattgaggaaatcctctcagatcgtgttccaatgggatcgaaaaaagatcacaggaaaaccgtcggggcccggggccttgtccactcccatagaggttaaagcattcagaatttcctcttcagatggatgttccatgagatcctcttgaagcaaattttccgtttccaagtgattccaattttcagctaccaatttggtacgggaattgttttttgaaaacgtactggcaaacttcgcaataaaaagcttggctatttccttcatatcttctatcgattccccttgatcatttttcatacattggatgtagtttcggcgtcgccttgttactgtgcttgccatgaagaattttgtcgagcggtctccatccttgagccaagtcacacgcgatttttggcgccagaaaatttcttcccttcttaggctttcctcgagatcagttctagctttggagtgagccatttcatccaagtgagtagcctcttcgattgacttaagagttgatcgagcctcatttatctgaaccgataatttcctgaactgcttcttgttccacttggacagagagtccttagtgtgcttgatcttgcgatagagattcaccataggatgttgatgccccttctcattccaagctcttttaaccacccaaaacactctggggtctctttcccacatcatttcgtatttgaattgaggctttgtacaatactttccacccagggagtccagcagaatgggattgtgatcagaagtggtagccgtaaggtgggagacaatagcattcggccagtcgattctccactcagtagaagccatggctctatcgaggcgggctctcttcaaggaagaccccacggatggatccaagcttttcttaaaccaagtgaacttggtccctgtgtaccccaagtcaactaacccagtacggtgaaccattcttcttaaatcaaaggagtatctcgttgtatttgaggcattgacataattcaagttttcaccatcttttagagtaccgttcaggtcacccattaagagcaaaggcatgttgcatttctcaatatactcccctaccttcttccaaaattcctctttttccccataggaaggagggccatatatacccatgattatccatggtcgctccggggggtcagaagatataataccaataactttgttcttgtcggcatcctgaatgttacaatccactcccaatttccagcaaaaagctaggccgcccccgttccctgtggagggacatagcatattcctggaaagtgcagttttctcataagcccatataacttctcttctattaatcttacttctgaaatgatcaacacttcgggatttaacttccggataagctccttcagttgtcgaactgtcgtggcattcccgagcccacgacagttccaagcaagtagtttcatgatgcctttggagacatttgtgggcaagtctccacggccccaaagcaaaaaacctgtttcatatcttcagcagttgcatcacactctcccgttatctcctggatggtacatgctggtttttgtttaaagcatttgtccacaagcacgaagtggttgtccaggtccacggtaagatcaaacttctcattatcccagtgagcttttattatttgcttctgtttagatgctgttcttttttggtttctcttgaacacatttggtttgacacccacactctgaatggcttttgctggtcttcctcgtcgacgtggcgtcgatgtctgtgcctcctcatcatttggtttcgtatcatttctatgagctaccggacgacccctctttcttttgagttttccagtttccacataaccaggggagaagctaggttcaactgcgattacaggggagggaacattgtaatccgttgatatttgatttgcagtaacagggggttgggtcgacactccctcagtacagtcctgctcctttatcttcaatggactaggcccaatgagtatcccatccagatctttccgtttcttaggcccacaatcgaattccatggacctgatatcgttaatgtcgaagatgggattaaatattgtgggctccctcatatatttgtctatagttcccagaccagttaaagtgttaaagcccatctcccaaagttgctttgaaggccaagggaggatttgggcctggctgccaagcagacttgtgtatggattgaaattgcttgggcccgaagatgagaaaccccggcccaaagttgactgaatgttatttgactccatcgataaattaggggtgccgttagcctctgaatatttatctcaggttggtcttgttcagaaggggaaaggtgtaacgccctaatgctaaggcacgctac

SEQ ID NO: 294997 - DNA, 4955 bp, Cannabis indica
tgttaaactttctacagattatgagctaacaatacacattaaatgctaatctttattactcataatcaacaaccaagatcaatatttatttagagcatcaaaaatcataaatacacatacctcccaatccatccacatgagtcatcttgctttaatgcctccaacaagaatcaccaaccaagttttttcaagattgaacccaaacccttagagccacaatgtggagcaatcccctattttcttattaccataaaaccttaaaaccactctaccatcaataacatatatatacatctcatacccttataaccctaaggggttactcactaatagggcttaagtggtccttttatggtatactataatttaatgggccaattataatataaagggtgctctcatgtgcctctaatacataattaattcatcaaccatcccattatggttatgaacaaatattgggcacatagttaatgattgtgtttatggtattaagtttatgattatattagtccacaatattaattctaacaaagaagagacttcagagtttgagtttcgagattctggcatcacaattttatggttcgcttggaccatcgacaaccatggacgaccatcgcggccttcgccgttgttgcactgagaggaatgagagagaaagagagagttctagagcgagggaaggttagggttctaggcttttgggattggggaaactcattttgtggtctgtttggaccactagtgtcggcaagggtctaaactttgtctgtgcatgctcgccgttgagaaagaaatgaagagcgagagatagggcgagggggttttctgggcctgaggacggtgatgcatggtcctctcggggcatgggtgattggagcacgacgatcctgtcgtgccagtggccactacacaatcgcagaaggaagacagagagggtgtcgagtgaggaagaaagagaaagggaattagggtttccaattaggtttttatcattttcaatttatactctttaaattaaatttatttttatttttaattatattttagtttttttttaaaaaaatatacattttttttatttacaatttttttaatttcaaattatttttttttttaattttttaaataattttttatatggaccaataaaattgtgccttctatacaacgtgttcacgtagatatatacacagacagtctaatatgacacttaactttaaaatagatagaaactgtaatttgctaacgatttactaattttaggggttttattagcaaaatttaagttttgaaagttaagtataagcaaagtgaaagaattaagatttatgccgcaattaacttcttcagtttttagttagtattagttcagctgattagtcacttgcagttgtatatatacttggctctacgctaaagttattgaataataatcagattcattttctctccactctccaatactttacaatgttgtcattttcatattaatgctaattatttctgaaaggaaaaaaaatgttctgtttaccatttgaaaattggcagtatcaatatactaacacgacctggttcaacggtcaaccctatacttgtagaagaaaagtcatatcaaaagaagaagaaaagtaatttcttttctgctgatatattaattttttgtttaaaagaagactttagcgtgaaatgaaaataagttaaatagccataagtatactacttgtgtgatcctcaatgagactacatcactaaatcaattcatggcttctttctcaattgttttcatgctgctctctgcctcagcaatatcacttcatttgcttgcatcagcagacgataaaattatcttagagggcgcttcacttgtcccaatagctactactagccgtgaccattccttctggtcttcatcatctggttatttttcatttggattttatagttatggcaaaggctatgccattggaatctggttagtcggagctgagaagaacaccactgtttggacatcaaatcgggatagtcgaccgatactcacctccagtagcccaaaagtagtccttgacaatggcaagcttgtcttgactagagcacatgaaccagaaactcatgttgccaattccagtttccttacagtgttctctgcatccatgctcgataatgggaactttgttctgtataataaaaataacaagaccatttggcagagtttcgattacccaactgatacgatcctgcagggtcagtttttggctactggtgctagactttactcgaactcgaacaatactaatcacggaacaggaacatttcatcttgatatgcaaggagatggaaaccttgtcttgtatggaaggaaagacggggatcggcctcaagatgcatattgggccaccaatactgcccaatcaagactaccagtcatcaactatactctttatcttaacgaaactggtcttctagccgtattgaaccgtaattatgggataatttcttcattgaatgacgatggcacttcatatgaaattactgaaagaaatggtaccatattcagggcaactcttgacgcagatggtatctttcggttgtattcgcacaggcgtgaggaagagacagagaatctcaaagaatcaatggtgtggtcatcaattgacaatccttgtcaagtgcggggtacttgtggcttaaatagctattgcacaacagttgacgcagaatcaaagtctctttgtattcccggaactgattatgctgattctattaaaggcagcactccgtactgcttgagaaaatatccattgagggagtgcagagatggtgggaaagagaatactacttcttataatatcaaagagatggagaatatgtattggagtgataatccatatgccgcagttaaaatgtatccagatcaatgtagaaaatcttgtttggaagactgctactgtggcgtggcactgtattacaggagtaacggactctgtacgaagcatcagcttcccttgaaatatgtaagaagagatttttcacagtcaacaacagctttcttcaagtttggggatactattactatcgattccaacaacacattagaaaagacgccaaagtcgaggaatcaaggagtgaccaaaaacaatatggtgcaaattattgtcttagttctgggcttcactatattttctttggctgcacttgcaattttcggcatatatgcttttaaaattcgtgacctgaggtacaaaaggttaatggatattggaaatctaagcgttgttggtgatcaacttactttgagagtcttttcatacaatgatctcaaaagagcaacgaatgggttcaaagaagaattaggaaaaggatcattcggagctgtttacaaaggcgccttaaacagaggccgaaaacttgttgcagtgaaaagacttgagaagttggtagaagaaggtgaaagcgagttcctttccgagatgcgggctattggaagagctaatcacaagaacatagttcgtttgttgggatattgtgctgaaggatcgaaaaggcttcttgtttatgagtacatgagctatggttccctagcaaatcttcttttcaagaaggaatccaaacgcttggattgggaggagagggtaagaattgcgattgatgttgctagaggtattctttatcttcatgaagagtgtaagacaccaatcatccattgtgatataaagcctcaaaacattttgatggatgatttttggacggctaagatttcagatttcgggctagcaaagctgctaatgccagaccaaacaagaactatgacaagggtaaggggtacaagagggtacttggcccctgaatggcaaaagaacattccgatctctgttaaaacagatgtttatagctatgggattgttctccttgaaattatatgttgcaggaacaatttggaagttaatgtggaagaccctgatgagattgttctagccaattgggtttacaagtgctttgtgtctatggagctggataagcttgttattggtgaagaagtagataagaagacattggagaacatggtgaaagttggtttatggtgcattcaagatgatccagctcttcgtccttcaatgaaaagtgtgatgttgatgttagaaggaattactgaaatttctgttcctccatgcccaacttattccctaacttttatgtgattgtagtagtaacatatcagaaatggttgcttctgacgaagtaatttatgtgttttgcagtttggattcatctatatgttactttatgttaggctcgtctcattttatgttctgctaatgcagattaacaccagtactttgggaaaatgcttctgcatttcggatttgcctaagcttgtttgtagcgtactgtttccctccatatatatatttacaaaaacaaattattatatatttgttagaaggaagaaatatttaaaataactaatactttaagtacgaaaacaaggatgattcttcatcaccacaccccaaaatgcttcaccatgggccatgggatacttagcttcgcaatggctcaaaagcaagcttatattatatattcattaagctgatcaaatatatatgtatttttatatataaacccttaaattgattatttttgtaaatatcttatatatatgtatatatttatatatgaaaaaaatatacttgtgtatttttgaaaaatgagaattttcaaaaaataaataaattatgtttttatatgaacaaaaagtcattttcagcctatactttaatgttttgtaattaaaaggtataggctataattaggtgtacttatgcatcctttgtaagggtggcataacaggttttgacatggcacatggaacacgacacgaattttatgggttaagatcgggaaaattaaacgcgactcaaaaacgggtcgacacgacttgacacgaaata

SEQ ID NO: 294998 - DNA, 3506 bp, Cannabis indica
ttaatcacataatcttgattactttccattgtgctaacgacacaataaacaagaatatcaatgtgataaggatttggatgaatttataaatcaaataaatatataaataatcacatgaacctaataacacactaaacaagtaatgaaaataaatttgtttctttattgataattgaatagaaaagattacattgaaataaagcttaatttagggcacaaagtccaacaacaacaactaataacacttattaggctttggctgaaggtctagatgtagtgtaagcaaaaaatcatcaagtaaagcagctcgagaaggataaaactggaggaggggagcaccctctcttacaaatgagtaagattatgagttggaacgtttgagggatcaatagccaacaaagtaaattcaatcaagcaattgattgaaaatcaaaaaatagggcttattggtctcctcaagacgagagttaaggcttgaaatcttggagccttatatgtttgaatatttttggggtggtgttttacctctaatagtgtgtggcatgacagaggaaggattattgtaagttggaaccctcttagctttgctatcaatattttaaaatgcataagccaattaattcacctctttgttgaatccatagataagaaaacaagcttctttgttactttcatttattgtttcaatgatgaggatggaaggggaacattatggagagatctaaaggagcttgttgttatggaagcttgaatagtgcttggtgattttactgatattctaagaaaagatgagaggattggcaatcgtgtccgattcaagaattttatggattttaaggaatgtgtggatacttgtcaacttgaagatgtcaagtttactggtaattttttcacttggagtaataaacaaatgggtaaagaaaggatatattcaaagatagatagggtgcttgcgaatcaaaggtggtttaattcctatcctggtgcagaagttttgttctagaatgagggacttttgatcacacaccatcagttcttactgtgtatgattcaatcgcaagtagcaaaaaaccatttagatattttaggatgtggctatcccatcctaattatgttgaaatggtagcatagacttggcactagcagttttcaggtgcaaaaatgtttcaaatagtgtccaaattgaaatgccttaagttgaattttaagctcattaatcagcaaggatttgctgatatactagcaacaacaattaaagccatagaattgctagattcaagtcaaattgctctgcatcaagacccattaaacaatgtgttatagctgtaggaattggaagctagggaagcatatgctaaagtgttggaagcttatcactcttttattcaacaaaaagccaaattgaagtggataaaagatggggaattcaaccttccttcacagcaacattagagctataagagcttagaacaaaattctttctatcactaatgctaatggaacaagggttgatgatcctcaacaagttactacaactttcttggattattacaagactttgttgtgcagtaatatagagaacgggaaatcgtttttggcctcagtcatttagcagggtcctgtggtttcgaggaatcaagcggatgctctcttaaatgaattctcttttaagaaagttaagaaagttatctttgacattcctggtaacaaagcacctgggccagatggctacaatagtttattttccaagataattgggaattaataggcaatgacatttatgaagttataacctcattcttacgcacaggccaactttttaaagagatcaaatctattgcattaacacttattcctaaaattaagtgtcctaatatggtaagtgattatcggcccattgccatggcaatgttctctataaagcctctacaaagttaatttgttggaggctcaaatcaatccttcctggtttagttgctcaaaaccaaggaggatttgctcaagggagattcataggtcataacataatttgtcaagacctcattcgaaattatgggaggaaaataaccaaagaaaatagtatgttcaaactggatctacgaaaagcatacgacactattgagtgggactttataaaagaaatgctctatgcttttaagtttctagccaaattcattaagttggtgatgatttatgttcaaacaccaagattctctctttgatgttcaatggctccttacatggtttcttagctttgcggatgatgtccttctattttgcaatggggactttaaaagcatctacctcatgttacaaggccttaaattattctcccaaacatcaggtttaattcctaatcccataaaaacttctttctattgtagcaatatgagtaacactgatatttaaagagtgtagatgctttgggcttcaagaaataggagctgccctttaggtacttaggtgtaccaatctgtcccaagagaatttcaacaaaggattgtagtgtccttgttgagaaggtggtggcctagataagaacacggagttctcaaaatttgtcttttgatgggcaagttgtactcatcaactcagtgttgatggctatccactcctactagtgttaagtaatggtgctaccaaaaaaagttgagagtgaaattgaatttatatgtcgtggtttcttgtggaatggtagtcagtattttacagggacatcagctgtagcatggaacactatgccaatctaaatcttcgggaggaatgggatttagaaacatttcaattggaatgtagcagccatgtttaagtatgtttgagctattgctaaaaaggatgataacttgtgggtgaaatgggtgcataatgtgtatctgaaggaggaagaatggtggaattataaagctccagccttgcagctggttatggcccaaactggtagcaattaaagaaaaagtaaagaacttgttcgatataaatcacttcatcagatagcagattcaaaatatcacaaggttatcatctcctttacagtaaagaccgcttaattttagtatgaaaattaacagataattaaagtttaattcaaaaattagacttttaattacgatttataaatttatggagatataatatttgaattctaggtgtattatttatgttataaatacaattttatgttgttcatattttatgcccgacaacattggaacgcgacgtttggccgatagaatcacattttcttttgagttagtattttaataatagtggggcaacttagatagatattaagaatgtcaggagtatttgaagtttcagtttgaccaaagtacccctaggtggtaaggatgccttttggcttaggcaaggacaaaatggtctttttaccatttaattcttttgtcctttagtggtattatattatattttataatctaaattaagttatgaatattagataaacactaagttttatccttataataaaaaattagaaaaaaattaaa

SEQ ID NO: 294999 - DNA, 2004 bp, Cannabis indica
aaatgtctaacatgagctttatgctgctctcctcatgcctcaatatccacgtggggctgctggattggccgatacagtctttgtcaagctaccaaagtgtaacatttgttgggcaaggaaaggaaaggaatgagcattgttatagtgcctattttttactttttacaacaccttctatatatagacagcattagttagtgatattacttaaaaaattatatacaatttaatattcaattataacaacaagtggtatgacaacaaaaaatatattaaacattaatgggtgtgccttttagcatttcttggtagcaaataccaacatatatatagaacttccaataattttaatataatgcaactcaaatgatcaaaataatcatagaaatttgaggtgacaataaaaaatatgatccattttgaatcaaattgctagggtgacatccgtcgatcgatttccctttctttacttcaaacttcaaagggaaaaaaaaagttcttgttgaaaaagttttttgggtctatttggtcagaaaagatgaggatggggatacattatatatcttggattcttggttttgaccagtagctatagatttaatttcacggagctattgggcctagctttgcaagacttttacaatcacttctaagacctttaatttaactttttctcttttatcatgtcatctatatatgtaggccaatgagctttcctttctgtcgattgaaattcaaaggctgctgggaaatagacttgatgaaagctccatctcttttcggaaacttttctctcgatcatcaataacgaggatccatatatatatgcatgcacacaacacatgcacgtactactactacgtataccactttttccttttttcttcttttttactgacaaaattttcataatataacgctcctattatttcaaccaaataaattttgtgcaatcgatgatgtacatatatcttatttggtaacgttaggtctatgtacatgttaacaagtaataaaatacatataatttaaccacttctcatcatttacgcactgcctatgtatatacacacataataattacgtaatatatataaatttactgacctcagtaaatcttaactgcctggataaagaaaagagtactaatattaattaatccatacgtacacaagtatgaacgcagctttgaattaacattactatatattctgatattaaagagagctaactaataatttaccgtataaaaagagaacagggcgataaaccttattagtagtcagtatagaaggtggtactggagggccatagtcaactatttcaaggggttttaaagaatcgaaaattattggatagtaaagagactaaaatatgtgacatttgggacattatatatatatatatacataaaatgcatgatgttgaaagttgatttgttttgcacgcttggaaaaagcatcttattctatagcttgctatatagtcaaatcttcttcaccctctcctttagtactatatatacgtacagccatgtatgtcagactcatcaagattagtattacatttactgcttctgcttcctttcccaatgctacacaggtccgattctttacgtacaaattttacaataatatcgccaacttagggagaagatgccaccaacaacagccaaattacttttttccttacatatcaatctcaattaataattacattttttatatatatatacaatgaataattgatctccttaatgcaccaccacatatataaatgcaccaccacatatatatcatatagaattttaattaaagtttggggtagagccaataaatatattacgaaaaactcattatttttatttttatcttgtgatcagtcattgtggtagcggatttatgatttgtaaaattcatacaaactactatgtttagaaaaattttaatatttatatggtcaaataaattttttttgaatatttttacaatttttttttcaatt

SEQ ID NO: 295000 - DNA, 2754 bp, Cannabis indica
ttatttttatatttttaaaatatacctacttttatagatgatgtccccattacacccttaaattaattcaaattatgtattagacttaagtagagagtgagggtgtattgggcaacccactcataaaaataggtatattttaatgaaatatattttaaggatatttttaattaatgaatacaaaaaaaatatttctcaacttataccatatttaacattatctaaatcgatctaaaataaaaattagcaaaaagacaaacgacactttaagtttccaagaaatagtagcaaattgaaaaacatccacttataattatgagaattgttaatgaggactattgtttttcagtattttttataggtggcgcattataatttgttagcgatatttacagttattttcataagttatataaaattcgatacttaattacaccaataacgatataacactgaagaaaatactaaaaaccaacaataccatttaacaaatctcataaattattatatagtgattcatcaaaattagtaagcaaaaatcacataccatcaatatcattatcacattaaatgtgatttttttttcttgaaacaaattaattgtgcaattaaaaataagagttgtactattaaaatctctcacatcacatgcatttatgatatgtatatatatatttatatattactttaaatatacgtttgttatgacaaaaacattaaactccactccactagtgttacacgaaaccaaatctttgtatatctacattaccataactctaagaaaagaataatatttctaaccattattattaattaattaattagtaaaattagtattatatatctaataattaactaaatatatacatatataaccctttaactaataaatgcctctataacacaatatatataggatatgaatgaatagtgtaaaacaaacaatgatgagtatgaatttcaaagcaacaataataatattcatatatggatgaatattggcaatccaaatagagaatagtttgagaaattataaatttttacttagattctttcttgtatatatagttgtggttaggttttgttttacaaatgtgttgttagaataatgtatttatttgatttgttggaatataattctttgattttttttttaaaaagagtaatttacggtaaaacctcctcaattatcaatttacttgcaaaaaatcatccaatctcatattttggtgggaaaaccctacaaagtactgttctgtttacatttttaaggtgttgtctgtccagcctagttaagtcctaattttgcccacgtggcaatgacagttcactaaaaaattatcctacgtggtcatattttacaaaataaaaatacaaaatttaagagtaatttgcggcaaaactcccccaactatcaatttacttacaaaaaaaccatacaaccttaaaaagttttttggatggttatgtataactgtgtattgtgtttgtgtatatgtgataataatatattatataattgtattattttgtagttttttgtgaaaaaaattgatattttttttttaaaaaaaaacttagcccaacctgaaacgtgacccaacccacctgaacctattccaacctgaacccgacccacgcggtctcgaaaccctaaaaacttgatctccataatggcaggttcggtcccaagatttcaaaatccaaacccaaaaactcactcgatgggaaactttgtcccgtaaccctccaagaaggtatttgatctcgcgggtcaaatttcaatctctatatcaaaatttaatgaagatatttaagactaaaaaagaatatgctatggagattttttttcctctatttttttaaatgatatagattaatttattttacattatatatttaatagaattagtgattaatattgttagtcattttcataaaaaagagtagtacaactacttaataagtacatccaaatttcaaagtcaatatcaagctagccacaatgttgattttcaaatagttatctaaccattaatatgttcttccctattgtgaatttggatatttttcatttaatttatttttattttttcattaatttctttccattatctctaaggttatcttcaatagtttgaatgaatatttattaaaaactacaatatatttttgttctcaattattatgaaatataacaagctaatcttaagtttagtaaattttttattattaaaaatgatcataattggataatattaagttcaaactatatttatatataagacaactttagtagatacgtaaacaattttacttaatcaaatcaaaatcacaaaatattacaaaaagtgtcatagaaaagttttactaatcattattatcagttatcattataacgaaaatgatagggtttctcttttgactaattaaaaaattgaatctttaaaataatattaagagacaaatagcacttaattactatttcatacattttcatatgtaaatatttaattaatgtgtatgatttttatatattttttaacaatttaaataacggatcttaaccttgaaaacaaaaaatactcatcttccaactaatttgttagaaattagaaagaacaaaacgagacgaaaaaggcacgagaagtttttatttgcaccttcaaaatttataaaaatattctattttacaattttttattttatataaaatatagggtgattctacaatgcaccccttaaaaagga

SEQ ID NO: 295001 - DNA, 4856 bp, Cannabis indica
ggcgctggcagcaactccgatgacttttccggcaccgaccgctactccgacaacttttctggtactggcagcaaactccggtgacttttccggcatcaatgacaaataaaacttcctaaacaaataaaaacattaaatatgggattttaaaaacctaattacatttatatggcatatcaaataccataaaaagacccaaaaacaaaaaaatatcatataaattggtgaaacttaaatgtgccatatttatcataagaacttttaaaattccatagtaagtgtaatttcttctttgttttttccaaatgaatccatactaacatggataaggcccagtactcatcttcacgatgcctctccaactattccctttggaggccccacaacaatatcattccaagaccctctgctatcttggcctaacgtgatactatgtggcccattatgcacatacatcatttggcccaataatgactttccagggcccatatccacctgattcctagggcaattgttcccatcccctcgttccttctgtaggcccattgggctcaaagcaaacgacttccccttgccaactacttcgaaattatccattgggtttaagtaaaacctagaattaggatttttgtaaataaaaaatcctctgcccaagaaagctttaccaaaaccttttgaaaatttgttgaatacatgagtatccgatttaatccaacttttttttcttcatacgatctaatctaatcattaattggatttggaaaatcatcatccgatcaaatccaattagacctcaaaatctaatccaatccaattactaattggattggatctgttttttaattggatatccaattacacacctaaatttcaatattaacttaaaaatatgaagaaaaatacaaaaaactaagtatcactttttatttaaggtgaaaatattaagtgggagataatttagacaaatgagtatcgaagctgatgttgatgagtctcaacatcctaggtctcgtatgtcgaatcctcctctggtggctttttcatctcacttgtcaagtaccccatttttccccgaccacacttgcacatctgtactaattgtgaccatctgaggaagttatcaccattcaaccgaatcgttgtgatttggacagtgtgagaatcagaaggattagttttggctggaacagtggctggaaagtggtagatgtgactggaacagtggtggatttggctggaaggtttgttgattcatttgaggcgtcacacatggtgaagaaggagaagaaaacttagggttagggttaggaggtggctggctttgataccaagtagattagggtaaaagtattttctttgatattttaatctatacacaaaacagtgtatatagcttacatgagtccctatataagggaacaaaataaatatacaatgagattatgcctataacttctttcctagaatagtgatgtggcagctatacaataatatttccctagtaaatataaaattttcctacattatagtttcccacacctcttgcatcccactgaatctaatcttgctgctacagagacctggctcttgatacagagtagttagaggatttctgaatgagttcttgaaaccttttactgaatttacaaacttcaaagaattcaataggctttggttctctccaagaatgacctagacaatataatttgctagacaacctttcccctactaagtctttctatttatacaattccctccccaaccgctagccgcactagtcacaataagtaacttcaatttaatttcttttatttcttctgaataagtaatgtgtaacaccatactgtatttttttttctaaaatgtcaaatgcaaagggcccgttccataaaaaaaaataccaaagggccctggatcgtagacgattatgaaatgttctgctttaagcatgcgtttttgcttattttgacatctttctgccataataagttgtgaaacaggacatgggttttttctcttatgtagtttctttcatggctttttagtttaaggacgacagtaacacagagaaaaagattgcctccaagctgaggtcactttctgataagtctctattagagaatgagaataagacacggattgatctctttgatcttctacgggtacagtaaatttttttatgcatttgtcatattttccactaccatccttgttcttaagactcgtatgtattaagtttgtttttcggtgttgctgtttttttcagaatgttgttcttattagagatccagaggatccagggaaattttatcctcgcttcaatctggaagatacttcaagttttcaggatttggatgagcacaggtgttttaatagtttttcgatctgaatgaattactctttatagttattaagactttatttttaaatttcttgaatgcatgtgaaaataatctgttgttttacagtatataaatgattcttttttcttgagaccgtaatttagtatcaacatggaaacccttttttgtcgtgaacagcaaaaatgttctgaaaaaattgtactatgactactatttccatcgacaagaaaatctttggcgccagaatgctctgaagactttgccagctctcctgaactcatcagatatgcttgcctgcggggaagatctgggtctaattccttcttgtgttcatcctgtacgctcattcaacctctcatttcaaatgaaagtttcaagtctccatgccttattatttaatctccctcccttttcacttctgagttttagacctatgtcaatgttaggctttaattgatcaatcatgattcaggttatgcaagaactagggttaataggtttacgcatccaacgcatgcccaatgaacctgatttggagtttggtattccttctcaatacgactacatgacagtaaataccttttttcttcctctgtttattttttcagcatatggcagagatgcttctccatcttactttcttgagtgtcaacattgcaggtgtgtgctccatcttgccatgactgctcgaccatgcgggcttggtgggaggaagatgaagaaagacgacgaagatattttaaaactgttgttagctctgacatgttgccaccagatcgatgcgttccagaaattgcacatttcatcataaagcaacatgttgatgctccatcaatgtgggccattttcccgcttcaggtatttggattttggttgattgaacacattgatcttctttcgtcatatattgtttaacattttgacatgttaactttgcgcctctgtacattcaggatttgttggccttgaaggagaaatacacaacacgtcctgcagcagaggaaactatcaatgaccctacaaatcctaagcattattggagattccgtatgtatagtctttggttcaattaaaaaaaatttgtagacaattttggttttaaccaacatactgatttcaacgacactttttctaaactcaggcgttcatgtgaccttggaatctttgatcaaggatgatgaactgataacaaccattaaagatcttgtacgtggaagtggcaggtcatatccagggggacataccgaaattcaagcaaagcaggaattatcattttcgtccacacagaagcagcctgttgccaatgagaaggaaaagatctctgtaatatcacaaggaactccacagaaagatctcctggctgtccgctgatgataacttggtgaattctatttccttcctgcattggtaaacccccataaatacgctctggttgaacaacaatagttcataggaataattgttcagcctagatggtgtcttagattgatttgttttcgaccagcaggtgaaaaaatataaaataaaaagccagagagagggactacaaatactgcaaaattaataagtgatctatctgtaatgccattcattttacatgaaattgcctgtatgtatctgcatgcttatggtttagtttcatattttcatttttgttgaactttagctttatggatgtaaagtgcaagtgttttcagtagcatatatcatctttgatgttgggcaatgtttctcaccttaggaaaaagagccagtagaattattgtactgttgattaataaaaattattacattttgtgaaataggaaccaatatactctaatactatgcttcaattattaacttaagctcttttattacacaataggagtgtatacatagttcagtttttgtaggaaaattagtatatatatattatgaataaattttttctatttgtaaagttgtcacactattttttaggaaaataataataaaattcaattcgctatctttgttttctcattttttcattaataggaatttttgcaaagcttgtatgtacatggtttgtgtattgtaaatatatcaaaaaatatactttttttatttttaacttggtatcaaagccaaccgtttcgtaaccataactttaattgttttattttccttcatcatgtttaatgcctcaaaaggcttaaaaaaaatattccaatcaaatctaccactgttccagtcaaaattattcatctgaactctcatttcgtccaagtcacctgttgctataatttataaacactacgcaagtatacgcaatcaagtagtaaaactcacacaggtgaggtcgatcccacagggaattggattaaataccactaaactatacttataattctatttggcaaatcgaaaacaattatgatttaagaaaagtaaagtgattcagaaaacgtaaaacacagttaaagtttaagcaagatgagatgatagggaggagaatcctgttgttgttta

SEQ ID NO: 295002 - DNA, 2629 bp, Cannabis indica
aaccgtaaaaatataaaaaaaaacattactttgaacgtaaaaatgtaaatattttacaagaaatagtgccttatgtaattattctttaattgaaacatataaaaactcaaatttccatacatatatataaatctctcgatctagtttattttttttttttgaattattacatcaaaaaaatatataaattgatattttatttataaaaatacatttataaggtgttgataacatttatactttttatgtttaattaccaaatacctcttacactattacttacacaatcaaacgatgattgtaggatggttgttgcgtggttgcgcagtgattacatcagacgaaggtttcaatcagacgatggttgcagggctagggtggttgttgggtggttggtagttggcagaaggttgcatcagataaaataactattagcaaaatatttatgcaactattaacaaaatgtttatgcaactgttatgaaacattaaaaatcagaacagtgtttccacgtacgtaactcaatctacatgtctctttatgatttaatataaacaaattcaccattaaaaatttggaaaacaactaaaatataccaggataaatattttactatagtattgatgtaattttttttggactatacttgagttggattgtttgggaattctagttcaacttttttaaatctgccttccatggatctgaaaattgaagtcatgatattagttttatgcaaattaaactagagttctggttgaattttaatttcgtagtagtttttctacattttttttcataaattcgaaacaccccatgttttgattgattttggtcatcttctcaggtgaagtcgatagaattaatggtggttctctttctagttaaattttcgtttaggttgcgttgggttgctgcgtggttgcgcgatagttgcccaggttgcatggaccctgggttgaaggtgtctgtaagtggtatttgtgtaattattttatttggattgtattgtttatttggccagctggaagtatttttgtaatattattacttatttggttaaaactgaaaaaagctattttttctaaacaaatctctctagttagctctagtaatcataaccattaatttacttggcttatataatttggtttttgttctacttagaggaatgttaatttaaacatgatcacgtacatataacaacttacattatatagcaaaaccccaaaaagtatcattcactagtaattaactctaagaactcatattttgatggtaaaactcctaaaacttagattgaattagcagttagtcatttctatctaattttagctattaaatgtcatgccggattgatcacttggatacaatgtacacgtgacacaattttaatactccacctaattacattatttaaaaaaaaataaaaaagataaagataaatcatatcaaaataaaaaataaaaaaaatacttaataaaattttacataattattgaaaaaattaatgttttcttcttcttcttctctctccactaccgccataaccctaaaaaccccaatcaaatttggaaagaaaatcagatggcagaccaccacctgccgttgatggaacacataaccccttctactcccccatcactctcttctctccctcatgtttaccccaaaacccttacgagggactaccaacgcctcctctactatctaagatgtgaaacaacaaacccatatctaaaataaaaaaattatatttgaaatcttctcgtggccatatttatgaagacccttgaaacttttctttttactttttgtttcatattttgggatgactgtagaactctatttttattttatgtacttttaacatttagaatcattcttggccgagtactctttgggttgctctttgaccgagtggttctccttactttggtaagtggaccatctgctttgcttttttttttttcaatctttgagttttgaagatgatgttggccgagtgtctcttggggccactctttgaccaaaacaacttttcccgctgtggcaagtgggtttattttgagggatatgtcactttgagcagtcttgtcctcttatcatttattcatcctttcatttggatgtgaggggacttattgtacttaactacataccctcttaatttttgagtgtttgcttacacttgagaggcgtccctctcatctcagcaataggacacaagtgtctatcaagacctcttttgacttagcgatttttgcgtggaggagcgtatttcttattgtcaattaagggtagctaatccttgatgactgttacgaatttttatgtttattacgcaagtatacgcaatcaagtagtatctcacgcaagtgaggtcgaaccacaaggaattggattaagtactactaaactatacttatgattctatctggtaaaaataatatttttgcaacttaaagaaaataactcagaaaattaaaaagaatatacgacgattaatcaagatgagagattagggaggtgaatcatgttgataagttaccaatgttaatacccaattgctatccttatcttaatgtgaatgacagattatgaattaacctaactcttttcagatctt

SEQ ID NO: 295003 - DNA, 6470 bp, Cannabis indica
tattgtattaaataatactaatgcaatacaatacaatacgatacaacacaatacaatacgatacaatatggcgtactaaatgagctctttaaggttctattaaaagagaagtgggattttccagcaataaaactagaccttgaaattttaaaaagaaaaaaaaatgattagtggaattttgcttgctcatgaaggtgccaccaaaaatataggatattcttaaacacattatcatacagtcgttcatttgtcaaaaagtaccattttcttagatgctattctgataaactggctcagcttgttatttccttttctgcctaagtgaaattttccctgttaaatcactcatgtaaccaattttaaaatccttgttggattatgcttaggttaggtatacatgtaatattctattttctcagaaaatagaggcaagaaaagtataagaataggcaaagggaatatgatacttattacagctcaggtaagcatcttagccaaactcttttatatatttatcactagctgatatttccttcctcccatttacagcaaacagataaacatcaactccttatctttgtttcattttgagacagaaagagaaaatttttgttaagtttctcacattttcttttcctttcagtgtgtcaatggaaaaaggtcataatctctcaaactccccaagttcttgtgaaaaagtctttagctgtatcgtttgttgtaagtgtcaaacaaataatgatacagaccacatgccaactcatcataatcatgctgggaatgctagtgatatgggccatgaaagccaaaaagctgaagctgcaaagaacaggtctgagaaaccatcaaaaactgctcattttgctgtgaacagaactgagccagatgttaaacatgaagggaagagatcttctggtctgagaaagaatgataccttttcgaactatattcatcgcgcaaagatgaagttcagagcagggtcgaaccttgggaatgaaaagaaagcctctgaagcctccggtgaatatcatattcatggcgatcatgctaagaaagacaacagtgctaaagatggattttctgagtatattaatcgtgtcaaattaaagatcaggaagaccacaacaagtgttcgaagcaggaagagttaaactgcctcaaatataaaattgctgtgaaaaaagtctctactattatgaaagaggtactattgaggaataacaaaggtggtggttctcatactggatgcataagctattaacttatgctatatatatatatatatatacatagactattaaatgttcatttgtgttttgtgtgtattctattctatatggtattttagtatatgatctcacatgcaaagtagtcaaaacaagagcttatggaaaaacaatttgattcaagttgtgtttgtattgtactaaactatctttttatgtatggactttagtgcccataggtgatcacacctgagcttgaatagaaataataacaaactagcaaatttttgaataatataaaaatatattggtcttgttgcgaaatagactcgtccacttggttaaaaccaccaagtattatgagtgaactatgttcaattgcaaattctcaagctaaaaaagggacaaggaaaaaagaccataagtagctgtactatgtataagttaataaacagaaacatgggaaggcacttcctagaagttggatactaaaatcttgttttccttcttaagattgacttattggcatgaacattcacatatgatagcatataatgatcacacttgacataattgtctaacaaatataatattaacttaacattctgactaagaaaaagtaaataaataatcacaaagcaagattcttcacagaagagatttagactaatcaaaagcagaaacctaattgtggcaagagtcaatttatatgggagccgcacatgttgttctgaagtgtcctgtctgattgcagcgactgcaatgcactactcgcttcacgcggccacggtcttctgctcgtactcgtttctttcttggccgtccaggcggcctaagtgacttgggtgggttaatcaaaacctcaatagctttgttagaattggggtctccatcagtcaactccttccagagggatttatctggaatgggatgtattgtctgtgaatacgtctttcgataagttgccactgtaaaacagctctctgtgaatcggtgaacattttgcctacaggacagaagtgctgccactgcatgtgcacaaggcaaaccatacagctgccagccccggcaaagacagcatcgattcctaatgtcaacaatatttgttccttcatgagatatgacttcaaattcagcttcattagcacgaagcacctgatatgtacgtgcacgctcaagtgcctctgcaacacgcctctctgcagatggtacaagtattgatgtccactgcatactagtctctcgccgttcattaaaccaagtcattagttgtcttctaatgcattccatcatctggattataggaagcccagatgcctccaaaatccaggtattcaaagactcgactatattagctgtcaaatgcccgaatcgagtcccctcaaaataagctgtagcccataagcgaggtggaattcgtctaatccaatatgcagcatcttgtgatatttcttcaatctctaaaatttttgcttcaaattcaatgactgtgagggcgtgagcagcttcccataaaaggttaacaagaattgtattgttaaactccttgcgaaagctgtcactcaagtggcgcatgcaaaatccatggaatgcagtaggaaaatttgcttccacaccatctacaatgcacttcatcctgtctgacaggattgtaagcctaggcatgttttccgtattgatctcaagcaaattccgaagttcagacagaaaccacatccaattttcatcattttcctcatcaacaacaccgaatgctagagggaacagcgagccatcaccatcaaaaccagtagcaagaagcaacgtacccagatatttacttttcaaatatgtcctatcaagccctaggagtggtcggcaagcatttagaaaaccataaattgatgcctgaaatgatatgaatagacgctggaagcagctatcaactggattcccgtaaacagatgcaatactccctgggtttgtccttttgacctgttcacaatattgaggaagcaaccggtacccttcttcgaaagatccacgcatagctgccattattcgttccttgcctcgccaggcttgcttataggacaaggtaataccatggacccgatgaatctcctctagtatctcctttggcttgtaattaggattctccttgagtcgttgctccacagagtttgcaacccactgaacagaggcttgctgatgcccaagatgagcaatgccaccacatgaatgagactcatggatggttctgatagtgaatgttggaactcctgggagctttgcagcgtgaatgcgccagggacacccctcactggcacacttggcagtaaatcgtgtcttgtcagattttattgtctgcatctcaaagtgcaaagcaattgctgtgtctctcaaagccctgcgacagctcttgacatctgggaattcttgtccaactgatagctcataagtaggatttgcaacaatcatacgggcctgaatcacaggagttgtaggaactagctgggagtcctccattgacatatcatgaggctcaatagccatttcttgactctgatccacagctaattctaggttgtcattaagttcttggttttctgacacagccaactcattgttatctgataaagacaattcatgattctgagcagaaagggccaactcatgattctgagcagaaagggctagctcatgattctgagcagaaagggccaactcgtgattctgggcggtaagagctaaatcatggtcttcatgttcaggttttcgatccatacctaactcgttttcatgcccatagttgtgaccatcattctcatcttggtcatgattctgtactatgtcttccaactcatggtcatggtcatgggcatgccctaaacccagctcgtgatcatgaggctgatttaaacccaaatgatgatcatgtgcttgtccaacttccaaaccatgattctggccaagatcaaggttgtgattatggcccaacaccatctgctgattctgcccaagggctaaattatgattttgaccaagtatcaactcatggttagccattcccaaaatccagtgtcaatataccaaagtgatacaaattgaaaacagcaccacagtcttccgagaagtccactggtataaaattaggctttgccggcaatattacagcatgcctgccaaccaaaagtaacactattcaaaatttcaattatgcaacataaagagaaacatgcacgtacctagcaataacataataagattcggctgaccacattatcaaaaaggaaacaaaaaaaggacacatgcagctaagaagaccatgtaaaaatcattttctcaatgtaccccatagcaaaaaaagcataaacgggaggacctaaatcatcaaaatggaaataaatcatgaatagaactcttctccttttgcggaaggaaacttgtcagactaaaaacaccacctcttggcaacaggctccaacaacacagcaaaggtaaaagatcgaatgcaacaacacagcaagaaataagagaatatatccctgtccgcacattgagaagcacatgtatacgcatatttatagatatatgcatagttaaataatccgaaaacacttcttccacgatagttaaattaagcaaccaaacagagatttcaataaaaacaaaccaaacccacttaccgactacaggtaattctcaatcgagtttataaagtatatacattcaaggggtatataaagaaaaaaactttgggaagtggaaacatctcaaaaccaaattccaagaaaatacgtttcacagaaaattcaagcatgcccacaaaataaaacaacaatcaacaaccagtaatcaaaatatagcagaaataacataaccccatctcagaacaagcgcagaaaaatataaatcaacagtaaagtagatgaatgacaagaaaacctaccttgtgagaacacgagtgagccacagagaaccacgctaaaagggatcaaaaaacatatggagagagagagtagtgtggggcagtggctgaaggtggaaaatataaggctgggtcggaaagaaagaggaggaggagaaggatcaagggcattaggtaggtggtggaagggaattgaggttaaggagatgaaacgaaagagaaggaaggaccaactataatttgaaatagaaaagaatggcgggtaagtttgagagtggagaaaatcggaaaaagaaagggaagggtatggatgagaagagaagagagtggtggaagattgggaatttcaggggcagaagaggcagagttgtgagggttgagaaaggaaatacaggttttggggctttcacaggaaaaagggtatttaggtcaaacaaatcccgattctcttcctacaattactgttttgcccaaatcctattctttcctccttttctttttattatttaaataattcttttgttttttttaatataaaatgtgaaaatatcttcaaaattatgttcactaaaactataattatttgtaatttttttgaagtaacccgtttcataaatataaaaaataaaaatttaaaaaaaaaaaaggtaactttaaaatttatttaaactttttacattaatattaatattaagtagatacacactcgcactacatatattaaaatttttaaaaaaaaaataaaaaaatttattaaataataaataataactcaaaaaatattttctaaatataaaaaaaaaaaatcataatgattaggggaattacccatatactatttttttttaacttttttttaaatttataatttgggtttctaaagtagttgcaagcgttagttgcaataggaatttttatacgattttttattgcaatttaggttgcagcgctagttgcaataggagtagaattctgtaaaaatgcaaataaaaaactattttgacgtgtaaaaatgaaaaaatccttaatattatttaattgcatattattattaattttatttattaaaaaataaaataaaatcaattaatcttttttaagtctattcatcataatattaattttaatgttcttcattatattttctttattatttttttttattatataaaagtgtactataaattaagtaaagtaaataggtaataaaaagaaatttttacatgaaaaatctattttgcacaatttattacctaaatacctctacacgcttatgtctacatttttacttacaaagttggttttattacacaaataccacttagtcatcattc

SEQ ID NO: 295004 - DNA, 2470 bp, Cannabis indica
actttttgttgattctaaggtactttttattacaaattttgaaaaagttcaatcattttttgtttccataaacaagtattgttggaccgatctcgactaccaattacatcatcagtgaaggatctcatgctaaatatttaaacatcgttttagatttgtagaatattatttgaatactaaactgttccacttagatcattctatttttttgtttaaatttgaatttgaattaggatttatttcatattaaataaatatacatttagtatatttattaaaacatcgttttagatttgtagaataatatttgaatactgaactgttccacttagcaatatctggtgttccctcttgcactctctgtttcaagttaaagtactgcttagttgttggtagagcttatgtacagtacatgtcatcctagctattgttaagactcaatacaacgtgccaagctattcattcaatatatttaaacggattgttagccttttgtttttgaaatcatttattgagtgttgctaatgtagctttcgcggttgaataaggaaatttatataatataggattactatgtttacttgtgagtgataacctaagggagcaattatagagttcattttattaatttacacattcccactagatggtaatatttttacacgtagttttgttcttttggatgaagtattaaactctatatttcatcaaagagtaaaaatacttttagcatccattgttgtcgttttagttcatttctcaaatatttcatccgttgttgtttttagatctattgtctttcagaatttattgtattgtactttttatgatgtctctgctttctttgtggactcttgaaaaatacttagacactcttagtagaagaaaagaaagcaaaatatacttggggttgtgattacttatgcataaagagtcaagataatataagtatttatctttttagtacacctaaaaattttaaattcttatctcaacttgtcatctacaacttcataagttatatttataattcaatttgaatagttcatatatatccactagatcattactattgggcacaagcacggactcaggattctctgtctttttccatgctttaataaaattgttgaacaatgtttttttaataaattgtattattattattattattattattattattattattattattattagagcagttatatgtttgattaggtgaacaagagacaaacataatttattgcatctacatgagtcctatcaatttaggataaaatcaatacccaaactactcataattctctctaacaattcttattatatcacaatcttgttgattgcagaatgatttgaagtctacagaacatggtattgggtacttttattgttacattataggtaacaaccatacacacagagatgataactatcactgtttggatatgaagcactgaaattatacaaagaatacaggaagagaatctgtgaggcttccatgaatgaagtgcacctcatcttgcattttatgctctttgttgcctcttactaggtactattggtggacttcgagtcgggctcatttcataatccagttcttctcgagattgacatcatttcacatgtactaccttgtcactaaactaatctattacacaactctcattttagtacataaactttatattacatgtgttaaatcattttggcctgtaattttaactacttaggcggcctacctagcccctaagaataaagaccactacttttgattctaagttaaccaagtcctaatttctataggtagcaagttcaacaacatttgacatttgttatggcattttcattattcttgtgaagtttttttctcctcaagaggttccctatttcttattgtggtgtttctttctctaattcgatatgtatttatatatataattatatccacacatttgattcatcttatttttttgtactataaattctctatgtagctatagacctctcaggagtgtggctgatttttgtagtttggaagaacatcaattattgtgttcattctctatagtgtgatctttttctcagagtaattctcctatagcctatatatatggacaattacaagcattgattctggacaacaatcaagcttaaattggtgttagaatgagttagaggttgtgtatattaggagtatgcatattgagattaatgtcctgtttatttattaataaatatatacttaacatttcttttataaaacattatgttttatttattaaatactcggtttgtctttacaagtacaatcgttcatatgataatatcattttacacagtttttataaatttaaatttacattacaatactatgcttaaaaaaaactaaataaaacaagaccaaaaccccaaataaaactaacaatacgtgcctcggcacgtaacattcaactagtatatatat

SEQ ID NO: 295005 - DNA, 3685 bp, Cannabis indica
ttaaattattggtttagaaatcaaattttttgattttctaagtatagaaaatcaaatttccctataaattttgtaaatatcttgattctgtgtattgtaatcaattgttgagttgtactttttacgtgtactatttctagaatattctttgcgtattctagcactatttatacattgtatttgattcatcacaattatttgagctaaaagcatttatttcacttttttttttctctttatttttgtatatttctaacttggtatcagagcttgttttgacgtgtgtcaagaacaatggaaggtgatggcaggccagctacactagcagaagcaaactcaacagccaatcaacactcatcggctccaaatgtgacgaatgtcacatgacaactttcagctctgaatgtgctggtgcctcagtttagaagcacgtaaccctttgtcttaaaattggatcacaataatttctctctatggagaactatggtgatagctattgttcaaggccatcgtttagatggatatctcaaatgtacgtgacccagaccacaagagtttttttcccttttctacttatcagatggtgttgcaagctctgtaggtcaagtgaacccttcgtttgagcagtggattgtaaacggccaactgctacttgggtggctatatggttcgatgtttgaaagaatagcttcagaagtgatgggatgcaaatcttcaacagtgttgtggaatgcattggaagccctctaaggtgcacatttaaaagccaaaatggatgactattgcacaaaaattgaaacaacaagaaagggagcactaacaatgccagagtatcttcgacagaaaagacaatgggtcgattttcttgctctcgcaggagagccatatccagaaaaccaactcgtttcgaatgtcctctctagcttagacatcaaaaatctaccagctgttttgattattgaagctatagaattagtctcttggcatcaacttcaagatatgttgcttagctttgatagtaaaatggagagacttcactccctctctggatctggtaaacttgtttttgttgcaagtacttccattgctccattagcaaacacaactaataagagtcttttctctaaaaatggaagaggagttagtaacaacaacaacaacaacaacaacaataggggatcaaacaaaagatctcgtggaagaggaagaagagaaaatggctctcgaccaacttgccaagtctatggcaagtatggtcattcagatgcttattgctataatagatacgatgagagttgtataggtcaacaaatagtaaccataccgaaaacccaaataatgtagttgcttacacagcctctcctgacactcttgaccatgacgcttggtttgctgatagtggtgctagtaaccatatcacaactgaacttaacaagatgaatctgaaaaaaaaaagactacaatggtaatgagagtactcatagtaggtaacgataataagctttctattcatcatattggacttggttttctacaaactttgtctgtatctcattagttttgaaggaaattttacatgttctacaaattaccaaaaacctacttagtatttccaaacttacctctgataataatgtttatgttgaattctttttttatgtgtgtcttgtgaagaacaaggtaacaaaacaagtggcacacaagggtcggcttaaaaatgaactctaccagtttaacatcccgcattccacacacctcagctcaaaataggcgagctgaacgtaagcatagacacattatcgagatgggtcttactttgcttgtttaatcaaatgttcccctaaaatattggtgggatgccttccaaacatctacctatttagttagtcagttgccaactcccattttaaacaaaaaatcaccctttgaaatattgcattctaaacaacctaattacaaatttctcaaagtgtttggggctacctgtttcccgtgttttagagcgtatcaaaatcacaagttttagtttcatttttattccaccaagtgtgtgaacctgggctataatgacaattacaggggatacaaatgcttgtcaagcacaggtagattatacatttccagggacatggtcttcaatgaagatgaattcctatttcaaaatggttttctaaacacacataagcccgagtcacatgtgtcaattcttgtgcctttttggatgctacagcaaattcagatagtcaaggcactcaacaagtcttggctcaaaactctgcaggtcaaactgatagtgtgcatacaagtttaccttcaataccacctgctacgctatcttcaccatgttcttcatcaaatcaggtagatgaaactgaccatattatatcaacttttgaaaataatagacaagtacaatgctgcttcagtcaaagataatgatccaaacttaggtcatgagcaacatacaaataaaacataatcagatgaagttgtcactagtgctgaagttaaaccaactcatccaatgatcacaagggctaaggttgggatttttaagcctaaaacttacattggatagtcaaaatggacatgtatcactaaagaaccaaattcagtggaggaggcatttgctattcgtgaatggagagatgccatggacacagaaaataaggccttaatcagaacaaaacaaggatactggcgcgaagaacacctggtatgtacattcttggggaacaaatgggtctacaaaattaaaaggaatggagatgggagtttccaacgatgcaaaacatggctagtagctaaagggtttaaacaaagggctagactcaattttgggtagactttcagtgcgattatcaaaccctcaacagtcagaatagtgcttacaatcgttgtttcacaatcatgggatgtacgacaacttgacataaacattgccttccttaatggtcactaatttaggatatatatatatatatatatatggagcagccacaaggatttgaagacaaaaataaacctaattatgtgtgaaaattgatcaagtcaacttatggtctaagacaagcgccaagggtatggtttgataagcttagagtaacattactcggttggaacttcaaaaactccagagctgactcctctttgtttgattataagtcagaccatcatgctatgcttgtgctaatttatgtggatgacattataataacagggaatgatttcaagatgatgcagcagttcattctgaaactaaatcaactatttgccttaaaagatctcagtcccttcattattttctcaggatagaagttcatcgggatgaaataagaatgtacctaaactagccaaagtacattgaggatctctttaagaaaatgaatatgcttcacctaaagccttgtcctacaccgatggccactggaaaaaccttatccatcttggacggtgaacctttaaagtttccaattaaggatagaagtatcattgaaggactataatatctaactcatactcaacttgacataagctttgctgtaaacaaacttagtcagtttcttaaagccctaaccggtgtacattggagtgttgtagaaagaatcttaaggtatttaaagggtagaccacaccatggacttgttgggttttgtgccctaaataaaacccattacaatctgat

SEQ ID NO: 295006 - DNA, 2859 bp, Cannabis indica
acttttaattctactgatctcccttcccacttttgactaacataactgaaataaattctgcccataatgtgtaaggaaaagcaactttaaacccccaacaaacacggttcttattactttattttatagctacaaatgtgaaagagtttcaacatagagcatcatcatctataatctggacaccacttaataccaacactcataatcaaaccacttactatctctctttgtcaaagaagcattaataaagcttcaccacctccactatcactatgccattatcactccattaatcaaaacaacaaaaggtataaaaattacttgttcaaattagaaaaacttaccacaaggaccccatgttgaatcaacactggctgcttcttcaggccaccaccaaccccagttctaccttctgaaattctttgcacatttagaatatagccatcttgggttgtcacctataaaaccaaaaatgaataattatattatatactactatataagtaattataaaacttgggttggttggtacttacatcaatttcctggcacttgtatccatatgaaacaacagaggacttgcatataccaatctcaggggaagccactataccttttcttggaccaaatagccaacccctggtcgagccatacacaccaagtggttcaaacaccaagagccacaccaccccccaccagatcaaacccaaactcatcaaacggtcttggcctaaagccatttgattattaaatattattattcttatctgtttttagctccttattggtgagaagtgtttgatattgttaaagccctttatataggtatagatagaaaaaagacataattaagtgggaacgcaacttactcttctttttacttctctctttttcttttcttttgcttggcttaactgactatacaattacaaaaacaataataacaaacatttttattttatattttttgttggtcttaaaagtgatataatatatttatagtgaagcttttttcacgttcttttcccatttgcaataaataataaatataattatatggatagatagatggatcatattgctgcaaactcagggtcacaacaacaaaattcagtttgaaatatagaaggccagctggggtatggactatatatggggagatagtagtgactattcccatgatagtgagattttgttttaaagaacaagaaaacaagaattaatatgggctccactttaccatattgcgattgtatgagttcatcaaaatacagagaaagccaaaacaagactcaatccttttcacattggtttatgtatgtatatatatagcataaaattttatatatatgtttatgttacactaattaaaagaggtacaaatgtacaatgacaagaatattttatggactaattaaggacttagcaccactttttaaccagctttttactaattaatgttaattgttttaacctaatattctgtttttttatgggtaaaatagtggagacaacaaaaaatggagacatattttttatttttattatgtagttatgctatataaaatatattgttgagtggtgagacacatgcacatacatacaatatataggctttgaattttcttttataataattattaaaataaaaataaataaataacaaatttgaatcgaaatatattggggttatcagaaacatcatagatgaaagatggcattagttttgtcaagagtttcaaaaaattaaataatattcttgtagtgataaataagctagtgaataagaagaattaaagtgtacacgtttttataatttttgtcacaataggtcaaaatggatgtcaatagtggtttatcgaatagctatatatacaatgtgcacgataaaagcaataatagtgaaatctagaaattgtatggacctgaatagtattattgcttacagagaagaccataacgggaccatacttatatatgagtggaatgtttgttgggtatatcttttacctctcaccatctccaaatctcaatttgaattgctttgatcataattatatcttgattttaaaaaattataaggtaacctgcaaacttattttatagaaaaccctacaaagtatacatggtattttaaaaaagatatagataaatattgggtgtttttcaatcaaagtcattaattcaattctcattaggccagttttgggggcaagacaagaggaattatgttttagagactaaaatcatgtttcacaggtaaaataaggtgtggaaatcaaagaagtaatatggaagaagaaaacaagcatcgtttcatattattaattcaagatttctaataaacatcaaataacaaataatagtattcttaattattgatagctaaatttaacaaaagagaaataatatataaactcaataatcttacacataccatatatatttcttagacaaacacctagctagctaagacatgaaatagagaaatttcgtagcattaatgaacttgtagcaataccacaacatagtaattgctagtgttacatgaatacatgaaaagttatggggactaattaacaagtattagtattgtctagttagtataaatatgtaatactattacacaaatagggatcaatgaatgaaatgagagaaaattagaattattcctattggagtttggcactgactcgaagacatgaaaagttatggggactaattagcaagtgttagtattgtctagttagtataaatatgtaatactattacacaaatagggatcaatgaatgaaatgagagaaaattagaattattctattggagtttggcactgactcgagagtgcattcgatcaaa

SEQ ID NO: 295007 - DNA, 10151 bp, Cannabis indica
ttgagttctgattagtgaacatgtagtcttttgttctccataaattctttataatccatttggttgcatacgaaaagttccacatagggttactttattatatatctaacattcttaatatgtatgttaagtataaatacatacatgcttaagcatatattaaattccaaatataaatgaagaatcttttatattttttgaattctaaggtaatgacttagacttatcttttttagctacaagcctttttgaattgtaatatcaagtaaagtgtaagtagatttttaaaggggctattttatttttggctaattatgatttttgctacctgaactttgtcatgtaccaaattatgccccctgaactattgagattgttagatttaaagacttttgtctaatttcattttattttactatttcaatgattgtttatgtactaaaccatgctcccaaaacttcgatatctttctttcaaaaaaaaaaaaaacttcgatatctaccaaatcatgcccctgaacttgacatgtactaaattatgcctcctaaactttcatccaggttagaccttttaactaaaattggaaaaaacttcttaaatctaacaatctcaatagttcaggaaccatttttaacaaccttaaaagtttagggggcgtgaatcggtacttgtcaaagttcagggggccaacctacatagaaaccctatagcaattaacggagcaacctaaatcgcaaccaacaacccacatagaaatcagaagagaaacccacaccgtaaatttaaaaaagattaaaaaataatatataaggtaatttttctattttaaattttattagttatataattaatgtgagaataattattttatttatttcaattcatagttaatattggtaattgcttaaagtaaatagttgttacaaaagaaaatattagtaaagaacttccaaattagccaataaaaataaaaataaaaaaaccaaagacatattaccctagcgggagagactcacgcaacgcaactcaccttgtaatctgtaataggtgagcttttggctccgaactcctcctttcatcttcaaccttcaacctttctcactctctattcactctgttcttccacttctctacaaatctcaggtaaattattctgtttcacgctgtactatactctcatgaattcattcatttagtttccgaattttatatatacatatatattctactgttctctagggttttaggttttgcattgcatttcaattcagcttttgttcactttaatttggtttctgtttctgcttttgattgaaactatattaatttgtgctactgtaatggtttttcctagtttaagaagaattttaggtttttaatttatgctgttgatgttatactaattatttagcaatttttgttgttgttgttgtagataattagccgttattgagggtttaaactgttgaaacctacattgttggcataattagtttctatggattttgatgagtatgagtatctggagaacactgtagaaaatcctgaacctatcaagggtaaggagactgttaatggtggtggtggtgatgaaattgtgaaatcttctgagaaagatcgcagtcgaagttctaagcatagaagtgatgacaagaatgatgatagggagcatcgttcaaggcgttcaaaatctggtgaggattcacgtgaccatgatcgacataaagaaaagggctcgtctcgtcaccgttctcggtccaaagatggtgatagagatcgacaaaggagtagccgggaacacagggagagggaggacagagacaaggagaagagtaaggataaggatagggaggagaggaatggaagagagagaggagaaaggagagagcgtgaccgtgaaggtggtgacagggaaagagacaaagacaaagagagatctcgcaggagccgcagtcattcagaaagacatcggagtggtgcggttgaaagggagcagagtcatgacaaggagcttagagaaagagagaaagagaaggaggtggtgcgagaacgagatagagaaagcaggtatactttggaattattttctttgtttgttatcgtcatagctattcatttcatatttgctgcagacgttttggattatttgttattgctatgtcaaactagcatttaactatccctaattacttgagattggaaaattatgtgctttattgcaagtattattgtatttacgaggataagttgttggttgcagcagtaatttgattgcatttgaatggttaatggtgtaattattgaacagtttctttgtaattttgtttatcctagacataatcacgcttattggtttgtatgtggtttacgcttattggcttttagacgtggattacactcgtgagcaggcacttgctgtcaagttattatgtactttctttcttatttattagattttctgttcaaatttcatgtaggacttatcttagctagtcccccattcaaacaatttcattgtttctccctttgccttggttgtgcataattttatgtttgcctttaagcttttttgttttcataaactcagcaaaaatgccatgttttgtgtggtaaccaatctattcagtattcactatagtttttgtcctctcaaagattgtagggttctaacttctaagattatagggttcaggctcagaggacatgatatatatatatatatatatatatataattacttatactatcagatgtgccccactacttttggaaaggagctggtgtgtaacatgttatatattgtggcatttttagtggactggtggttaatgcttgacatcagtcttttatcggatggtgggtggatgtgtgtgtggtggttagatgctatggatacttacattatttattttattttataaattctgtgttttttaaggaatctcttttatggttatgaaaatattaggactttggatatgatttgcatcatttaggatttcaataaaatggaagtatttttctgtttattggtctctctttttagatactttcagtcttcagatctctctctgttgtggaagttaagaagggtggaaactcttagaataaccttaataagacatattacgcatggtctatgtgaatagttgtgttgcttttgaactcacttgatgctaggatagcttttcttctctctactacattcatcttgtcttgtttgtttgctttgattgtttgccagctcatgttgaggcaggtactacatatcttgaggaatcacaccattttgatattttcttttttatttctccctcccaattataactatattatggcaaatgggttttatactctagtctaaattgacattctccgtaggctaacttaaggctcattagttacttctacaattctactatttaatagccataaagttctgaatattaataaagactagattctgggaactcgcagatatgctagagcagtcttcagatggtctttctggcaattgggccaggcacaggaatcgggtcttgggtcttaaatgtttcttccttaactttgtggaacctagtataaaagcttgcaacaaagattgagggttctatgttggagattttgaccggcggtgatgtcatgtaatgattttcgttatcctccgcgtttgacctcagttgcttaattatatttattctgttgcagaaatgctggtgaggaagtgatgggctttgcttaagagaagcacttcatcttctggtgcttgtggaaaaatgtcctcaagattggccttaatttacaatttacattaaactatgataattattaactggttctctgccttaaatttaaggttagaggaggtcatagtttttccaatcattgcatttttgaaatcctactttgccatgaatgctctctcatctgcctttaagccaagtttgaaactttgcagaggatccgcattcttttgtcattacatctagatgggattttgtagcagtcttgttaccgggggttccagaattttgtgcctgtgaacatcatcgttttacaattcatgtccctggcaaagtgcaaacacacagaccatctaagagactgtaccttttctgtgtgacatattattctgctacattttggcattgcatcaattgcgatgttcttttgagtgggcttgctgaattttactgaatattgaaatagactatcttctcaagtcctaggatctcaattttgtttttttatggttgtgattctttctttaaagtataataaacgtttaacaggttccagatatttccaactaggtcattatggcactgccatccatacaacacactatggtgctgtttacctttaagattgtgtttttttgtagaaggtacaggccactgtgatgcttttttcattaaatattttgttgcttgtagaaggtatataatcttcgtcattcttctgtttggaataggattatttagatgactttctaggaatgggtatcccccttttttttttttaattgctgtatcttttacagtttgactattgttagaattcaagactttcatatcttttgttttagacattgttcatgttaactttacgcaattatctatctgcagggctgtttcatgtgggtttacagaggataaagcattttttttttttgagttttatcccttttataattttcctgtgaattgaggaatcttttgccacatttaatatggccaacacagaaggatcccacactgttcttggtcttttaaagttctgtgtttccttgtaatcattttaggactatattggtaactcaagattttcagcccattttttcgttttcattctcttgcagaagatataaagataaaaaagaggatcaggcagagccagaggttgacccagagagggatcagaggactgtatttgcttatcaggtagccattctttcacatgccttacactttgctaagtttgcttgctcttaaattctctttactgcactattacgtatgatgtaactttttgtatttctattatgaaacaaaattggcagatttgtctaaaggcagatgaaagagatgtatacgagtttttctcaagggctggcaaggttagtatgtttccagtctcattttgtattgaataatttaatagaatatgtttcataaagaacaagattctatactgataaatgtctttaaacaaaatgtctcatactagtttaaattataaatctcacatgatagatgtagtgataattttgatattattcttttcataagtcgggattgaattcttttcattgatatattacatgatagatgttgactattttgggattgttctttaaatgaatgtagcaactttttataggctttctgttgagtattattgttaagtgcagtagcatggtttacaaatatggacaacttctttatcatttgcaggttcgagatgtacgtctcatcatggaccggaattctaggcgatctaagggtgttgggtacgtttctcatgttttcataattgatctacatctatctaactttatatatgtttattttaagcataggtcatataagattgtcaattcttttttactcatcaataactgatacttattagcgacgtcttttgtttattctttaaagaacatgacctgagttgatggtatgtaggttaatacttgtccctattagcttgaattgattatggagttatttttaaagtaggattaatggggtagatagctcaattgatcaggcctatggtttgtccatgcaagttttgatgtttgagtcccttctgctcctaagtacttacatagaaattgcgatagtttcattttctcaaatattgtagggttagatgaggaatccagttctgaaaaagaaaaaaagaatcgggaatattgagatagtgtgtaatcaacaaggggtaatttattcaagtaaagcattttattatgtagaattcttttgagattgttggttttctgagttcattcttgttttgtaggtatattgagttttatgatgtgatgtcagtgcctatggccattgctttatctggtcagcctcttctaggtcaaccagttatggtgaagccatccgaagctgaaaagaatttggttcaatcaactgcagccgttgctgctggaccaggtggacttatagggccttactctggaggagctaggagactttatgttggcaatttacatacaagtataaaagaggaagatcttcgtcaggcatgtcttttttttgtgctcactgcttgcgaagttcaaactttaatctattatcaataaaataaaaaatgcttatgaactgcaattaatgtttttcccttcctttcttttatttactgatatattaatctttaatcaatttatgtgtttaaaatctttagtctatttattgtatacaggtttttggagcatttggtccagtggaacttgtacagttgcctcttgatgaaactggtctttgcaaaggttttggatttgtccaggtatgtgtaatcaattgggcaacttgtgagttgtttctgcattcccttcccctcctcctcttcatttgaatgtttagggacgacacatataacgagcatcaagttaccttctgttttcaagcttttataaaataatattatataattgagatttttacctgctactgtttctgagggtgggcgtcaagttgccttgtatgcttaattattcctttcaaatttgttggttgtttaactaatatcattatccagtttggacgtcttgaagatgcaagaaatgcactgagtttgaatggacaactggagattggtggtcgaatgcttaaggtaattttgcttattttgttactgcctaaagtatttatggaatatgtgacctgttttcaggtttctcccacttttttaattgtttatttcattgcatggaactgaattatgacttattgcattctatttccagtcagttatttccgtatgtctctcatattgtgcatgtcaacctctatgttttgaaaatgtccaaagattcatgaataagctgttgacttcacttctgtccatctgatccttttatctgagattaccgtattttatttttccttgtatgttctatgaattgcaatggtcttttttttttaagggtgttttgctagaaagaatcattctccctaatagatactatctgcctgatattcactcttttattctctttccttcattttattttttaggtatcagctgttactgatcaagttggaatgcaagaaattggtgggaacactggggattttgatgatgatgaaggcagtggaatggtaaggataaattttcttcacggttttgattaaaaaaacaaatgtcaatagctgagctttacatgtttcagcacacacgtttcacaagtgaagaaaggatttctgacttaattaaaaagtagctgatttactgataaaattaatttcaggcgcttaatgcacagtctcgagcacttctcatgcaaaaattggatcggagtggcacttcaacaaggtccgtattctcttatctgatcattatatgtgttttttcttttgattcttgatcagttgatctgatatttgcattgtacgcagtatgactggtactcctgctgtcaatgccccccctgggtttactctaccgggacctcctccaatgatgggaactgcaccaatgatgacttccctttctgctccactagctcctatgccggtccttggacttgggggtggtggtcttcaagctcctacagtcactgttcctgctatagatacaattggtgttccaagtgaatgtttgctcctaaaaaatatgtttgatcctgaagccgaggttgatattccttgcttttctaaattagcttttttagttttctttttttggttgtgttacaagcaatattttctttcttgcagacggagccaaatttcgatctggatattaaagaagacgtacaggaagaatgttcaaagttcggaaatttgaaacatatatttgtggacaagtgagcaatgaaaattcacctgtttcttttccccccttcttttccttaaatcatcattctcaccaaaataccgactcgttattttcaatgaacaggaacagtgttggcttcgtatatctgcgatttgaacatacacaatcagcagtagctgcacagcgtgctctccatgggagatggtttgctgggaagatgattactgcatcatacatggtatgtgtatattgtctcggtctcggctctgtacttacatatttctctcatttaccttttccttgaaatttccaatccttctatgcagttaccccaaaactacgaagataaattccccgaaagcagataaggttgtggaattctgtacctgtaagatgaaatgcctgcctattttttggtggcccttatcgtcatttttgctactcactcaatggtgattatattttggcgattttatccaacaaaaagtatgttcatcccccataccgcgaattgcagatgacttgaaaaaaaaaagtcacaagttattttcaagaatctagctgcacatgagggcagttattattgctagtgcaattaaaatttacagatattgtttgtaggtgaaaattgctgctctctttttattaattttgcaggcctttcgatccatgttccgaatatattttggaattagttgcagacacatcagttctcagttttgtttaatcaagttaaggacttggctaatctttattttgataattaagttgtatgttatatagatatgatttttgtggacaaatgctttgttaaacgaatttggtgtttggtcaagctgaaagagagaaaatggtaacagtgacaaatttgatacttgaagttgaagcaatttctacagattgatgtatacttggtattaattatgggtatcctttattgtggtttcagagataaatttatggtcgacgatgcttctgtggtcgaattgtagttttttgtcgttataatattcttcatattttcacctccatatttggacctctaaggctaagggtggacttgcagtggagaggaaacgacatatgtaatgatttttatcaaacgaaagctgtaacttagttgttgtgactagtgagagcaattatcgtttgtttggtttttgatagatcacacaaaacattgtatttatccaattactaaaatgggataacaattaaccttgattgagagaaaggtaaataaattgagttgcccactattttgctaggcatgcttgtttattcacgttttgttagatgatcaactaatcgagttgtccactatattatcgagttgtccactatattgttaggtatgctcgatatctatttggtcatagtattcttgggcataacatcctctttggactttaggctattttgtattttgaatgctattatttacaaaaaaaaaaaaaccttgattgaggaaagacaaacaaaagttacaaaaccaagtgaatgatctcagttattttcaaattttctttcaaccaatttataatttactaaaagttttaatcatcgagtctcaatggaaatatgttagttattttcaaattttctttcacccattaaaaaaattaagtttgatttcaaatttaagacaataaagatgataattacaattttatcaatattagggtacttttcaaaaaaaaaaaaaatcattagatctatcatgtacaaattcaaaattttgagcaattatattgccgatacaatataatactttaggtgacgtttagttggagttaataaaattgaatggaatggaaatgaatcaatcttcatttcattcctttgtttggttgcatattaaagtattggaatgactattctattttgaaataaaaatagaaagaaagaccattccaagaataattttttttttatgtattttaaattttattccattctatttatatttttatttttatatttattcctaccaaccaaacatcatctcaattttgttggtagcagccagaaaacttcacccaattccttaacattaaagttgtaaataacaatctccaaatatataacaacaacattcttaacaattactttagggtaaatagcggcataag

SEQ ID NO: 295008 - DNA, 5960 bp, Cannabis indica
tatatatgtatacattatatttggctctatattcttaatgtccagtcttctattctaaatatgttcgtcatatctctttctctctctatctctcacacactcaaacatgtgtatatatatataatatctcttttagcctagagtacctcctaactggtgaatatgtggtggcaggtcgcaccacagtaattgctattgttcccagtaactgtgacattgtcatagagcttagcctctgtgttgtgtttatggatcagatccatgattctttgattttgttctttcaaatttgttaattgtgtaataatttattttgaacctaattaggctttgatctcgttctcttgtttcatatagctaaatgctgcacctggaagtatggtatgctctaaagagggagtgaggtcagactttatagaaaacagtgacaaggcatgtctttgaaacctgatctttttaatacgaaccattatgtctttatactggcctggtttttgtgtggctcttgtgtaccaggttatgtctgagatctgcattataacatcttacaagaaagaatggagtccctcatatgaagaaagccagcaaaaactcggtaagtgtgtggttaaatgctggcttttgtggctctcattatggttttccaggtgcatatgtgcgtggtagcattgggggtggaacaggactaagttggccatgtgaagacctgatgcatatctgagtgatttagcttatggttttgtggatttgaagaggaatttgcggagctgttgaagtgcaagcaccgaagaagctttgggcaaatgctggtgcaaagacttctctgctttgtttgatcagtttttttcatacttcatgcacacataaagctcaatcattgtgcgattttatgatgtttcatctaaaatttgcggcaagttagatgttgaaagcacaatgtgcttttaccttctcaccgattgcgatgacttgtcaacaattcgttttttaacagcttatctttgttctctatttctcttgatcaaatgtgataattattctgcaagtaattagttatgctggccagtattggtataacattactgctgctgttgtcaatttttcttttacctaattactgtaattttaaaatagaacattgatgaaattgctatgaagtgattccagtctacgcttacttgatctacttatcctggatacgctatttttcattttcatcctttttcgggggcaagagccaagagctaagctcattcttattattaagggaaaaacacgtattcctctgccgaaaactctcgaagtcaaaccccagtggccaactctacacgacatgctagacaaagaggaagaggagatgctggccacacaatggcttgagggtggtactgttcaagacgaactcagctcagcccctctcccaaattgtcaatattttgagtttgtcagtatatgcacttctttagaaacttctataactagtgtggacatgggtttttcagcgtaaaagttaaatgaagtttcgttttgtttgctaaattagaaaaatcaaataattcatatgcaaataacgaaagtgacaaaatatattataagattttatgcaaaattattatgtagtatactaaatggtatgataattatgtaaaagtctattgatattgctcaatggtgttttctctcttttgaaattcctctattttgccattgccaagatctaccatttttttttcttgacaagagctcacggacttttctatagagttgggtgtgacgtgatttttccgtgtggatgtggttatttttggttggttctcttctcttttgccgattttctctaggcttctcgtgtgttgacaatcttgtgctttgatgttcttggttgagccatatcgacttcagtgtttgatgtccatctgattctttagattctcttcctcgatggttttggtggggaaaaattgtggcaaagggctacgacttgatatggatgtggatgtgcattctgtaggtctctttggtgatgactttgtctccttatgtgatgcaagagcttgtggtgatgcccagtttcatgatggattttagtgttgggttgttgggtctcaattggggttgatcaactggtcgtgggatggtttattagtttttattttcatgttttatgtttcgggaatgtctttatccttctctttgtctatcagaatgtggattcccatatctctattagccatgtattctatactcaattcatttgtgattttagtgttatgacatagttggtcgttttgtcatttcccttatttactatgtgaataatggagttgttattttccgattcaatttggaagattatatatccattggtgggtggactttattagatgttcatttgttttgaaaccttaatataccttatacttctttgtgcttgattgttggtggttcattggatttttagttgaggttgcaattaggttttttttttcttttcgttgttgttatctgcatttccgaatgaaggacacatggcaaaaggtggaaggtgacgatctaagtaattactaaagtctccttaattagagaaagtcgcggaaagactaaacaaaccggggagaggtccaaatttgggaaaggcccataaatttaccacaaggcaaattactgtctaggatttggaagccttgtcatccctttgggactcgaagaagaccatatcaactaagctagggaagcacttgggagtcatacaaatggtctaaagcggatgccaattgcacagggaaaaactagaggcctgtcatgaagctagagccgaatgcctcttgtgaagattataattttatgttacagtatcagatcttgtcccctgtgttagagcatggtagtgcgcgtacctcttttgaatatgcctttctttttgacggctcctcttagctttttgtctaccaggtgcaacctccgcccaacacatgctctagaccaacaaaggtcccagctgtacagaccattcaccccacgagagagagccttcttagggcccaatagtcagtatttctatgtattttgaccccagtagtgggtgggctttttgcataaaatcttaggcaagtaatgggtatgcccatactcgaactcgaactttagtctttataagtttctctgtgtcttcacaaaggagcgatcgaaaaattacatagctaagctctgctaaaatactctctaagctttcatcttctttaagagaaacttagaaaatcagagttagagtttcattgtaaacaccacttgtaatacatttaaacacttataaggccaatatattgactcatggattagggataattaatgcctaaaccacgtaaaatctttcgtctcatttattaaacagttattcaattcctaaagctttcatttaattagtttttgaaaatctcactaaatattttagtgttttcatcgagagctgaggaaagatttgagccactatatttctgcacccatggtggctacacaaaaaaatggtgatagagaaaactcctcaggcaaacgccgacgttgtcatggatgatgtaaaccctcccattccagagcacacccagccgagccatgcgaggggaggggatacgtctgaagctaacaacaaatggaacgacccaactcgtcatcgcaagtaagttgaagacaaagaccctgaagccaaggatgacaaggaagaagaagatggatacgaccaagacccatatctggttcgagtatccaatgaactgcttgagactcaacggaagttagctcgtcaaaaagagtgctcttaaaagatggaaaagataatgacccgcctccaggtgaagttcaaaaacctagaagaagatttcgaagaagatgcttcagtggaactagttgactgagacaataaaatgaacctcgccaacgccaaaacctcagctcctgcaaaggacaaggggaaggagaaagtgggtgagacccaaaacaaaacaactcccttgcctcctcgaaaaggcgtgaatccaaccaaccagccctcgcggacgcagaaggccaccgatgccttcgggattggatgaccttttgatccaaaaggcaaggttacaccaaaagggcttggtgcgaaagtacccaagcctaagggaaggaaaaatctccctagtgatttcgttaatcaagatagtgggatagaagaacaattctccaatgacagttggtccactatggctaagggagaaaaggtgaggctacgtggaagcaacttaaggaatcacttaaacgataaggctcttggatgcaaccttccaaatagtgacacgaataggctagaggaacaaattgatgctttgactaagctcgtcaagaagcaaagtggggccctgaagatgaagacatgaagtcgtgtgtcaggtggatcacggaagcctcactacctaaaatttcaaaaagccataaatagagttgtatgatggccgtacgaatcctaggacccatctttcaaactacaacaagatgatgcaagtagcaagagtgagtgatgatgccaagtacctttgtttctcattaacgctaaccaagtctatggaagactggtggaagaggctaactcttgaattaatccatagctcgaagaagttacaggcttccttccggaaacaatttatagctgcaagagactgtggtatggaagtcggatcgctcaccaatatcaaatagtagccaggtgaaagcctgaagacctttattcaaaggatgatggaggtagtagaaaagaccaaggttagcgatgaaatgaaacttgtagcccttcaatctagacttacagttggctccttgttatggggagagatgtaaagaaaaaaagctaagaccctatctgagttcatgtccaaggcacaatgtatcatcaatttagaagattcttatcagtaagattttggagtccctccagctccaactcctttcgcgtctacatcgagtttcaccctgcaagtcccaattttagcaatttcacttcccagaacccaatattcttaggttgtctatggacattctgctcccgagcacactcctacgcaaacctatttttctgggtatggagtggcacaaaccggatgtagtatccctctcagacagtcaaagcaacaaacataatggaacagaacgtaagccattccaggaacaagaggggttgaaagaactaaaattgaagtgaaactttgaaaaaaccaaggaaagagtacgtattggaattttatgccctaaataaaatctaattttgttgttatcttatttgctttcaataaaaatcagaaatcatatcacgactcaatcataagctttgttcagatgttttacacatgattatagatttaatatataagcattattaaatcctaaatatatagttattcacaattattgtgatgtatcacaatagaaaataattgtgattatatgcttcaaattatttagtcccacgatttatcagtgcactggatttacactcacatgataattagtgatgggatttacttacacttggataagtgaaatgtcttttccaagacattagtaaagtaaactagcatcggatgtattagctatacatcggactagaccaatattcacagcagaaaagctattgtaaacttactgtagtatcttttctaagtaaatatctaaaagttgatcttagatcaattatcccaatcttgagatgattagattctagcttaactgtattattcttattctttgatttgttcgatcgaagcctaccaatagtttgggtcaatacttacatcttgggaacagggtagtacaattgagtgtgagcgctagtcatatatatgaaatctatatattctataagtacatcgaagtgaaacattagtttctttagagcttggctaaacgagtttaaatgattgaggtctcatttcagtaattat

SEQ ID NO: 295009 - DNA, 3744 bp, Cannabis indica
ttttgtgcttggatgcctttttacttttccgctctttctttgttttcttattctctgtcggtgtctcttcttcaatcttctcatctgttttcagttttttcgttacttcagatgtttcctggacttcaatagctctcttcttagatagattctcatctaagcaatcaccgcggcctgtactacgaacacacagactgtaagtttcacctgtgctgagtttgcatgtgacgagtttctgtggccgacccaacgtatcctggcataatttcggtcaacatgttacttgttgtattaaccaactacataacagataaacaattttgtccctaatattcaaaaaattgtcttgggatcgaaatctaaaatcaatttactaatcttatgtaccttcaagatgctgccttcgactttttcatatgcttcctctgcttcttgtaaacttttaaagatagcataggtagtgtacttatctcctttaattctcctatttgactgaaaaaatttaaaatattagtcatggcaacttgaatccacctcattctaaatcactgtaaagcaatacaaaggtacatagaatagtagtgtttcattacatgccaccaactcaaaatcttaaataagatataaagtgtaaccgggtcaatgcacggtttcatgaaatggtgtcgtggtgccctgtccaatgaaaagttagccgagggacgttatcatatggatccaaatgtttttccaacatgaacatagcttgattttttgttaaaactggacgtcttacaatatttaagaacaagaatgagtggtcaaccttggtttcgattgtgaagtccccaggaatagctgtaagtaattcttcagtgggtacatgtgatggtatcctgtgaagaagtagtttcggcgtttcaatttcgggtacctatacagtttcaaataaatatgatttaggaaagttcaaattgaggtaagtaagccagagatgaagatatgagaaagcgaactcacaacattcatttctttatagggaatagtatctcctgctttttgctctaacctagcaagaacaagcttcatggcagcacaagcatcatccaaacaattatgaggagaacccgccttcctcacttcgtagcccaacaaagactgtcaaaagaataacatataaaaaacagtcaggcccaaatctaaaagcagcagatgaattagaaaaaagagcttcgaactgatgaaatcgattaagaaaaagcttcaatctttcacttgccttgcataaattattcaaagaaggtcttctactgatgggtccctctgaatatctgaatatataagaggtatcaatgacccatgcatgatctatcttcaatactgagcccaaaagcgaaagatcaacaaatgagtagagactaattgagcataaaatgtagttacagcataagtgattgtttcactaaccattgagatcattacttaagctgtggccagctaaaatatttccactggataatatcttcatcaacgagttctagagcacacagaaaagaggttcagaacttcagataaataatgttaacagaaatttctcaaaaccgacaaagcaatgatactaaacctgtacattcgccaatgtgcatgtaactccctctagatctgctgcagtaattcctgtaatttcagttctataatccgcaacttcttttttgggatttacaagtacattcaatttgacctgaaaataaaaactatattaataggcgtacaaaggagaacttattgatgagatgagaaacacccgaagatgttataattgaagggttgagttctcttatttgtaatttatactccatttaaaaaagagccaagtgatttcaaacaaattgataaggaaacagttataaaaatcatataaaattcataaaagaaataagaactttcattacctccaaattgcgatccactacacacaccctcactgctgcttcagttccatctacacacagaaccatctcacagtcaacagcaagaatgttatctgtactcatcacgttggacattttcccaagcttggtgacaatccaaccctgattcacaatttccacaagttagtatgaagacaatatgccactttattaagcgtaaattataataataaaccggttgagcaataagaatgggaaacaaaattaacagctagaggtgtcgtttttattcataggctatcatgagcaaaaacacaaatatatattgcaggacttcattaattatgtgtataacaaaattggccgaagatcttcagtttgggtctttagtttaaagaatattatgggagcaacttaaaaagagaagcaattatctttggaaaaaattgtaggacttcattaagatcgagaataaaatatacaatttatgttgaacaaagatgagactttgctttagcaaggaggcatatacatcaaaacaattttaataatactaaaagcataaatgtgaggaagtaatcacaaagaataaatatgttcaatgcaccattctttggcaaaacataagttagaaagagatttaaacaacttacttgttcctttgaagggaacgaatactctaacgggtattgcgggtgttcaagagttaagcgaaccagcatctgtactgccaccaccagtacaaaacataaaagttacaaaagtatgaatgagataaagagcataacaaattgtaagcacgtaagtttgctagaaatgtaagaaatgaaaatctaagctcaacaacaatcccaatacaaccatttggttcatattcaaattcttaagcaatccgaaatacaacactacatacatattgtatcatacaattcaaaagggcataaatatgtgtatcacaatcacctgctcaggtgactcattttctggagctcttgtaagcttctgaactaagtttcgctttgaataagattgaattagttgagtcacgtactgcagccatcattaacaacaaacattgttaacaaaatacagaaataggaatgagaatagaataaaatttaaaatgtattaaaaaatttgattgtattggaatggttattccttccatttcaaaatataatagtcatcccaccgaaacgtcattccattacaatactttaaaatgcaaccaaacaatggaacgaaacaaaaattgattcatttccattccatttcattaccttcaaccaaatgccacctaatcttcaaccaaatgccacctaatgaaaaatatattacagagagagagagagagggagttaaggaacattaccttcaaatgctcttcttcatcaaatgtcttcaaaaaagaaaccaaaacttcattagacctttttgcagggtcactcaatctagccccaaactttttatcataaccactcaaaaactctttccactctcctttactccccttgaatcctcttttctgaaccattttcacaatctcaacaagggcctatcaagtaaaaccattaccacacattcaaattacaatggagcgcatttaattcgactacaatcaaaacaattggcataaacccataacaaaagaataaatttttttcaaaattcaatagctgaaatagcaaaactccatattggtctcctccactctacattcagccaaaacataacaagatgaccgtaaaggacttacctttttctcagcagtagcgagcaggtcctccattgctataatttgggtgaagctaagacagagagagagagaggaggc

SEQ ID NO: 295010 - DNA, 3366 bp, Cannabis indica
tttttaatattttattattattattatggtttttatggatgaactaattaagaaactaataacactaagtgggtaggtgcaacccaacaatttaaatatatctattactgacacataaaaatagtaacagctagtatgtgaagatattaatttagttgcagttgaaattaaatgtggtcaatgagatttcagtgttaccattgctttacccaaaattgcattcaagtatggcagtgatgagctcaatgacagataagagtttttctttaatttgtgccctgtttataaggacaggtattttttttatgctagtctaaaatatgcattatcagagaaggataataggtaagagaaatacactattttgtttttgttagtaaaatatctattttaattaatggtagtagaaagtgaaacatttcgacaactgcaaatgcacaataaacattgtatgtcactatcatagatttatagcaaaaataaatctcccataaaaggacaaaaaataaaagtacatgtttagctcaatacatataaattttcctgatgagagcacatgtaatgtaagatcatttaaccaaaaaaaaaggggttgcgtgaaaacttatgaaactactcactaggtccagaacagaactatcgtttatttattctctcttctcatcatcttcatagtctctaacagtaatatttacactaaatgaatatatatatttaatttcttcaatgtcaaaatcaatattctacctatagcaggggcgatggaattttcaacccattctttcggtggtttattatgtgtgcacatcacaatcaaagcatcagttttttttttcttcttaaaaaatcaaaaatggaccacaaaattgtgtgccaagattcagtattatctttggttgagatttttggagggcaaagattcctccttatgaagatgaacccttctaacccttcaacctttcataaccacaagagcccttttccttttgataatgtgatatcgttgatgtaattttttgtaacttcacctataatgtaaatgggtcaccaaacccataatacaaatatacaataatggaaaatggaaaaaagagataaaatagacaatgaagtagacatcaccataagcgtttcctgtgccagaaggccagcatgtgttgcaccaaacaagttaaaacgacaatctgacattatatcgtgctccatcaaatgtatatttatgatctccatgagtcttacatatttgtattcattaaaaaaaaaaatgatattatcatattaatctagtggattctacaaatgcagaagcatttgttgttaatgtttgagttgagttagactttatcctcaaacatcaaacaaaacaaagcattatagtttttagtttataccaaacagttgaaaagagaaacaaagtgggcaaaaattatattactccttccaagtgttcataatctcactcactcttggcaacttcatttgctttttcacaaactttttcagcagcttttgaaggaggttcttcagaacaagccctcaagacagcttcattctgcaagggaaaatggaaggaacttatgtcactatcttaaaaattataaaacagagacttgttattttcgaagggagcaaagagtgatcaattttgattctgatattggttttggagtaagaaatatgaaagcaattatgcttcatatgtacagtacgttgcttaaataatacccgtatgcaacagtccgcaagcagagatgcatgtcaatcacattgctataagagagatgcagcagaatctaacttcaatcaatattaagaatgaaatacaccatattatgtgatcatatcagttttatgcataacttactaaaacaaattgttcaaccaaatctgttgaaattcaaatgtcaactaaatagcacagcccttatctagaaattgagagaaattgttgcactagatcccaaggagtattgtgaaagaatcatttttctttaactttagagaaaaagaacagaaaaaaatcttgatactacaatgtggacatctcctaataactgtcagctagcagtgattatagcatctacaagatgacaaagattcaccaaataaatttgaatttttattcagtttgctatattatatgcatgttattcaaatttgtgaaaatgccccaaccatgtttcagcaatcttctgttctttacatagtatttataaacttattatcattaccaagaacaagggacatctcaatgaaatcaaagacaaaaaagagaagattttagtccaaaacataaaacaaagcaatagctcattcaaaaatttgtatttaatgatatactaatagtccaacggaaagaaaaattcacaccataaagttggagatgaggacttataactcacacaatactaaactacacaagcaattgcataattaatagtcataagaaattcaaacactgccttttacattatcatgaaaaacctacatttctcttatacgtcacaacaaaaatatagcagaaagagttatttttccatctttaacataacagggctccaaagtgactgagctgacaaactgatatcttttccatagtatacgcaactatatgaatacatgacttgtaacaaagattaaactaatagtgatacgccaaaagaaagttacagttggccttacaataaatttaaaaaagcaacaacaacaaaaaaaaaaatcatctaccattaatatatagattaatttcttattcgtagaatacaaattcaacagataaaagtgatctaaagtccttccattcccatagttaagttcacaataaaagttcatagtttttgcatttgtacacatattcaagctgaatcaaacgaaacaaatatgaagaattaaagccatagaaaactaaaaacaaagtgaatgtacaatttaacttgagactaaaccctaatcataaacataacgaaaacgaaagtgggaagagagagatgaagaaggacctgccaaacgcgaaggagacgcttcttggcgttggccttacgagtaggtgtgagctttattctcttccaaacaagacctccggagtcatgcttcttcactatctccattaatcgtgttccccagaatgcacccgccatctctcactctctctctcttcgtttagctagttcactccctaatggtatttttggtgcaagtaccacctacggtctctatggaccaatcgtatatcggagcccacttcaaccacaattttgggtcaaaataattaagcccagtttcatttatcggcccaatacttttttgggaaacttacaggggtaagttgaaaaatacttttttttgtccattaatcaaaaatactct

SEQ ID NO: 295011 - DNA, 1399 bp, Cannabis indica
aagtcgccttgtcgaattagtatttttaggatgtagtagtagtgagaactccacatcaatccaaagctttattccttaaccttattctacactaacaaaagctaaccattcatctagtagataagcatgaattcctcgaaagtaattatgcattgaaaacctaaagctcgttatgactgaatcgattgtaaaattcacacttttcttaaggtgttccaaacaattgtcaagaaaaatgatgaacatctgatcaggccaaatcaaattggagaaattaagcattggcattgaataccacaagagtttccaacgctttgaaagaacacatgttcgaatcatttcttcagtttgaagaaacgacatgatgtgatggatcaatgcatcaggaagttccgaaattctgtcaacagccattgttggcattctttttaacccttttttggcaggactacggctatattttttcccaaacatattatccattacttaagttgagaaaccaaacctaagtaagtggattgtgaagtgtggatgaactgtaacaacattaaaacaatcaaataaacaaatcttaaacatagattagatcaatgctaataaaatttaacaacagtatttcccctaaaaaaaatgcacatttcagtagttaagattgataattacgcaatacactatttttttttgtaaattttttatatttttacaaaaaatttttttacatttttatggtattctataaaaacaacaccaaaacaacgagaaaactacataaaaataacagagaaataacatcaaaataataacaaattaacaagtctgtaacatataaatacatcaaaatatagtatttctatcataaaaatcgtaaaaatctttaaaattccgtacaattgtatttttgtgtatttgtgaaatgatctcccttaacaataatatcatgaaaaagcaaaagaaaaaacataacaatcttgataacagtataggtgaaatctctatcaatcaattaaattttaggaaaataaatggattctgaaagtaaatttgagcatatagagaaaaacgaaagaagtaaagtaaaggtaagattattggttaatgcttacatgaacatgaataagtgtattgtgtttcttcaatcagagactcaaaggattgagctttagggcttcggaaggtggagactgaagagggcttcttctcagagagagagagagagttacaacaatggaggaaatgaaatgagagagttttgccgctcaatcccaataaaaagagaaaggaagagacagtaggtgggaaattataattttagaaaaataataaatagttttaaaattattaatgattttcagattttttatttttattttatttataagtacgttttttttttttgttt

SEQ ID NO: 295012 - DNA, 8927 bp, Cannabis indica
tgacaactttccaatggatctcaaaagaattgggactcgatagaaaaggaaaagcaaccagaagaatcaatggaatcaataatttatagtttatgctccaatggtgattcagtttaccagcaagttgagcacagtgcaggcctgcaaaacgtaaaacatcctcatgacttccaatgaaggtttccagtgagcagtactaaaggtatctctactctaacataaatacaaaagttttgacttaccatagctaagaagcgcataaccaggaactagcctgcacccaaaaaaacaataacagaaacaatgagaggcaaaacttcaaatctaaatttacatttacatcaaaagaagtggattaaaccggcaatgttggccgtatggttgactagcaaggccaatctcgactggtttgacacagaaacataacaattcactagcaatgaaaacgaagccataaatggcaaaatgtccgtgcagtcaacagaagtcacaaactacatatcagcaaattattccatgctacacacatacactaacctcagaccagtaggccaagccactagcatagatggatgaaatgaggtatttaaataccaaaatattaagtttcatccacgataatgcaaatgtaagagagaggatacataccgatatagaaatacaatatcatcagtatctgttgagttattgtcagatctaagcacactcatggtgtaaaatttgattttctcagactgcaataagaaaaagaagaaaatttcatttttgattatgtacaaataccatgtgcctaatgtggtaatctgacaaggatgcatacttttgataagcaattctcatcaaataactcagtcaaatgagtgcacaccagaacctgcaaattaatcagtgattcaacattggaaatattttttagtgataacttttcttcatctgtatccacaaagtgatccttgtatactgtcagtttctgtgtttacttttctttttcttttatttatttgaagctgccatgattggacaaagatcaactccttttgaggaagggataagtattatacttgtcaattactaagggataattaaaagatgaaacaaaagggattaacatgcattcaatggtatgatgcatgcatgttgtttgtgatgagaaatttcaaacaaaactatatgcaatctgcatgaaatggcaacaaccaaagaaacctttgggggttcgtcgaatgagacaaagtgacttatagttccgccaagcaaaccaatgccatctgaaacaatatcaagaggcataagagatacatataaaccttaatcctgccactaaaaaatatgtagctggtaaatggaagttaacctttttggagatactaaccttctgtaagagtaccttttccaaattcatccaataaacacaatgatcgcgagtttgcctgcctgttaaacttaccgaattatgtagtagaattcttgaagaaaatacgatttatttcattattcctaaaacaactaaattcttaacactttacttatacatgcagtccttgagaatttctatacctagggtttgatttgagaagtggcaaactatcttatagctacaaaataaacctttgataaaacacatctttgaaatagtagtgagaagataaacagtctcttatgagtataccttagcattgttcctacttgatgcaaatcaatcataaacgttgactgctctgcagtcataagtttgcttcccatggcacaaaatattctgtcataacattagaaaaactacattgtctactgaatttcatgtaaaaataattattccaggatgtattgccagttttatttcgataaataatatgctatgaaattcccatgtctgtaaaaggtcaaacctatcagttaaccccacggtagcagcctctgccggtacatagcttccaatgtgcgaaaggaaaacaattaaagctacctagaatataaaggtgttacaaagtgctacattagaattccatgcatccattttttgtttctattcaaataaaaaattatataaatatcttgcctgttttatgtagatgcttttccctgaataattaggaccagtgataatatttattctccctgaaaggaaaacatagaagttgtcaagaaaattcattatgctgggtatataataacatttacgacttaccttcattttgaatctttgtgtcattgggaataaaagtatctactgtcatttcctgcaaaacatgtctgaaaatggaattatgtctcttggtcgttgtagataattaggataacacctagctttttgaggattcaataatgactatgatgaaactaaactacacatcttttaccttccattttgtatatcaagtaagttctcttctgtcaaagtaggccttacataattgttctgacgagcaaccagtgccagtgataacaagctaaaatccacaagaagataagagctcttttaaaatttatacttggaacagagttgaatatagagaaagattaaggtggaagcatactggaaatgagtgaagatggttaaagtgattctcaccaatcaagttcagcagtaaaattcacagccttatgcagatgtgttgagaagattagtatatgtgacaccaaatctctaataattgccctttccatgtcttcatcaatgcagttgtaaattaaacaaaacataatgaagatagtaaaacatggtacattgagatagaatggcaaactctactatattcttatgtctgaaaactgaaataactctactatcccacagaaggaacagattttcattagtttaggaaacaaatgattttttttgaattgtttaaaagactacacattatgaacgagaaacattagtcaggcaatacctagtattttgtgataaatatctccaagcaggttatccaattcttgtgtctttggggtacgataaaagaatcttttagtttccccatccacatcagaaaactacgtttacaaactattgttagttatatctgctatagccaaagaatctaaagtatgcaagcataaatcaacttacagcaaacacaaaatcttgaattttctctagagtaatttcatcaatttgttcttccaatatgcacagcaagtatcctacaaatatgccaaaaaagagaagaaatgagtactagttaaatatattaatcaactcaaagaagaaactgtgaaatataatatacaaaactctgaatgagcatgttaaggtcaacacaatcagttggttgactcaacaaactatactttaatctcaacgcagtatggtgagggcttcatgcaaccaaccgaaaaggttactacgttgaagatgggatgtaattataaacccaggttggccccagatatggtatgccatgataccaaatgtgaataatttagagctagcaactgaccatactagctcaattctttatcttataaaccaaacccaagacaatttccattttaggactaacttaaaatgtactgaatgataaaggtttggcataaacattaacttccaactctcactctaaaccttgattctatttagatttagattactttacacagttgcatggcacaataactgattctattttgcttatcacaggttactatacaaatgctggaaatgttgaccaacctatctggttgatataaacaatacgaggagcaaggttgcttttacacagctgagggaatcttgcaagttccaccgatgtcacctgcaaagtactgttataattaattcaatctccatccagtatttcctgcttatatgacttctattagaattacctcttccagaaactctggcaattcttcgtatatttgtctcagctcatccaactatattaaaatagccaagtttacagaaattagacaaataacttgaatagcataaatcagatacatgaacaccctattccatgaaacatataagacattaaacttaaatgtctggatcttatattagttatattctccatcaatttcatttgaatgttaattccgagtgcaaggaattatatagatatagcccagaactgcatatgcctagagataacaagggtaagaaattcactgaatgctaacctcatcacagaaaccttctttcactattgtctcgtaacccttctgtttacttctagtaacatcaagaacaccgattacctacaagtacatatcaaatttaagaatataaacaataggatgggcacaacttttacggttttcacatagtgacagtgtatataaaaaataacgacgaatgcttccacattatcttgagaatgaagaggtcgattaaaaagaactttaggacatgaaaaacaatggagtaaacaaagcaattgctagctaatatctaaagttatttaaggagtaagatagactaactaattcatagacataggcaagctccgttgtaatgcttgaactagcctggaaataaatttattatatttagaacaagaacacaaacacattagagtgtgtggtatattttatcgaagaaagaatgtaagatcataaaaaagataaaataataagtaccttgccaataatatccaaactcaagtaatttgcatgctcttgaagactctcagaaatgcctacttcaaatatcttgttcacatgcaacagcgagcaaacactctacagagtactacataaaatagtgtcaaacgataaaagagtttactaaacactgggaacgataagatattgccacatgcagtgcttaaaaatttgaactgttcctatcctaccttcaaaaaagcagtccaatcagcaattgcacatatggagcttggagagttgaatttcttcaatcattaaaaaaaaaaagagaaataccgacttaatgagacaaaaagattaaggcaatacaagtaaaaggataatgatgagggaaataaattattgataatgcaaatgttgtaattgcatatattttcacaatatatccaaggagtccactaaacgtgagcaaaggaaaagatactgtattagaaaataaggatttaaatgatctattaaaggctaccaaagaatgaaacatatgttaactggccaatatacttcattatatatgaatgctaatgactcaaacactgacctaataccaatggatatgttatgaatgcttgatttataagaaaacaattaaagaaaatccacaaggaacactattcataagaaataatggtaccttgagtatgtgaggaatgtcctttacggactttagagtttcgcgtaaggaaagcatcagctcttcagaagacaaaagaaatgatatcttaacatgttaagactacagtttataaaagttaacaaagaaacagttagatattgattcttcaatattaagatatcattattttattaagagagagagagagagagagagacaacggtcatgtctatgactgaccgcctccaaagtttgttatgaacccttgcttgtggcggaggaaaacctttgtaacatgaaactttaaccaagtcaagtgtcatgatgcttttgtaacctagttctgaatttgagcaaaaagtagtttctaatttggtcaaacaatggaaggatacaccattgagacggctgttcaaattgtcgaagtctagtattggcctcaaaaaccagtttctatatgaaagaaagaaaatgtttagaaaaatgaccattagagtggaattactttattacatattacgcttcttttaccattacctcaagaggcgtctccctgctggtgttacacactaaaaatgaaaaacaagaaacttggttcaatatacaaggtaaccaaataaatttaacagcagtttgtaacaatacaaaccttattcatcatgccaaacacagagaacctgcattttaagtaactatcagcacatagatttttcgcaataaaaccttttaagactgattagtcattatttacccctctttagctcttccaatgcccatatggcttggatgcttgtctgtttggaatatctgcaatgcctcgtgagcagcagcatcaagtttgagaaagttgtttctatttatcatgtaaaggcgtaacttaaattccaaattctatttgcttaattaaatcttgaaaagaatacagagtaaagtaagcattaaagaccataaagggatacaatgaaatttggacaacagaatctatagtaatagatgcattcccacattccttttgctctagagtatctacaatcctttcattttctaatatggcaagaagacccccacttgcacgaacttgaatatcacttcccatatccatcatagaactcaactgcaatagatgaaaaaacagctaatccacaaattggaacccgagtaaaacatattattgtgttacattcgtaaaaatgagatgctttaaggcagcagacttttggggctgctgccaccaagaagaaaaaataaagaagttggcataagtatgtgtaagtaaatagacaacgcttctctattcatagagaaccaccgcagatgggtatggagcagagctgacttatgttttctagaagtgtttcaaattgtatttcagtagagtagcaattggagcaagtctgcgtcatcaagtagcaggcaataataggtgatctaaaaactccataagcagttagctgatcacgacttaaggaacagatgaccaaaaacagaaaagcagcaacttacataacaaatcctctccttgatgtttagcccatcatccattccagttacacgaaggtatattaatctgaatgtgagaaagagtatgatcacaattgaatcatatccatttatcgtttttcatgaaagggcattacgagatgcagtaagagaatttttatttttaatttttcatttgaaagtagttaatccaaatattttaaaaagtatcaacagcttagtgactggaattattctaacgtttttcaacaataatgtccatctttttttttccatcaattttttttattattttttggcatctgtaagccaacacaatgtgttagatcaatacatacctgtgccatgcttgctcataactgaatgtagaacttttcacaagtttcaccatgggagtctcatttattccatctgcaaaacttcacagtaagaataccaaacaccttaaattattagggtgcataatgcagcacttaccacttcgctgtaaagcagacaagagggattcttcacttttactgcttgagtagatgatcagaggcttagcttgatattttactgttacaacagaaaaaatgtacaagaaataaaaccaaactgacattatcaagaaaaggctacaccatataaactgaaaataagtattaacttctctcaacaaacaacatgaaactcttactcaaatcaatcagtggaaagtcattattgccatcttcccagacttccagaacattaagctgccgaatactcgaatcataataagataatccaactctgaaaagaacgatttgccaagttatccaaaaacttacagtgtttctgtcccttgttttaccaaaaagcaagggatcatttattaaggaaggaagttcacaaaccataaacaagtacaaaaaacattttgcgaaaaaaaaggtacaaaaaacataaatgcaactgaaactatatactacaaggttctgatcatcaagtggggtgattggatggtttggagctgtaagataatattggccttttttccacaaaccaataacactcttaaattctggaagtaattccaagtaccaactcgcaaattgaaatgtttcaaacagtaaatgacaatagttaaaagaatctcaccgatagccatgttgaatgcatgccatgtacacctacaattaagatcaagaattcaaatcattcttctgtctcttcctaattattatagctaggcaacttttcacttaaaacactaaaaagtatattaccatacagcagcttaataaactaaatattgtgaataacatttaagtttctttccaggaaactttctacaatgtcacagctttgttaaacaaaatttattcgagatagaaagaagtacaaccagaaaatcattaatgaatcaattcaaagaacattgatacgtttcaggaaaaaaaaaaagcacaattttcttattcagtctctacattgccgatgataatcaaaaatccataatcaaacaggattaggagcgtagttttagcattttctaaggaaaaaacaaaagaaggatacactctgtaacattctttacctgtcttgtttcccattactaatgaaattgaaaattgtaagtcttaccgatttagttcaatacaaaaaaaaatgtatatgtatatataatttctcatgtttgtctcaattatgtatactttcctaaatttcaacactgccgtattttcatttcgttttcccagaaatcaaacaagaaggtgaaaaactaagaagtattgaggcaaaaagagtcgatgatgaacctgaggaacagcttcggtttcatcgatttcctccatttacgatgattcgtacaaattgtgtgtggagcgagaaaggaagaaatgtcaaaaatcagtagcgcatgcgttttgtttttcgaggttgaaaggtacagagtacagagtcgtttatgggcactggcagaccagtgtcttctggacctcagaggattacactccaaacaactatttaggcgggaattagacagctggctattttattttagggaaattacaatttctatgattaataaaacacccaatatcaattttgactcctcttactaatttgtaccaattaattaatttgattacatgaacttttcattttactcttttgtttttaatataattttcgctaaaatcgcgagatctcatttttttagagtattctgtgtgttcgt

SEQ ID NO: 295013 - DNA, 2077 bp, Cannabis indica
tgacgtactcgtgtataagagccattcattccgtgggtgtaaggacccaatgaaggcttgaagcggggacgttacacctgtcggatacatttaggatttgggatttatttctttactttgttaaatcaccatttggagattaaaaatatttctctcacctgttatatatcgggtcctaacagtttttaactaactctcatctttatagaatattttagtggattcttgttctgctacaacaaattcttcttccacttttttgggtgcaagttgttcatagtgattgaagttagggatgaagctacattgagaccttagtctaaaaggagttcagatttaatgttgatgggatttggcaagagtgaagcaagggatcttggctacatacatctaaggggacttagatgaagatcttgattgtgtggtcaatatcttagggtaaatttgttgtatatgaataattttttgtttgctttaagttctgatgagttcagaactggtttttgtaacttgactttgattcttagtgaatgttattacccttgttttggagaacctaaacactaatcaactggaatgtgcagacgaagcttgtaaatttaagtgttcttgatttactttatgcatttaatttgttttgactattttacactactacaaaaaagagctttaaaggcagattttatgggcatttggtgtcaattttggtaaaaattgagaccgtagttgtttcaggcgacactgtaggtgggtcttagtaactaatggcataaggggaatgcgtcgattattataaaataattgatgacataggaaaggccaggtagaaatcaaagtggatatggcgttagtttaatttgtaataactgacatcgtagtggctatacaccatcagttattaagaaaaaattgacgctatagtgtctttgattttcaatgaaaatcgatttatattttcagttttaaaactatataactaaattaaataataattatattttcacaaatatatatgtatatatattttactaatttatttaaattaaatataaatttcatacaactaaaaaataaatgaacaatatacttaaatatattacacaaataatttaaaataatttggcttaggtgtgctgtacactatctatcacgcagttgtggcaggcctgaccactggagttatcgtcaaacaaggagtaaaggatttatgggctttggttcaaaaaatgcaaaagaactttcgaatgttgaaaatgatgaacaaaaaaaaaaagatgaatatgctcttaaaacttatttatacacctgttgaagtctttacaatttgaaacaaatggtccaaattatttctatcatgaagcatcttttgattcgacgaatagggagttgaaaaagttacatttaatgatcaacccaaatatttaacgttcatcattgcatgtcttaggtgatgttcttattaaaagaaaggtcatctcaatcaacctaccgtcgttgtaactcctcacaagaaacatgtccccacgtgcgtatactgctagcaattgcatttaaggctccacccttgtgccatgctaataatacttacggttagtgaccaattaactgacgacgtacaactcgtggaatgtgaagtgatcttagacaacaccatgtgtcaagaattgtcacgaagaagctggggaaaattacaagctcccagattgcgttatgtcctcagagcttggggtagatgttatccgtattttttgcaagacatgacacatggattttaatggagaatgccaaattgatcctctattaattaaagtcctttaaatttgctctatcgctagaaggtctccttgaaccaagaaccatcaagaatgaaggggcacgcagaaacttactcacgcctgccttagcttccaagatgtaggcgaagcatatctcttagacccagaagggtctaacagggaaattagcttggttcatgtctggataggcagtgaaatgacctaaagcggatgtcgatcctcactgggtatcatggatatcgaccttttccacacgccaggtcaccaagtgacggttatac

SEQ ID NO: 295014 - DNA, 1234 bp, Cannabis indica
gcttgaatcatggcaacaagttctttgttcttcatggtggagatgaagatacaatgaaagcaccagtgttagcataaaaagccttcttcgagacaaggccaatgtccaaagcaaattcttgctaattcgttcaacaacaacaacttattacaatttattctctttatacaaaaaatttagggaaaataaaataacaaaagcaagtaagtttgcaccacaatcatcaacactcaattataacaaactcttggagccagttgggtctaacgcgcacacgagttccacgtgcaggcactctctcttcctccatggctgattggctttcttctttgctaccactactgtattcagttggggaagtcggatcttccatttgggtagcatcttctatccatactttggctctctcttggatcactcttgggtctaatgttattgggcctgccatttgggttgggctaacaatgtaatatatgcatacattgcattattttgtttttagagacaattccatataatgacttgatgattaacatatatgttatgatgttaaaactttaataagaatttttttgtattgttaaaactttatagatggatttttaaattttggtataatatttgataatgatgatagtgtaaaccgctcaaatcacgccacaccacactatatttttgcggtgtggtttttgctggttgtagtccgagaaattataaaaatcgcataaataatttaatttaaaaacaaaatgttccaacccgtaccaaccacaccgcgaacacccccttacataatgacatgatgtcgaagggttctactaacactactgctttcgacctttaattttgttaaatgtagtattgttttagaaaaaaaaaaaaaaaatacatggtgcggaagggacatgatgcatgcgtaggataaatttacatctgatataagcacaattgatattctttttaatatttttgaagaaaataccattctcacttactacttgtcacaaggaatctttaagtatatacatatatttatgcgtgtttgtcacgcatcaattcaaactaatgttctctaaatatattctttttgctaatattagatttgaaaaaaaaaatatgaacgttaggtctaactatttttgtttaatatataaacgcttttcttataaaaaaaattgaaaaaaaaagtaacaaccatacaaaaaaatagtaagctctctcttattttttttct

SEQ ID NO: 295015 - DNA, 6044 bp, Cannabis indica
catccactcagtcctatttccttaagccctttttcaaatccagaagcttcagcatatttcctctcttttcgcgccaaaaccacccaattattcgatcacaaagctccaatcaagcagctgacaatggtttcgtccttgaagatgttcctcatttgaccaactttctcccagatttaccggtaacattttccttctcattacaatgtttctaatatcttcgtattatgtatatataggtgtatctatattcgtaaagattaaattatttttatatgtatatcagacatatccaaatcctctacaaaaaagccaagcatatgctattgtcaagtgagttttcattcattattttcccttatatttacttgcttatggagagtatcttgatcatttgttaggatatgagtccattacacattgagctttctttttccataggcaaacttttgtgaacccagaagatgcggttgcagaaagagtaagttgcaattgctccttcactttcagcatttttcttttgcttttacaatatgctgcccaattgggttgtggtgggttatcgtttttacttcttttacaataatgtttatgtggctttagattgttgttcaaaaaggtagccctagaggagtgcattttaggcgtgctgggcctcgagagaaggtacttattcctctgaagtaaattttgttggcctattttacttaggaaagtgcttcaatgtatcacccgtcaatttgcttttacacattcaagaaacacttattggttgttttattggattactatagctgttagttcattttctttctttttcaaataattttctacaaagattctggattaataaatgtgcccttttcttttgggttgatcaaaggatgatagaaagagttttttttggtatgcataggtgtattttaagtctgaagaagtccgtgcttgcatagtgacttgtggtggtttgtgccctgggattaatacagtgattagggagatagtgtgtgggttgaactacatgtatggcgttgaagacatacttggaatcgaggtgactagttatgttttataatcacatttttccaatgacctgcattatcaacatcaggagttgttgacctctttttgaataatgaaatttctcagggagggtatagaggcttttactctaaaaatacaatgagattgacccctaaggtggtaaatgatattcataagcgtggtggcacttttcttcgcacttcgcgaggaggccatgatacccaaaagatagttgataacatacaagaccgaggaattaatcaggtagatcatgctatcttttgcttaactttttgtgactttttatattacaggggcttaaataacccatgctactcacacacaatttcctactcaatagtgcataaagaaaataacatgtattgaatgaaatgaagaaatagagcaaattgacaaattttggtttaggtttatatcattggaggggatggcactcagaaaggagcagatctaatatacaaggtaactgttcctccagggaaaatttgtttccttcaactggtgttgatgaagctattctatagcatgttatgacatgaatatattttgttcaaggaagtcgagaaacgtggtcttcaagtggcagttgctggaatccccaaaacaattgataatgatattgctgtacgtgtgacttaaccaacatttatatttactatttatcattcatcttaattgagcttgtattgctcattttataaatcacagtttatatttaatatttatcattcatgtcaatcgagcttgtgtttccatttccttcatgtcattctccattataaaaataattattttctcctggatgcatgaaagcatcgtatatatttacctcaagttacataatctcattttagtcaattttgataaatcttggagtttttatattttattaatcttaaccaacttccattaatggtttttttctcctgattgaaatgtattgggaatttagggttctatcttttcaaattataccctttttatttgcatcattccatctttgacaagatgcacttgtcacctataggtcatagacaaatcttttggttttgatactgctgttgaagaagcccagagggctattaatgctgcacatgtggaggttgaaagtgtcgaaaatggaattggaattgtcaaactaatgggaagatacagcggtaagtgcttcaaagtacttaagtgtggaaaatggaattggaattatcacctttcatagcattcaactcattttattgctgtctatttatttttttcattgtcaggattcattgctatgatggcaactttagcaaatcgtgatgtggtaagatctttatctgattgtgcagatatctgttgacacatccttttatgtgataacaaatcaaaaagtcactagatagatgagaagtaatacgttttggacacacttttctagttggggacatagagaatttttaggttttattcactgtgttacctaccattttgtgcttatactacaagtcagttaaaattgattaactgatctggttgttaggtgttgggaatattctttcaagttgacgacatataaagaacaactgacagttgctgtgacaggattgctgtttgattccagagtctccattctatttagaaggccagggtgggctttttgagtttattgaggagaggcttaaagaaaatggacatatggtaattgtgatagctgaaggagcaggtcaggaatatgttgctcaagaaatgcaagcgaacgtgaagaaagatgcatcaggaaacaggctactcttggatgttggtctgtggctatctgacaagatcaaggtatgctttaactttgtgaatgtgcactccaaaagccacggtgtggtttttttcttctcttttttgtgtatacttattatggtgatcttcctggagattattggtattattttttgattttaaggtacactgtacatctactagaatttgaccttaaggccattttgatcttaactagctttcaaattattacctgcaggatcattttacaaagattcggaagatgtcgataaatatgaaatatataggtaatgtattctatccggaatggcattgggcaatctactttgatcgtgttagttctgcctgttttttcgtatattatactggttaagaattaaaaaaagaaaaatagcctttcaaaagttacagttgacgaaactttgtgatggctaggtttggtaatagcaaattgcgtagttgtattaaggatccatatttttctccaacgatgcttgctatgaattagttactttatttagttatatgaaactctatgcatatatatgaaagtatgtctgtctaagatgatccccaaatagaaaacttgattcctttgggatttattttctctttacagatcctacttatatgatacgagccattccaagtaatgcatcagacaacatttactgtactcttctcgctcaaagtgctgttcatggggccatggctggattcagtggtttcacagttggacctgtgaatagtaggcatgcttatattccaatctccgtaagaactttcttatgcatctattcatgcatgtctttcaactttttgctatagttcagaagaacattaagtcctccaaaattaatggaaacaggttttagtgtaaaaataaattggctagctataattctgaaggttagaaaataattaatggatacttatcatctctaattttataatttaagtcacccttcttatagaaaatctaaaatagtgaaaagtagtgcttttagcttggatgtggtatgtattctcttgtattgaattggatgatgccttcagtgttaatgtccaattaagagttctgtagtctgttattttatcatgactggctcggtatggtttcgcagcgtgtgaccgagacacaaaatatagtaaagttgacggataggatgtgggctagacttcttgcatccacaaatcaacccagttttgtggattgcaatgacatctcacaaggaagagttagtggggagaccaacaatgtgatcagcagcaccaagatatcaaattcgtaatttttatggagctaaggtctaattcaagtagaccagcactattgagtgtgcggattattccttagtatacctgtttaatcctgctcaaattcatttagaccgcatcaatgtacaactttgcttttactacgaactgattattttattgtgttataatatgtgtgtactacgaacactgcttccatctcccaaattgtactgaataatttggttgtaaaataattccttgcccttggctattgcatttatctggagataatgaaattaaacgtttgattctttcacatgaatcttgaaagaaacatgcttacactgttcttcctactataatctaactaatactatatattagtagaatatctgagaaatccacgatttagtatattcgaatacaaggtggtatcttatgagttttttaatattctgaatcataataactgggatagacacagtgtccatttgggtatgatgtcatatggataaactctggtgatgtcagcaataaatttggaggaaactattggctttgtctgacatcactccctcccttagctgttaaattccaacaagttgcttcttgtggccactattttatgagctctctaatgccctagttgcccactagaatggattgtatgttgatgtgtacggactacggaacaagcaaacattttttcttataaaagttattagggtccacttgggtttgtaacttttacctattcaatcactttcaattgttttggccactattattattagtactatggataacatttctaaagtccctttcttaattctgtataggaacttttgtaatgttgctaaaagtttgctagttgtagtagtagcaaataaatagtgatgagtggggacaagatgattttgatggacttggtagtagactagtagtggttcatgtatcatttcttccgaactgttcatcgaaaacatgtcaaggctgaaatgaaatgcagttattgttagttacccttcttttcttctatgacccctaattaattgtaagactccatttctttcttttacccatttttttttgttttttttttgttttaaaaaataaaaactttatagttttggatatgtttgcattgaaatcagggaaagcaaagaagtccatggcttgacaaatgagataggaaatctaagatgtggaaatatcataattattgcttgcgttaaagatggcatattacatcacaattattacatatgacacatcctattaaaatttttaaaccctactaacttattcttttacatcaaatatatatctatttttattaaaattaacacaaatacagtaaaactaaagtaacattaaagaaaattgataagaatgaattaagaaaaataatttcactttttatattttttatttaatgaggtgtttttatatatttttagtgcaaatgtactctcttgaattgcataagctaaatgttaattttgttcttacatatatataatcattttttaaggaaaattaagtgacaaaattatatcaatagcttcctaataaaatattgtaaagtagttctactgtcattcttatatcaatttttaaatatgtaattatttgcttatttgacctcctaaaacttccaaagggcagggcaatattcacaaccctcgaaagcttctcatgttgttgttcatttaaattattttagtgatttctaatataaaacaaaactagaaacctacaactcaacctagttgtttaaattcttcattatgtatcagcaaaaaatattcttcattaatgtctcttttatttatttaataaaagatcttttgatgcttaatttctattttttttaaaaggtgaaaatttataaattaattgggacaaaattcaacatgtcaagttaaaacatagtcgcatatattttataaaga

SEQ ID NO: 295016 - DNA, 4911 bp, Cannabis indica
ccaatacaatagttgttgttgttgttgttatttttttgtgtgagatgatgaccgtaattttgaatgtcgtagcaactacaaataaaatacaatgatgataacggttatctcaacttttttttttagattatttattttgtgtgagtattctttagattattaaatagaattattacctaaaaaatataaattgtgcttacttataaaatataaaaatataaaaaatattacagggtttttaaaatttggtgtcatatttttcaggctagtccattttatgtttacctattgtgactttcatgtttaatcatatattttgtcaaagtcgtgttgtgttaatttataatttcatactaaaaaatccaacctgtatttacgatactaataaaaagtcataaactgtggtcacaaacaattgggtacagatagaaaagaatctaggaaagtaataaataaaatggaaaaaaaaaataaagccatctgaaatcgggtgggcgtgggagaggagcataggattccagaattttctcttatagtaaccgcggtggtgagcacgctttatcgccagacaagcacacagacagctccttattagcgtctaaacccattttgtcttcatctgcctcttcccaaacccaaccgcaacctcttaaccttctcagtctaccatttccttactctctctctctctctctttccaatggccgacgacactcctcccgctgctcctcctgtcaacccaccaccgtcttcagacccccttcctctaccgctgactgaaaccgaagaccctccttctctgccgccccctgtaccacattctccggctttagatctctccggagcccccaatgaagagccgccggcttcaggtcctgctccggtggagcttgagaaggaagacccaacttcgaaactggcgaccaaagaatcggagccgattgcgcttgcgacccagaaagcagaacagtcttctgttgaagctgaagtgacgccgtcgccgactgcagtagttgtgacagaagagcctttagctgctgcagcggtggcggcggaggctgctgctgaggagtctgaagcgaaagggaaattggaagagtttttcgctactgattctgagaaatcgaagcattcatcagatgatcgggagccgaagattcctaagtctttgatttcgtttaaagaagagagtaacaaagtagtcgatctctcagattccgagaggaaggctcttcaggagctgaaacagcttatccaagaggctttggattccaatgtattcactactgggcaattagctcctgctgataatgcttctaattctaaacccacctctgatcccaatactgaagagaacccagaagcggaaaccggaaaagtagcagaagaagctccaaaagtggaaacttctgtggaagaactttccatttggggtgttcctcttttgaaggacgataggactgatgtgattcttctcaagtttctgagggctagggactttaaagtgaaggacgcttttgtcatgtttcggaatacgattcgttggagaaaggaattcgggatagaagagcttttgagtgaggatcttggggatgatttagaaaaagtggtgttcatgcatggaactgatagagatggtcatcctgtatgttacaacgtttttggtgagtttcagaacaaggacttgtatcaaaatacattttcggatcaggaaaaacgaacaaagttccttcggtataggattcagttcttggaaaagagtatcaggaagcttgatttcacttctggtggtatttgtaccatctttcagattaatgatctcaagaactctccagggcccggaaagtctgaacttcgactcgctacaaagcaagctctccagttgcttcaggacaattatcctgagtttgttgctaaacaggtttccctcattgtgttctgtttttcagtcttcacttactggttctgatcattcgttttcaattgtctaaattaacattttgtcttggtttttaaggtattcatcaatgttccttggtggtatttagccttctacactatgatcagcccattcctgacccaaagaaccaaaagcaagtttgttttttcagggccagctaaatcccctgatacccttttcaagttagtaaatacttttttattgtcattacttattggtttatgaatttagtctacatttccctagtgtgtgcttcttagtttggtttttaatctgtctttcttttttattattataattgctaaatttaagtttaaaattccattcaatacagatacatttctcctgagcaagtaccgattcaatacggtggattaagtgtagatttctgtgattgcaacccagaatttagcatttctgatccagtcacagaagtatttgtcaaaccaggaactaagcaaactgttgagattattatttatgaggtctgccatttttctctttctgtctcataatcttttcctgttgtgaagtttatattcatttagttgttagtactttgtaattgtcaaatttctatcactgtgatggacgtttgagggggctcgttcttcttgcaacgattttttgtgtcagtctgagacgcccaccacattggctggttgggtttataatcgttccccaactgtttctaatggtgaaatgggaatggagtcttatttcataaagcctgtctatcacttaattgtggaagcaaactgctagttgtagtttgaatctgttttgcttgatgtctggtaagcatataatcggaattttcggattgcagaaatgtgtcattgtgtgggagctgcgtgttgtgggatgggaagtgggctatggagctgagttcgtgcccaacactcaaaatggatacacaattatcatacacaagtcgaaaaaaatggtcccaagtgatgaaccagtggtgcataacagcttcagagttgatgaactgggcaagatattgctgacagttgataatccaacctcaaaaaagaaaaggcttctctacaggttcaatatcaaacccctctcggactgagggttcaaatttgaagtacttcgatctttgcaggatccatacagaaaatgaagacaaggaatagcttctcccattcatttgtcatcttcattttcataaagtttggctgctaggtgctttgtgtattggggtttcctagtagccatcgtatcgaaatcctaaagttgtaatatttggatttaagagtttagtaagttcccatgtaacttatggtgttggtgggtttccatggtgttactggttttatgctttttgcgtgatatatatagacaagaaaagtgagagttgcatctggaattgaatgagtctttttttgggggatcgtgcacagaatcagaacttctgtactttttggtatttgggatcattgagtgtgtttcaatatatctactttatatataatggatatataaatatttcttgttttattggttcgttaattaattagcacatacattttgtttactggctaatcattaaagcatgttcaggctattattatttgggtatataagatacgaatgcttccttttttattttgttctcttttattctttttttcctgctacacaaatgattctatttggaagaaagtggccaaggtctttaatcttgtttcatgccatttgaaatagtttctccaatgtcacacaattctatggtgctaatttctcttccttgtttttttttccggaagaatctatggtgtcatgttcatgctttcatattccctttctttgtaaatgttttcttgttaagaggatcacaactctcataaagataaaaaaaaaagtacaagttgcatctgtacaattatagttagtatatacaaattattatgttagttgttgacttgccttgttattatgacttggtgtgcacttttattgcatgagttcttatatcttaattgtcatctttaccatcttttagtagctttgttttcatatctattatcaacatttggaaagtgtggtaggtttggtttttcatttttatgttttacatgtaataattttgttccttttcgcaatgatgacgagaagaaaataatacaagtatcgtcattatttgtcagcattcttagatggtgcgttagttttgagtataatatatatgcatttgatgttgtaccaaaccacacaagagtctaagactagttgttgtaccaaaagtttcacacaaggagggttgcttaaatgttcttcatttttcggttttttttttcggacacaatgatttgacatgtagaagttagaaaaaattacacaaaaatacaaaaatcaatttttattataaatataccctcacaagggtagataaacttgggaaatttgaatttctatgcatgcattaggggataatttttttccctaaactaatacttttctacattgaaaatatatgactacatttccaaaaccccaaaaatactcctctcaaatcaggtccgcgcgtggaatttagctcatttatgggttatgaaggttgggtccgatggtgtgcccgatgcccgtccgatggtgtgcccgatgaacgtctgatggtgtgcccgattgtaaaccagtttggcttattttttggttttaaaaatcgggtccaatgtgggcccggtgcccgtccgatagtcagtccgatggggccagtccgatggggcctgtccgatggttgggaacaatgggaggggtattttggggtttaggaaaaagttatcccattttacaaattatgcatagtattagtttaggggaccaatttatgagtttattaagcatggaaattcaaatttcccgatgaacttttctatttttttaatatttatttaccaaaatacattttgcgcacatcatgtgttgggttttatgcc

SEQ ID NO: 295017 - DNA, 2505 bp, Cannabis indica
aactacaatatatatatataaaattacattttattttataatgtaggatgagagttgtaaaaggagtcgttacaatattatctgattctgaaaactaaaaatgaggaatttatcaaaaaaatattaaagattgcacacaaatttttcttctcatccaaattctgcaactttgagcgtccgaatcatctcatatagtggactaagatccctcctcatcatcgtttgttatttttctattatttttcaataaaatttttaataaaaaacagaataatattttaattcatatattgttaccttgattttttttatttcctcatataattattattagatattattattaattactgtttaccgagatttttgaaaactaattaaataaaatttttaaaattaaacaattgataagtaactaagacgaaggatctttacgtggttcggacattaattatccctagtccacgagtctgtatattgaccttataggcttttcaaatatattacaagtggtgtttattacaaaaaaacccaactctgtttctctaggtttctcttaaaaaagaagaaagcttagaggatattttggcagaattcaactatctttttttcaatccccttttatgaagaaatgaagggatttatacaggttaaagtttggcttcgggcatactcgtgacacgtttagggttttgtaaaaagcttacccactattgaggtaaaatacattataaacatgactattgggccccttagaaggtttcttctcgtggggcgatagttttgtacaactgggaccactattggtgtggggtacatgtcgggtaaaggccacgcctgacagaggagccgtcagacaaaacgtggtattcagaagaggtgcacgcactacatgctctgacacaagggataagctttgtcttgtggtgaggagctaaaccttttctggaccaaggcctcttccaagttcgccaagtcttctcgcgacctccgcaattagagagaattaagcaataattactttgataatcatctcttattttattttccacgtgtctctactctggaaacacggataatatttacccccaagcttgcaaaactcttgagtgacagaagcttgtagtctccttctagatcatcatgggacacttgaacacatgagtagttttaaaaatgtggaagcgtttctttccatcttgaatttggcaactgaggagtcaagaacttttgtgataaataattgggagtgtgtgtgcgtcgcccatcctttggatccatgaatgccatgcgctcaaaggagggcgtgtttgttgtagaggaacaacatggcagcagttataaagtaacagcctcaattttactaaatggcattaactataatctttttaactccccatccgttagatcacctttgtgttttagccgagacaatcctgtcctttgattttgaatcatatggatcaacatctttcactataagtaggtgcgaagtggcaattatttttcttttcaacatctttgagcttttgaacaataacctcctatttttttaagaagaagaactgtaagaaaaaaattcctaaaaagccctagtctcactctttggtgaatgagcgaacactgcgacgttctcatccaccgtcactacaaattcgagtgagagagtttccagaaacactgcctctaaacccaattgtgaaccacttctagtcattagagacagtcgacattcaagccggctatgaccaagtccttcactgggctctcgacttcaaggctaactactctcatcctccttcatccctatgtcgtatcacaagtaagttctccatatttttgtcctaccttttctttttattctgcattgttataggaatttagacttgagcattgatttgatgaattacttttttcgtgtgccgatgctaagatgatagagtaggctttgtgggatagtctgatgattataagcctattgaactaccaatgcatgttatattttctattatagtaggtttgtaacttctatctatgtaaataagttttggaatcagattgtaccctaagtctcctcttggagccattagagcttcgaatagggttgtttcctaattttctcctttgtaattctctatggactcccgacctggtacttggaggtattgtttcatgagaactgtgcctctaggtaatgggtcttgaagggacctctctaagaaattttagggaggccttcctcaatacccttgccgtccttaatatccaaggtatttaattgcttgggttattttctttttttctagtggccaacctcaacgatgagttccaccttgaggctgtggacctcaaggaaaataaggttagggctctggcttaggagccccaaaaagatactgccccaaaatagaagtaggagaaggtaaaggcctcacccccagcacctgtagtatttatgtaacgtccccgcttcaagcctccattaggcccttacacccacggaat

SEQ ID NO: 295018 - DNA, 2735 bp, Cannabis indica
taagcactaagggaactctctaggaaatagctttgagaattatcaagccttagggttttctagcaaagtgctttcttgatagaaaactttttctctaaatgagcacattagactcctttatatagtgtttaggtcatcacacttagaattcaaacacaccatctcatttctctcatataatgagcattaatatagtttgtaacaactatatttcataacatttgaattccatcatcaattgtgtaacacctcttttattacacaaatatgatcaaccaaaagaagttacaaaaataattaatcttgtaactcctctccatattacaaagtgtaggttataattttaggttaaataaattatatgttacacaatttattcaccaaacacttaatatatattattaacataataatatatattaccatattttactctacatattatattattatataatataacaagcctacacattacttgatttacaaagcaatcaaatattccattctggagatgttttttatgaatctatcttttcattgcaaaataaccacaaccatgtcaacatcaacaatttcttccaaagacacatacctactactactgatactactgctacatctagttcagattctcctaacctcactactaccgatttcactccattacaatagccatctaaatccacaattacaaccaaaacaggaagaacagttaacaactaacttatctccaagactatacttatgattttatatcttctaacaacaatactacctatcctcttgctaactacctttcttatcacacattttctaaactttttacaactgccatgcttgctattgctcaatgtttagaacccacttcttatgcagaagcttccaaacataaaatctcgaacactgttatggatgttaaaattgatgctttggagaaaaactacacctagatagttgttcctctgcctccaaccaacatgtcataggtaataaatgggtgtatcgaatcaaatacaatcctgatggattagctgaaagattcaaagctcgcttagtagacaaaggctacaatcaacaacaaggtatataatttttttgatacatatgctcctgtagtaaacttcaacacactgaaattattgtttgcacttgctgccatcaaaaattggcatttacatcacatggacatcaacaatgcttttctccatggtgaattacatgaggatgtttatatgaaactaccacaaggttacactcccagaggagtgatacctaaaaatgcaatatgcaaactacaaaaaatcttgtatggcctcaaacaagtatcaagacaatggtatgctaaactaagcactaccctcattaaacaaggctttcatcaacctcaaaatgaccactctcttttcataagaaataaatctggggtctttcttgccttactcatatatgttgatgatattatagatggcactaataatactacaacattaacaacttttattgctacacttgatgctccattcaaattgaaagatctaggcagcttacgctttttcttaggccttgagattgctcgatgcaataaaggcatctctgtaacacagaggcctttcatttcacaactattacaggatgctagcaccattggcacaaagcctgtctcaactcctatggaaccaaacacaaaactcagtaaagataatggtcaactctttgagaatcctacaaaatatcgaagcctcgttggaacttattctagctaaccataaccagaccagacattagttttgctatcaacaagctcattcaatgtttacaaactcctcgacaacctcacatgcaagctgctataaaagtgctccagtacttaaaagggactcccggtcaaggtctattttttcacacaacattcactcaatctctcacattacaagcctttaccgatgctgatgggggaggctgtatagatactagaagatccataaaaggatagtgcaattttcttggccaatcattcatttcctcgaaagtccaaaaaccagcaaatagtgttgagatcctctactaaagccgaatatagagcaatgaccaacaatacatgtgaactaacctggttacattccatcctacaagattcaatatcaagttcaatatgccttcaaaactattttgagacaacactacaacaatacatatatcggaaaaccctatttattatgggcgcaccaacacgtcaaaattgatagtcatgtagtataagaaaaaattaacattggtagcctcaagatgaaccatgtctcctcacatgacaactgacaaagccactctttctttcttagtttaacaacattataattaagatgggtgtaaaaaatcttcgcactccaccttgacagggtctattagagttatcttaattagttaatcacgattaagttagttataataattaagttatcctctttaatcaattcggttattcaataatacaaattttttctttcaatgctcttttctaatattaacatcattacaacaacttgaggtaaaccctaattaatatgactttactacatatgtgcattgtacttaatttctatctagtctagttatatatagtctaaatatacacatattacacatatatatactttgcaaaaaaaaaaatacatatataagacaatttttttaggctaattagtaattttcccccccaactttgacatgtacta

SEQ ID NO: 295019 - DNA, 3464 bp, Cannabis indica
gatttgaactttaattcaatttttatatttatctcattattacaataattaaaatataactattaaatgtgagaaaaaataaacattagcacggtttggacgggttaacccgactaaactgactaattcaatgggtgggttgaaactttttttttcttaattgggcgtgttacacttagattttcgtaacccggcctttacattgggttaaataaaatgtaacgtaaactgaccaaactgacagatgtacacccctaatatggaccataaaaaccagcatatctttctaaggtctttctcgagttcccagctaggtgtgggtctccaatcataacctcaagcttgcatgctataggcgcaggctggagaggtgcattaccccgagctagagcttcagatcgtatataccactgaagagcagcatacttctgtctgatcagaaactctatctcgtctcttaactgattacactcatttatatcatggccgtaattgttgtgatagcgataagttattcatgttaactctttgaagggaggagttttgcggtacgacaccgttgattgggtggccatatggatctcttcacttggggcagatggtgaaacgaggttcatactcttgcatgggcttgttcccagttttggctttctttttgccatgggagtttacttgtttccctccgttattagctcttttgccttcgttcgaacctcattttcccccatcaccctgcagtctagtgttaagggttggggagtcttgcgatttttctttttattttttgagtccttggcttgagtgacagcttcttcaagcttgataaagccatctgctctatcaagaaagtcattcatagtatagactgacttgagacgaaggttggaccatagaggactcatctccttgagcgtagctacaagtgtcattacccttgcattctcgctaagtattttttttcttagcggttgcctctaagaagcgttgaatgtagttcttgagggattcatcttcttgttgtttcacatctattaaatcattgggttcgatttggagttgttgaggagtgaatttgttgccaaaagcagctattagttctttctatgaatcaatagatctagggggaagcttgagataccatcactgagctaagcctgtcagtgtggcagtgaaaattttgtaccagatgtcatctcttactccttccaggtcggtctgcactttgaagtaatgaatgtgagataaaatgtcttctttctcaatgtactcatgccatgaaggattattgaattttggaaggatcggcaaagctttgattcagtctaagagcagtgagcgttgctctttgtctagttcaaatataagcaacttgaagataatttctagcacgaataaatgcaaaagatatacaaaatcttgtcataatacctctagatcgagttgttattaagtttattttgacaaaaatcaacatagggtactattttgtactagtttgaaaaaatacatcgaccaatttatcatctaacaaaacagatagatcaatcgatatcttttgtaaaatacatgatccaaaaagtttaaaaatggatcaaatataaattaatattaagtttaagcctataaaatacattcaagggacgtttcaatacacttcttatatatttcagcattcataagagttttttaattaacttttgttatgatcgtgtacgttatactattgatttacacttataaattttcaaaaaaaattataaatagattacaatgctgaaaatgatgtttaaatattttattacacgcgtgattatttctttttatacgagtggtaaacaattatttataacttatttttgatactgtaaattatttataattttctaaaattttacaggcaaacttaaataactacaacgttcacaactatgaaaaaaaaaaaaaatataataaaaatactccttaatatcgaaacaaataaaatatgtaccgaaagcatttctttatgatagtgtactacaaatttttcttaaatttatatccaacttttttatattcttttttcgttggaaaatttatcgaactcttaattgcaatgcaataatcatattcaaaatgtaccatttcttcccgtataagaagaaatatttagtagtttattgataattttaaaaaatacaaattacaaatagtgaattttcttttaatcacatctataaatatataataatgtgagtagtactaatcatgatgatcatcatcaacaacaacaacatattttcataattgattcacttatgctcttttgttccaacaccatggaataatgttagaataacccttacaatagtttgaacttggagttggaggtgcttgagtattaggatcaagcacaggagaattaaaagtcaaaattctccttgcttcaacactgcaaatcatcatagtcatacccaaagttgcaagcaatgcaaagacaagaaacttggaaagaatggtattcatcttcaataatattatattcttaatttgatgttgatgttgatgatgataataattatgctatgaaacttagattatataggagattatatatagaattaacagctgtaatatcttatttataataacaaatataacagatgaagaaaaaacaaatattagttaatatagagaatttaagatgttaatgtgtggaagaagttaattgaattacctaatcacaatgaacaatacttcgttgttattattaatagcattattacttatattttttgttattgttgttattgagcttttattatgtattttaaaattaagttgtaaataaagcttactgaaaataattttagaaaaataaaacctaaaattaattaaatagaaaatgataaagtaagaaaaaacataacaaaaatatgtgtaaggaaaaaacaagttgtgtcaattgaagcttccaataaacattcgtcaaatttcataacattttctttaaaatatagaaatttaggcaacacatatttttatttgtgacttataaatacatttttatatttattttcggtaacctttatctttgaattatacaatgagacgagtaaattcctccgatcatgctactttagttaagattgattttagtttaataattttttataatttgaatttattaaatataaattgatttgataaaacaataaaaaaaaataatagtattttttataaaaataatattataaagtttagaaaatattttagagagccactttttatatgttgcaactcaattttaaattcttttcctatttcaattaaggtgtacctaatatctccaatggtactttttatttttttagctaaaaagttaaaataaaaaactattcttattatttttgcacctttattagttaatatttaattgttttaataatatttttgaatttatcaaatataaattaattttataa

SEQ ID NO: 295020 - DNA, 9398 bp, Cannabis indica
aaaaaataaaaatatatttatatttaggtaagaaaaaatatcatatgtttataaacttacaaataatgatcatgtacatgcacaagttggcttccgaaaatcactttctacttctcaataccctgctgtaaatactggatcaaatcgtacccagcagtggtccacttgttgtaagcatccgtgcagacgtggatcatgaaatttgcagcctcacgatcagtcatttcgggatgaaatctcttgcgaagattaccaattggatcacccctgctaaagcaaggcaatccactgtctagcattaactgaactgtgctgataatcccatccatataacggcgagctgcaagatatcctttgacgcacaaactgaggcacattgaattgaaagaaagaattcaggtaaaaatgaatacccaaatctctttaggaaaaagtcagttcagcatagagaaaattaagaaagaaacaaaacaaaggcctccactacctcacaaactggtgccatgtttcacttttcatgacccccgaaggatctaaaagttgagtcatttcatggctaagcttaaaatgagcactttcaaaccgcatatttccaccgggtgaagtttccaaaataaaaccaaaatcaatatgaacaagtcttccaacgctgcacgataggaacagtgtcagtactgaactttttgttatcccttctatacaccgaaaaataaaaagactattcaaacaaccatttatatttattgtcgttttgcaatttattcttcacctaaaaacctgaatgttaaaatcataaacaatacgttttatttttctctcaatattccaacatgattagagttataacaaacaaaactacacacacacatatacatacccgttaaaattttctctttgtcaacaagctatataaaagtacttaagaaattgtagaatagttaagaagatcatacttgtcaaataaaagattgccattatgcctatccttaggctgcagtaagaggctggcaactgcataacctgcactgctgatgatgaagttctctcgtgcagcttcaaaattaggagaacttacaggaccatagtcttgctgaaaaatctcatataaaccaccatcagtcgtttcacccatctgacttctactccgagtattaggcaccacctacagggtaaaattgatggtgagagaaatcatatgcaagtttgcaacaatacaatcacagtaccttttctgaaagaaattaaagtagaaagactagttttattgctggacatttataattggaatacccatgggattgagattgggtcatgatatttcacccaatatcagtctcatatgtagtctatatttgcctataaatagtgccaaatgataaaatacacaaaaaacgatatgggcagtagaattagaatagaacgtgtggtaaatttgcaaaagtgcacaaggaaaagacctaacaaattaaatacttcaaggcaacatacaaacatacctcaattatgcctctcccagggccagtcggaagtacaccataaggaaacaaataaagatttagtccaacagcttcaaatatatctctaagaagcgcaatcacttgaagagcaagaacatcttggcgacaatcatcccctaccttttatattagaaaactctagtaagataactgaactccatacttgtagtcaaagagaaatcataatatgggaaaaaattaccgtaacttcaaaatcagaagacatttcatgtattcagtttgaatttattcaagccaatacaatgaagtttgtaattaatttgtgatagcacaaagcattctaagaattaaaaccacaaaattacaaacatgggataagtgaacatttccaaatactggcaagttttgtttatgaatcttagaatcatggtaacaagttccaacccaaaggcaaaagaaaattgaaaatgtaagcgaataagcacaccttgaaaatgcaagcttggggttttacaacattgtggtctccatcccgatcaatcacattaaacgtaatcataataggaacttttgctgccgactgcaagggaattccactatcaacctgaatacccctaacaagcttgttaggagctgttggtagataaaggtcatctccttccatttcaattttttccaactctctgttcaagtgagagagattctacactaaatcattttaaatgaaatatatctctcaatgactaaatcatttaaagattgagaagtatacctcctaatacctgcccgtcgttcctctttgggaagtggaaaaaggacacctgaaatagatgtaaccttgtcaaagaaatcaaattctcttttaaacaagtcacgtgcctttggggagaaaccgtcaataatacgatccctaacaagtggcagcagggcttggaatggagtattctgaaatcagagtaaacacaatttatagtgcgtaaattactagaacaactaatgttaatatgaaaaaagaacaaaagaagggaaatctgggcctactagctgccacatattttagttaaaaaagatgctgcattgtgcaaagaacttcctacttcctagtataaaacatgttaagaaaatggtttcatagatacatgaataaataaaacactgtaaaatacaatgttttgtgacatttccgttctgagcaagtagactgattttcttatgctaatgccaccatcattaacatttaccattttaaaagtgtaaaatcctagcatccttttcaaaatgacaatttccctcgaaagacggtttagctgctccatcagattgatgcacagtttgtgtccactaagattattataataattttgctattattctgtgacacaggtgtaattgaaatgtgtatatttatttaatgaataaatagaatttattccgccccccccccccccactattacaaatgtcgagctttgtctcctgaactttttttttgttgcgaaaattcctctgaactcaaaaaaatattgtaaatatccccccttcttttacattctgctgaattctatgaacaattagttgatgtagcactaaacgtgactttaatctggcccagttcaagagtccaaacaaaaaataaatgcacaaatagtagtctaataaagaattatgtgactatatacgattcttagaattaatgtttgtatgcttagtgtcaataaactgaatttcaggtagcttaaagttgttaaatagaccttcgtactgcaactatacatgaagataagcatatggctttaaaaaatgagttgaatgtaactgaagggggatagttcaacaatttctaaagtttggggagattttttgcagcaaaaagaagtttagaagacaactctacaaacatcatagttcagggagacaaaaccatatttattctcatttaatagacaaatttgtacctcgatattatataaatatctttgtttccttaagggtacatttggaaagccatgaaagaatcggatttgggtgtaacgggaggtaattaggaacatttgtctgaccatactggaactgtgtaattcatgatgattgagaggttacagttacactctctaattttcatgggctcccatgagaattgagggttattacattgtgtaattactaaaaactttccactttatatattaacaactaaaaaatattattctcctgtgtaattactattttgccaaataagacagtagaaatttatatgaaattaccatttcatttccaaacatacattgtatttttaaaatgtagtgtaattactaataatacccagtgacttccaaacacgcccttaaaaatgattggtatctaagtttccacgtcaaggactttatttggtttccttatttagtcctacgaagatcttggcaagacttgttatcacaagtagttttcaagtcaaagggtgattttgtattaaaagggttattctttattctatgaattgtggtttaaataaattattgtgatattttgtttcctttaattttcagagtgtgcataattttggaagctttgaaattttattcactaatatattgatttgcatatgaaagtgttctcttgtgtcatttatcttttatgtgcttagcaatttttgtacaaaattctatagcgcatcacacatctggcacagcaaattgtgaatctgcttattttgtttctacttttaattaaaaggtcaactgcttgagtacttggtgacactataaaaacgagaatttcaagaaataactatcatactaatttgaaggtgtgtaaatggctcataagaaattgattgtaatagcagcacatcacacatctggcacagaaaattgtgaatctgctcaacaaactgcccaagtacttggtaacactataacaaacatatatttcaagaaataaatgacatactaatatgaaggtgtgtaaatggcgcataagaaattgattgttaagggcagcagactgccactttacaatgaatacaatgcacggtgcagacataccttcccagagccaacttctttccctgattctggccctgattcttcaccctgtcatcaaaatcttattattataaaccctggacctcctccccagaggggagaaaaagctagtaatattgttgttgtattaaatagaccaattacctgtaaatgccagattaaaatatgggcaaatatatcacttctttgagctgccctcagcaaatatccttctactaacctctggaaaatgttttttgtatgaattagaatctagtattgtgaaaacaaaatcgatgtacaatacatataacaaattatgaaagtctgcaactccaaaacatagccttcctttgttagagggaaaaaaaaagcaaggatagttcaagacctaaaagtcttcagaataactcaccccttcatcatatcgcaatgcctgaactagctgtggcatgaaaaatgttactctttcaggaggatatgactctaagaccctaagcacatatgccattacacgtggatgccctttaaatgctggagtaagaaattcgagagcttgtgtaatagaacaagctgcccagtgtggtaattgttgcaaaagcccagagttttcatctactgcctttggggtaacaaaataaggcaatacttcagggatgcttcggatatccaatatatgcaactgcaaggaaaattccagtttagaggctatgcagtatgataagatgataaagcatcagcaaagtttaatagaacaaggattctcatgaactactagatatcatgtttagggatgtctcaatctaggtgcatcaaaatatgaaactagctcataattttgatctggaatagaaagtcgttgccattaattttcaaatgacactaatcctttaggactatcctcactgttcagtggccattactttttttcccaccccaactaatcccacaggaggatacaccgtgggcccgccaggtcgcaggagacaacagggtcagagagctctacctaagtcagacccaactcacggtgcccttgccactaagccctgagggcactgttcagtggccattatcattggcattttcatgtcaactttaagaactaaactaagctgtgaaaattaatttcaacacgacacctatcattaaatcaccatcgctgtttccaatcacctcaacttgaataaattcaaaccacaataagacatacctgaactaaatgagttacttcagccttcaagaatgtgtttgttgggaaccttgatgctaaggatatagctatgcgaggatccacagagaaagcagtccttgcatattcaatccatttatctgagttaattttagaccgagacgacgtattttccctgaaataaaaatgaaaaacatcactagttacactcaaatcaattgcaaggttctttgtattttcaaaaaataaaataaaatacaagagagttaatagattccttgttaagtttacttagcattagagggttgagcccaaatttcaagcctatcagcctcatgctgacatagcatcaaaagtagaagcttccgcttttctcttcccacaacatagttctccatctggccccaaacagggtgatgttgaccgttctgcaattttgtaagtactattactttgtattgctatcaggtcatgcacaatcccaacaatataataactgaagggctgaactaaaatattatgtatctctatattaaaggtcctattgtttttattcagatcatatatcattaattaaaagcatttatgttctacatctcagttttacaattcaataatattaccacatcaaccacactgctcccattttcacgtgctcgtcccttagaatcagattgacttgcatctacacgctcatttgaaaggtagtgcacaaatacagatacagattgagcctcactctgggcaaaactcgtattgttggcatcataccattcaggcccaaaagcaaaccagcccaacgaggccctgtatcaaatccaatgatgactttgagaatcaaacagaagattgtgccaaacacaaattcagatagaaaaggtatacaaatctatttccaacagtacaagacaaccaaaatgcacatgccaacattatttaagggacaacattatctctagaataagtgaacaagacaatttgagaattcaagaaaaaactacatcaactgaagcgtgtagttgaagtttacacacaacaccctgaagccctgagtctctttgggattcaaaggaatgaaaggttggcagacttcaaaaattttgccgcatttgcttaaggagctcttgcttaagcaaaagctaaactaagagctcttgcttaaggagaatgaattaatctggatgaaacgtgttttggaagaacttaaaattaccagccctttaggattattttatgataataagctaactataaacatagttcctaatcaagttcatcacggcagaaccatgcacgcggaaatggattaacacttcatcaaggaaaaagtagaaggcaaggaactatgtactgtgtacgaaccaagcaaacaagttgttgatttgctaaccaaggggtacgttagtaaattatctcagaccgtgacaaaacttttctctacaaattttgggaaaaattattcaggttgcaaggctctaacttgaagaggagtacagcttatcatccacaatcagacggcctatctgaggtggctaacaagtgattagaaacttatttacgatggtttacttttaacaaaccaaattatcattggtcgttgtgggtagtatattggtacaacactttgtgccactaagccgaaaaaatgctcgtcattgtctatggtcaagcaccaccctacctcatatgctataagaagggcatattatgttgttgactcaattgctagaggacaaataaaatattagacaaacataagatgcatttgctcagagctgaacactacaataaactctaagctaattccaaacgtcaccataaggaatttgaagtggggggctttgtctttcttaaacattggccctaaagatagcgacgtttggcccaatgcaagtcaaagaagttgagtactcgatattatggaccctacaaaatcctcgctcgtataggaaaggtgccatatataagttggagctacctaacaccacctctacccacccaattttccacctcccatcttcggatttaaagttggtggtggaacccaaccagcttctaagtgtgtgcaaaaaaagccaagggcaacaaggggaggtggaagttcttatcaaatacacatccttaacagattttgagtcacttgggaagactacaacaaggaagatttggactcggggtaatattacactgactgtttgcctaaaatattccaagcgcaataaaagcacaagttcatggctgaatgtccaagtcagcattctttattgggtgaaaatttgtgtttatgtggttatcctagtcggcataccaatcataatccgactatttgtattaataaataattaaatagaacctaagtcaataaggagcctagttgattattgttctaattgtttagactttctcagttgggatattgcaaggtcttgaattgcttggaaaactttgtaactttggttctatttcacaataaagattcacataaagcaatcaccttgtgtgtctcgaacaaaaaaaactttggtttatacaaagagaaatattcgttgaaaatagatgcactagatacaagtcaaggacatgatgtagcatagaagactagattacaagtcaatgagtttgcatcaagtatgaagaagtaaatttctcacctgtagatacgatcttctagcaattgaagacctgttttaaaattcagaagatttccttgggattggcacgagcaaaacttcaggccaagaagcattacagtgaaaaaagtaccagtagcggcaggatgatgtgaaaagttccatgggagctttgttgacccttgtaacattcgaccaagaagtaaaagttgctcaacactattatgtcgaactacctaaggcagcatacaaaaaaatataatgtgaatcatcttaaaccacaaaacaaaagacattgatctacagcattcatagtaagatatgacacaatgaaaagtaaattatacatcaagataccatgtcaattatcatggtaaatatataaatattgtaatatgacaaatataattaaattatacatcaagataccatgtgtaacctaaggaactagaatagttaaaaaaattgtcaaagacagatgtaatcgtggtacaaaagaattgaagattaggattgcatcagtttcaacaaataagaagagaattatcaaaatttgcaagcatgcctactatcccaataaaaaggaactcatctattacatcatgtaccttcctcattgagcaaaatcatatttggtgcaaatattataaccaaccacaactggcacccaaagaaatacacatattgcaatttaacaaaccatgattgtatttatcttttcaaagctgaccctattaccaagtgttcaactcaagcatctatttgagcaaagaaaggatcacagggacataagttatgtaatttcatacctcaaagcgatcaatgaaaaaaccaagccacagtctatgagccattatttgttcaacgggatcaacttcaggtagcccttctggctccccaggagcaaggtgaggccttaattttgcagctggcccagaatacttcacatcagatgcaaaaagaccccgttttgtatcaattgtccacaaccatgcatcaacaagttcagcaaggacaagagaacccaattcaggtgcagcagaaactaaccatgtccaaatgaaaacaccagtttc

SEQ ID NO: 295021 - DNA, 5552 bp, Cannabis indica
tggtaaaatatatccaacaggtcattacccgctatcacaagggggtcgaacctctataataaatcccattgtctattgtttcttattcttatttgtgcacacacgtggcaagcattagatctgtatgacctcgctgtcggttgatcacttttcaggatcaacaaatattaattgagtaaatattaaaatatttaaaacaacattcaactagaaataaaaaaaaaaaatataataatatggtgtcaaatttaaatttcaactttaatattcaaatacaataaaaattattaactataaagtctaaatttcatgttaaacactataaaatccaaactttaaacataaaattttttcactaataaacataatttatgtaatatattatacgtttttttttttttaaaaaagtataaatcgattattcggtttgttcaggttaattgagaggtttatattttttttaatccactcaatgtattcattgggcgtttaggatttttatcggattatttcgagttgcattttttttttcgattttttttttcagtttggtttgtgcagcttgtttaggcttgttcaagtagagcggtttgtaaatatttttgaacacctctactagtgagccatattgctcgtggtatgtgatattaattgaatcgagcctcaaatttgactatgactttgcatggagtgttgaagaagtaaccttagggtttcatcctagcaaggtcggttctaagttaatttgagccctagaaaaaataattttttttggcccttttataataataaatgatattttaaaaatcattagaaaaatatgtatatttatataaaaaaaaaaattcatttgggcccctagtataagttggccataggcgcaggcctagccgccttagcctaggaccgaccttgcatcctaggtttatgttagcactaacagcctttggcagtgctttcatgttccttgtcttcttccttctgtttcatcttttgtcggttggctgaagtcttatttgttaacttgtgtgtttttaaggtgtattcttgaagaccctcgtggggaataatgataaatatttatcgttatttttttttttttttcaaatttaggcataatattatgtattaatcacaataagtgttttcgtaatgttgtatataatatatttttaatcaaaatatggttgtagatttgtttaatccaaaatgaaaagtttaattttgaattaaaatgtcaaaagttaaaagttatgtatacaaaatatgatatttttgtaaatagctctaactacagccaccttacactaggcacactaacctgcctcgtgggaaagcctactactgtagtgttgggctggatggtctcctcaaaatccctctcttgcaggccgatctataaaattaagcccaactcgtatagaatgaaaacagaagaagaagagaaaaaaaagatttaataaaaataatggccgtcgtcgaccttgaatcgaccagaccaagaagaacaggacgtgatcggtagacagggagagaaagaaaagttataataatacatttctcgatcgcccctctccgtctccgatcccaacaatcatttcagaagtattattttcgtagtaatctattatacatacatgcgtagttattaatttcttctgctatcgcgttttccggaaataattttcatgagtttcatcatcttcttcttctactaccacgacattcttagatttttgaatgcgacggtcgaatgcccgaaaaccagttgattcaggtgtttcgaaagatatggatccgataaagcttccgatgcgtccctcaactcgatccaacctcttcgctcgcggccccaagcatggaaccagatccaatttcttgattctcgcttcaattgctgttgcaatagcttttgtattgctgtgctatttgtttgttcacgcccgaagttcgagaggttttgggaataaaaggtatgggattatcatcgatggaggtagcaccgggactcgaatccacatgttcgggttcgaggtggagggtcagaatgccgtgtttgatttcgccaacagtgggtcggtgtcgatgagagttaatccagggctttccgcttattcgagtgacccggaagcggctggcgggtcgttgacggagctccttgagtttgtgaaggaacgggttcctaaggaatcctggagggaaacagatattagactaatggcgacggcggggctccgcttactcgacctgtctgttcagaatcgaattttggattcttgtaggcggacgcttagggcttctgggttcaatttccgggacgagtgggcttcggtcattactggtatggcattggattttctgaccttagctttgttattatgccgtttaaccatgaaaaatttgatattgttgcaatgtcttaggaaaagaaaaattgctgctatggaagtaaaaatttgtaacaatttgttattacttcatttctcatggtaggattttagaaactgtgggtatatgtacttgtgtgaattcatcttttggagaaagacacatgaacagactttctggggaaatgaagccttctggtccagtgtcctgagttttgtttggatgacttcttaacagccaaccatgaaaggaattagattcagaattttccggaattggcttgtctatgacacctttatatattgttgagcataggaataggacttcatcatttatgttgggtgcaatttttgttgtccatgttgtcatatcttttataacatatgctgaagaataatgcaaattccttttcttcttcgtgaaatttatttatttatttattttttcattataaatccccaacgtttacttcaagatttgaaagttattaactgttttctagagaccaagtactgaactttacgtttgttttaggctctgatgaaggggtgtatgcttgggttgttgcaaactatgcccttggttctcttggaagtgatcctcttcagactactgggattattgaactcgggggagcatctgctcaggtttagttcaatgttcttttttccccttctgttaatattctagatcccattgcttatcttctttttttttcaccatcatgattcttgatcctacttagtcttcaactgcgctacaaaagtgtagcatgtatatataaggtccatattggaagtattccttcaaaatgtgtttcaaaacatgtcccttcgcctttcatactaacaaagattctatcgagcttgtaagcagtttgaattggattatatgagatgagtaatattgtattgattttttttccaggttacctttgttaccagtgagacagtgccttctgagtattctcgagctattaagtttagaaataccacatacaatctctacagtcacagctttcttcattttggtcaggtaaattgttattttatatcatttgtgtatatatatcaagttatcaacatgtttactttcacattatgttttgtgatgcgaacttgacttgttttctctcttttgtaagatttaagtggctgtagattgttcaaattgtagttgtagaggctttttcttgtttatttgagttgaagaacatgccttttcttttataaattctgttaaatgtttcgattagatcattttgatgcctgcaaaatcactacttgtgatattttgaatttaaactgagttatggttattggttgaaatgttctaacttattagtttgattctgcagaatgttgcatatgacttgttgaggcaagcacttaccttgggagagttcaacttaggtaatatacacgtttatttttttaattatgtttcatctgtctttaacaaaagttcttgaaacttgtatacatcttaggcttggactattttatgaaacaatactgaattactgtttaataaacaggatagtctttcattattcttatattttccccatcaatgcaacagctaaatctgttcaggaggggttgtcaacggatccttgtactcctacaggctattcacacagtgcagagtcgtggaagctctctcctgctttgctgggtgaaaaaaaaaaatatccacccactcttccatctaaagggaacttctcagagtgcagatctgccgccataatgatgttacaaaaaggaagaggtaagatgatttggtttttattgtgatattgcacctatgatggttgttatttattctaacaataatgtcttttcctgtgatgcagagaactgctcatctcaacactgctatataggatcaatattcatgcctaagcttcaagggaaatttcttgcaacagagaatttcttccatacttacaaggtttttgcctcatataatctttggtcaatctccatgcttgtttacaagtgctctaaactgtggattcatctgtgaagaaacagttatttcttttagcgttcttgttttttccttatgatttatatggtgcgtggatgctttcatttctgataagttatttttctattttctttgtgttagttctttggtctgggtcaaaaggcatttctttctgaccttattatggctggacaacaattttgcaaagaagattggtcaaagctaacgaagagataccacacccttcatgaagaagatttgcttcactattgcttctcttctgcttatattgtagcattacttcatgacacttttggaattgcattggatgaggaaaggtatgttactatactacagccatacttccttcttttaggaaaaaatgcagagacctaaatattttatcattcttcacctgaaagcttcagtccatttcccttacaacagtcgttgaagtttgtctctgtgatgactgttgcttttttctgatatattcagggctacttgattgtcttgaaacctaaagaagtgtacagccctcaatatcatattattgaagttggaattatctaactatattttcaattgttccctacccacttttacatgatgcttgcatcatgtgtatatattcttgaaatttgagttcatatgccattgtgaattcaattgcttaagtctattattgtttgtaatttttttttaccaggattgcagttgccagtcaggtggaagatattccactggattgggctttaggagctttcatcttgcaaaccacagctgatttagaattgcggcactattattggattgccaatattcttagtgatgacttgcacactcttatatcactaattgccatatttacagtattgatgtttacagtgtggtctatatcaaagtggaggaagccacagttgaagacaatatatgatctagaaaaaggacggtatatagtgactcgtattggtaggtatcgatagattctttagaaagttatttttactgtccctcatccagatttaggattggtcttattctgatatttcttcaaaaccacggagagcaaactcattttagaatctgggaatatggtgaggatcaattatctcaagtttactaatcatagaccatatatatatatatatatcaaaaaaaaaaagaaaaaa

SEQ ID NO: 295022 - DNA, 1820 bp, Cannabis indica
aaaataaatttccaacagtaatacccacaagggacccatttattttaaaacaaaattaaattatgaataaaaatggtaaattgtataaaaatattatatatgttaataatttaaaatagacaatactatctaaaataaaataaaaatatttaaaaatttactaataataaactacaaagcacataaagataatatatgataattaaaaataatattataaaataagtaaaaaattaaatgggtccccatcgaggggatatctccatccccatatgtgtaacattccctgttctccccccatttcccatttaggcgaggaatccttacccggcccattaggggcgggtacccatgggccctaatacacatcggtgcaatttccatccctattgccaatacaaggtacaaccatgtataagattgtatagaaactaagagattgattggcttcataactaaaattttattttcagtttataaaaatagaaaataatttttaaaaactaatagagagcatttggccaaattttctaaaaattgttttttaaaaattaaattttaaaaaacaaatagaaaacatcaaaatgttgttttttatttcaaaaatatttttttgcctgacatattcttttttacatttttgctcacatacttgaacttgtatcctggacccggacccagaatcgaacccgaaccctgatctggactcggtccccaaaccccagacctggaccttagatcctagacccaaactccagacctaaacacatacccaaactctaaccccagatctggaccccaaccccgaccccggatctagacccggacccggatccaagtccaagatttagttcgaggtgggatgtgttcatgtcatggttagggtataggatattgaatttttttagtaagaaaaaaatctaataatagttttaaaaaatttgggtcaaataccattaaatttttaaaatgacaaaagattattttctattctcacttttgaaaacacaattctgaaaattaaaaactaaaaacacaaccaaacagctagcccttaaagatgttgaaaagtgttttaaagcataataatgagcatggtttcaacaatattcagtggctgacacacaaaagcatgtcaagttcttatatagagtcaagctaatctcaaaaagaaccttatatgatcagctcttagatatggaggcaagggcaagacagaaatacacaaaggtacaaaaaacttatgtttatttatccgggtggcaagagattatcatgattgtattgcacgattagataggaaacaatgtaacttacaaaaggcatctcaaggcagccgacgaggaaacaagggaggcaagacttcgtgagggtggttggagcacaactttcacgttcagcttttgggtatgacgaagagggaaagacaccaactgctcgttggctttttgatattgataggccttaggataaataaaaagggcatatgtgtaattgtaatgggataggagtattatatataggaaagaatagtgagaaaaagggtgtgaagaatttggtttagtttgtaactttgggagagaaccaggctctcgaaattctgggtattaatgaaaggcattccgccatttttatccaaaaactattattcttcctctattttctgcaattgattaattttgataggaaaattcctatcaaatggtatcagagcacaagttcatgggacctgagaaggacactagtatggagctgatgggtgaaagaatggaggccttccgctcagaaattctgtaacaccctaactaccataggcgtat

SEQ ID NO: 295023 - DNA, 1758 bp, Cannabis indica
taaattaatgataataacgtaatattgggatgtcactaaagaatttcttgtatttctaattaatgctcttcatgtcttgttcctccttgttttttgtaaaagctaaagcttttgcgatcatatattattataatcaaactttattagcttaaaacaacctttatgataggattatgggcacaaattccaatatgcatacattctgtgtaggaaaataggatttgtgatcgtgtttttcttttccttttttaagattgatgaaggttcccagaatagtgagaatctccttgaggaggaaggaaatgaccttgagaatgattgtgagcagttatttgagattgatggtgatgaccatgaaaatggaatggatgttaaaaacgaccattattttgacattgaaagtaatggccatgaagacgatggagatgatacaaatgaacacttgtttgacattgatggaaatggccatgaaaataatgtagatgaacaactattcgacattgaaggcagcggacatgaagacaataaggatgatgctagcttagttgatgacggaagtggtacatctcaaaggaaggtttaccccccacctgttgtaggaatggagtttgaatcttatgatgatgcttacaacttttataactgctatgctaaggatattggatttgctatacgggttaagtcgtcatggacaaaacgtaacagtaaagagaagcggggtgcagtactctgttgcaactgtgagggtttcaaaacagttaaagatgctaacagtcgtaggaaagaaacaagaacaggctgtctagctatgataagattgagattagtggaatctaacagatggagggtggatgaagttaagcttgagcacaaccatttgtttgatcctgaaagagctcaaaactccaagtcacataagaggattgattctggagcaaaaaggaaggtggagccaacacttgatgttgaagtacgaactatcaagttataccgtgcacctgccattgatacagttagctatggtagctcgaactcaaataaaggagaaattaacagccaatgtgatcggtctaggtccttgaacttgaagcttagaaatggagatgttctactcattcagaatttcttttgtcgagctcagctagttgatccaaactttttctatgttatggatttcaatgacgaagggcttttaaggaatgtattttggattgattccaggtctagggcggcctatgctcactttaatgatgtagtttcatttgacacaacatgcttgtcatttaactatgaaattccactcattgcgtttgttggtgtgaatcaccatgggcagaacattctgctgggttgtggtttgcttgcagatgagacattggagacatacatatggttatttagagcttggcttacatgcttgtctggtcgccctcctcagactatcataacaaatcagtccaaggccatgcaatctgcaattgcagaggtgtttcctagggctcaccatcggttatgtttggcaaatgtagtgcaaagtattcttgagagcttgggagcattgcaagattatgaggcatttcagatgttttttattaggattgtctacgattctctaaaagtagaggaatttgaattggcttgggaagatatgatccagcgttttggacttagggatcaagagtggcttcggattttctatgatgatcgagagcgatgggttcctgtttactcaaaagacatcttttttgctggattgtc

SEQ ID NO: 295024 - DNA, 3133 bp, Cannabis indica
aaaaaaaaatcctaaaaaaaattgttatcaaactatctcatatccacaaaattcagaattagctctaccttattggtcagcattcaattcatatttcttctctcttttccttttctcttcttctaatttattttgtaataactatgccggaaaatatagaaaacagaggagaatattgttcatacccacaaaaatggccgtggactggactcaacttcctccagaacttgtagaatcgatctccaataacctcacaacctatgccgattacctccgattccgagttgtctgccggagctggcgatcctccgtccccagtaccccaaacaacctacctccacaacttccatggctgatgctacccaaatcccgccaccgccgaccccactccgccgccttcttcaacctctcaagcaacaaagtatatctcatcaaccttcctgaagctttatctcacggcaagcgttgttgcggctcttctcatggctggctcgtaatcctcgacgaaaccccctcacttctcctcctcaaccctctgaccagatccaaattccacctccctccaatctccaccttccccaacgtcctccgtttctcttactcggaaattggccgagaatacgccctccgatccccctccggcgagtcatacacccaaaatctgagacaaatccgtgactctttcgtcaagaaagtggtcctctcatccagcccaaaagaatccaacggtttcgtcgctttagccatacttcacgaaacaggggatttggcattctgtaaatccggtgaccaaacatggactttcatcgaaggtgcatcttcttacagtgaggatgtcatacactataactcctccttttacgctgtgaacaaatacggcgtcgttgcggtatgcgatgtcggtgggtcaacatcacccagcgtttcgatcatcatcgaaacgccgacacaagtgggtgccgatatgcagtatttggtgagttcaaaggatgatttggttttggtttctcggtacttggagattgattacgataattctgaggagctttatcgaacggttggattcaacgttttcagattggattggagtgatgaagatgaacccaagtgggataaagttaacgacttgggagatcaaatgttgtttattgggaaaaattcgtctttgtctttatcggcttctgatttcccaggatgtgttggaaattgcatatattttactgacgattactctgagctcaactacgagagtgtatttggggaatttgattctggcattttttgtttatctgatggaaccattgaaaggaaatggaactcccattgtactgattattggcctactcctatttgggtctcaccaaaccctttttaagctccaaaattttattataattgtgttgtgttgtgtacaataaaagacttgtggtgttgtataacaaattttgtatttgcatgtaataatcttaattctctcaatgaatatcttctttttgctttaaggtgattgagtgactcagatactcatttcatgggttaaaaaggaaaatttcattactatatttattagataaaacggccttgaagacaggctctgttttatctttctagtagaatataatacagacacaaactgatactaccatatctatatcaacaccataaaacatcagaatacagtaatatatatatatatataggtaggttgtttaagccattttctaagcgatgcaacgcatggagtagatggagagaggagagtcaaccatggtgatggcagtggggtgatcactctcgatcccataatccataatcggacggtactcaagctcatcgtcatgttcgcacacgaattcgggtatttcaatctcactcctcttcacataatcccagagaaactccatccggatcacgtagtttagtttctggtacaagctgtaatgaattgaaatgaatccatttcaattgaccaatgaaagaatcatgagtaacatttttttggaacaaaataattctcatcatcacaatcaatgattcgatcttaccctccgctgaaaaggaaccgaccaaaggtggctaagaagagcctggactgtatccctggatgaacgaaataaacagcttctagattatccttaacttgagccggaatagcctcatagatagatcggagagttgagattccgggaaaaattttcagaccgattaacatctgtgtggatgtacaccattgagaatggtttctcatcatctaagtttgggaatactctgtcttctagatacttgttaacagcttcactactcacaagtcgagctgataataaaatataattaatcatcaaaaacctaaaacatataatcaatcaaaaatatatgttcattaccagggaaaaactttccgatgactcgcagaatgttgtggccgtgtttatcacggccttggatcttgaacagttgaagtttgtcgatgaggttgagttgatgttcaagagaaagtgaagaagaaaaaggggaactcatattcatggtttgtaaagtgggagaatgtgatgcttttcctacccactctctcatatttatctttataataacaagtaatggtttatttatttaattctatatttaattgaaaagaggtttcctttcaaaacgtagaaaatgaaatatcagtagtgcaaataccaagcttgattgtgtgaagacaaaacaaaatattgacaacacaaagcattatccgtttgaattttaatttatgattttaaaatatattttttagtttttattttattttaaattttatataattaaaattattatttagactaacaaaaaattgacacatactattttatttgggcttaacgaatctgttttaaaaaattaatggacttaaagaaaacgtaatctaagagattattactactaatttttgaggttggggagtaaacttcattaaccctaagtttttggggactattatgtcctttctttttttagtgcaatatatatgagcttaatgtaagtaaatagtcctatttctttaatgtctatcttttaaaataataaaacaaatatccttttttttatttttaatacctaaaatatcattcattatataaaaggtattataaaa

SEQ ID NO: 295025 - DNA, 6132 bp, Cannabis indica
ttttgtaataaggaccctttattttttttatttcctagggtacatttcaacttaatgctgatcttggaataatctatatggatgtttcattcaatataattgtaggaggtggactttataaacatataagttgttcatatataacgcggggtagtttggaccataattattaaattcaaccacaaaccccaccatactgtacgatttgacgaaaatgcaaactaaccacactctaaagaatttcatatcttattttttatgcgatatggtatggtatgggcagtttgataaaaactcctaccttaagctgcttcacctttaaaaaaacaaaaataataatttttgtagtagtgtaacaattaattaccaataatctattatgtataagaaaatagaaaatatatgaatgatagatcaccatcagatcatgaacatgaagcaacaattattttttattattattaactaaatgaaattatttagtaacaaaataattactaattaacccttaacccttagaactaaaactatgtattatacaaaaattaaatacacacaatttatataaaatatatatgtacacacacgtttatatatatataacacattttcaacttttctacgatcaccaaaactgaaacaccacaaagaggaagaaaatctcaacagccaccgcggaacaacccaccgccgctgccgccaccccggaggaatagaaataatagtaaggacaaggatactcatcatggtcatgccctcctcctcctccgctgccgccggccgccggagacggcggcgtcttatttccgaccaccactatcggcggtgaaatctgaacgggggttttggaagggggcggaggagacccagttgtgtaaatccacgccggcgaaggtggcggtgccgccttcttaggcggaggtgataaatccggctgcaacagcggtggcgagaatgtgaagtaagtgggtggaggggcgttgtttgccggttgaaccggcggggccggcggcggtggttgtgacttttcgggctgagacggcggtggtgaacagatgactggacacgtggcgcaatcgcttatgcagagtaaacttgcttgatcgtctgattgctggtcttggtaagttagtgtgggcatcgttaagaacatggttgttataactaataaaaaccaagtctttttagtggaagaacacattttcttctacccatttcatagaaattgtttctttctctctttttctctttgaattcatgtaacataattatatatatatatatatatgtatagattattatatgatgcttgtgtatggctcatcaaaaagggtttttgaataagattcttgctctagtgatgaagatttgttttacttttttgttaatataagttaaattaagttagtacaatttgcaaattatagtgttttctttttgtctcatttgttaataaatggttaaagtagaataataattaaggtaaacttagtgtttttcataatctttttttggagtttgatgagtttttttgtaatatatcaaaaagagaagagaatcctaagtaaagcttctttaacaaataatgtcattttttctttgagatcaataataatacctttctgcaaacttaatcaataccttttttgtgcttcttaacttatacttttctttgctaggtgggcttcttcttcatcataaatatacatatatgtatatacacttttaataattatgaatcattatgttactaataggatcatgatcaataatcaactatacagtctattttatcatttaacaaaatagtgaattcaattactaatttttgcaaaatacaaaatctaaaaaaatattttctcaaaattaaatttaagtatttatctataaccgagaaacaaacttagatatttacactaaattactaaaaaatgaaacacaaaaattaaaattaaaaccccattaaagatatttctttaaatacataataatacactaaataaaaaatgacacatagatattgacttgacatttaacagccaagtacctacgaaagttttagaaatataacttaagtattattactgtcaaaaattaaacttaagtatttatctgtaaccgagaatcaaacttaagtatttacaccgaaattactcaaaaaaaacacaaagattaaagttaaaaccccattaaaaatatttctttagatacataacaatacactagtttcaaatttccaacaaaaaaaaaagtgtgattttgagatagttttgatcattataaagtaggagaattattactagtattgttgtgtggatgagtagtagtagtagtccttccaaagtcttttaacctcttaagttgaggtacaatatccaaagcaagatcaggcctatccttttttctcaactcagcacatttcaatgccaaattagcaaaagcaagagtttcatcaattggccaatctgttattgcagggtctaacatatcaccaaaatttcctttctcaatagctttactaacatgatgagctaaccccattgggggtttagccgttatgatttgaagaagtaagatcccaaaggaataaatgtcagattttgttgttaatcttccggtttgttggtactctggatcgatgtaacagaatgtcccggctgcagatgtcattcggtattgtgttacttgatcagctacagacggtggtactaaccgagctaggccaacatcgcttattttggtaacgaaatttttgtctaagagtatgttaccgggtttaagatcgcggtgtactagtggctcgggttttgtttggtgtaggaatagaagtgctgttgctacttctgatgctattttgaatctttttcgccatgagattggtggggtgttgcctctttgacatagccggtcttctaagctaccgttgttcatgtattcgtagactaagcaaccgaattctggacaggcgcctaagaggagtaccatgtttggatgtctaatgcagcttagaacctcaacctgtgttcatgttccaaacacaaagcaaaaagaatgacactaattcttaataatactacaataattataaacctttcaaagttattacaaaacagaagagtcgatcggtaacttatacaaagcaaaggattaagctcagggtatcattatgatcatatttgtaaaatacagaggttaaattgccattcagcaaaacagaaaaatggatcggtaatttatgcaaaaaaacaagatcaagctatttaatagaatagaatagtcgatcaataacttatgcaaaacacagaattaagctcaaggtatcattatgttgattttttgtaaaatataaagtctaaattggcatttagtaaaacagaaaaattgatcaataacttatgcaaaacacaaaattcaaaacacatataattggatgtgtatgctttaaattacacctacatgtttaaaatttctcgaaggaattgttctttcttgtcaataaacttcacatggtaaaagaaaaaagaaaatgaaaagataggaaaatgtttgaatgtgaacctcatcctattcaagtttgatacaatgaataatatgaaatttctatttcattggttttttcctattcttattcataacaaagagaatatatgattttgatgagcgagtagaatagaatagaatacctcttgttgaaattgcttccttccttgtgctgcatcaggtcttaacaccttaatagcaactggtgtgtgatcaagttttcctttataaacaggtccataaccaccttcaccaattttcattgactccgagaatttctcagttgcagcttcaatttcctctatgctatattttctataccgaaaatcattcctcgacaaagctgtcagtgctcggttcttctcctcggcctctcgcctcgctatcatctccgcctgttttcttctttgtgcttccttctcagccattttttgtgctatttcagctgcttctagtgcagctttgcactttgctttctccatttccgcagctgcaagagctgcctcttcggcattccttgcttcttcaaatttcttactctcctccaacttccactggctcaactctctagcctgaaaaatattggaaaaacataattcaatacaagaaattacactaaagaaagtgcgaaaaatgcaaaattttacataaattaaagcgatcattcagtatgtttttaagaaattcaaaataatttaaagtaccgaaaacaaagttcaaacagatagtatattacataccatggactttgtttcaaaatttataaactattctgaatttttaaaaaacgtatagtgcttgctcttactatactaatcatcataggaggcttataccttctgcacatgaataatttaggataccgaaaataaaattcacacgaacaataaattacgtttgtggtgaaaaaacaagtttagactttgattccgatattgtaaactattctttattttccaaaaacgcacaaaatgcttgctctaactacaataaacaccgtcgtcgaaaatcaccttattttttgctgagattgcttctttacaagctgagctatacatatccatagtttgctttagttcaagctttaatctcttcatctcagcttcaatttctctctgctgttataccaaaattcatatcatatatagtcaaattaattaaacaacaaatataattaaaatattactcacagcggaaagtctagatgcagatagtcttggtggacttggggcagtactgaattcaaagctttgacctgtgatatccattgatccaaacataccaaaaccgccttgaatgtcgctttcttcggcgtttgaatcgcggccaaaagatgatctgtggcaattgttgacaaggtccatgttatccaacaatagaagtgaaggtgcacttttagtcctctctcttactggtatcattttattcatccctcctttcatgtgttgtgctctgtccaaaaaaaatcgaaaatgatacaaaaaacctaacaacaaaacaatatcttgagtattggtacaaccccagttgtgttttcagtatctgaatagttataatcttgatttttatagttatagctgacatttctcgattttgctttgtccacaagtgtataaaaaacaaaaacacgcgtgtaacagattttttgaaccctatttttttggaaaaatgtaaggtatattctaaagctacaatgtacgttgttatagaaaaagattataactattcagatatcaaaaacacaaggggcgttaggaccgatattctcattttaaccgagtaataccgaagaattttcgaaaataataataaggaatttgttgtgtattcacctagctccatgatcaacttcaccatgttcatttggaacacaaggtggcaatccttgtggagatggttgtcgaggcggggcagcggtgttgagcgcaggcctttgagcgtttttcgcagttactatttttcctttcgatatcacaaacacagaacaaaaatctggtgcagatttcacaatactagagggcacatctatgctcttaaactttctgcaataaaccaattatgccatgaaaaaaaaagggtcttttcttttgagaaaatagagatagagaaagagaaaccgaaccttgtaagagcatttctttgagatgcaccagcaacaagattagtgatgcaattcttgttgatataatcaacaattgctttagcaacatcagaatcatcaagaacaacctctttcaatacaacctgaaaagaagaaagattaataattcaatgttctatctttgaggaattatcacaaacatttggtgggcaataataaatctcgaattatttaccgcttttcgagcacaatatgctcggaaaggagcgaaaacactgcgagcatcggagtctcccgattcgctgctgctgctgctgcttgtgctctctgtatatcattcaaatcaatcaaaaatcagagtaaaatgaactgacaagatactatcattatcgcctgaacaactagacatgtcataacccttaaaatgaattattccttttattattttaatcacgaattcacttggatagttcttctgaatttcgaatagt

SEQ ID NO: 295026 - DNA, 1106 bp, Cannabis indica
tattttaatactataaattaattaaaataaaatagtgttaaaaaataataaaaaaatcttttttatttttcctttttctttttattttcctgatgctcttatcaccctacaacaactacaccgtcacaccacccctttataaccaaccacaattatcaccaaccaccattatcaccaaatattatgagatcccaagtgttaacaatattagtataaataaaatatattaagagatcctataaaatgcacacttgtgcctttaacatttattttaattgcaaaagaaaaaaaaaagctcaaaatgtcttaaaataaactaagaatatgggggtgttgttgtatcatctttgtgcttaatcaccagaatccactagaatgggagtatcagctgccagccatggggcaagtctcacgcagagtgtatgtgctatacaaaatcagggatgggtagaaataggaaagttttgttagcctagaaagtactaactcaatattccaaagagaacaaaaaagataatgagattgagaacagaacggtaaacaacaaatctgagggcagtatagtcgagacaaagtactcaaataaatgcctagattctgcgaaatttcaaccaagcgttgtcgacatacatagaacacaaattttgtttaaattatgacgagatccacaccattcatctacagagaacaaaataatgtccaaatcactacgaggtaccaaacgacatttatttgcagagaaaagagcaggagagagggagagaaacatagaatacgagggagaataatcgaatctgagtgttagggatcttagatctaagagttttgagggttggaaatctcaaatttaggatcatttgagaatgagagaaggcccgagggagagagcgcacttgttgtctagggtcaggactcaaggttctcacacaggcacttggctggacgactaagagggaaagaggatctggagattctggacaatgggcattgttctctacactttttgacgatggacgatgtttctgtgcaagtggtcggtggatggttgagtgggaaataggataaggcattgagaagaagggagaaggaagaaggaagaagaaaaa

SEQ ID NO: 295027 - DNA, 807 bp, Cannabis indica
aaaaaaaaacgaagaacaaataaaaaagttgacttacttagcaggtggggattcagatgcactaacagtacgagaggtgacgtcagcatgaaacgacatgtcgtttaaatgataatttttatcctcctcagtagagctgagctggtcgtgaacttcaacttcatcagtactctcaacaaacgcacgtttgttacacttaagactcgccgcctcagccaccgataactcacggccgccgccagggggccccaaagtgagttcggtaatatccttgaaagccattattccggtgtctgaaacgcataccactctctacaaatctctctgtttgtattaattatatgtgtgttttgcggctttatttggttgttaatattattgtttgctttctttctatgtatgtatatatatagaaagagagaagcagtaaggaccaatgagagaagtgccacgtgtgcacgtgtggagccacggataccgattgagttgcatgctttgacggcggcagcatttaaatttggggctctaagttgtcggttcatctaattcaaaccacttttctgtctcctacgtatgtattatatgttatatacaacttaagtattatctccatataaacttaattattatttccgcttatatactgtatatcaattaattaattaaactgttgatgaactattattatattattagttccggtaaatatattattttagaatttatattttgtaaaaaattaatttgattttttattttattataaatgataaattacactttgtattttttaaaatatattattaa

SEQ ID NO: 295028 - DNA, 2338 bp, Cannabis indica
tttctcaaggttttctgtcggcagagctggtcacaggcgaagccagagtgcccttgtaagactctcccttcacttttctttatttgattcttgttattacaataattattatttttgtgatttacaatttcatgagatgtgctcttatcatttgcgatcgtataactgctgttttatctttgggtgagctctatgaattaaatttaatgctttgtgttatgatggttttttgattgttggctttggacttgggttgacttttccattgggtcttataattggtgacatgggtttgatctgttcttaaattgtgaactcaatatccaacaaccattgatctcaggaaattgctggttgggctgatatgtaatttaagtattgcgactttcttgtgaatgggtttgactttttgctatggtattgtagatcaaactacacgatgactattctgtttgggtattgagtttaacctaatctttgaatctttagctgcaattgcattacaatcaaaaatagaaagaaagaagaatatggtttcatttgctatattgttaattcgatcactgcctcatgtttaaacttaaagacttaattttgaccatttggaaactgttttttttttctttttttttcaattagggtcgttttgattcttactgggttgagttatattagtttcttctgtcttatgttctttctttttatggagatttctttacttggcattgtgagtggaattagggcatattgactatctttctaaaacttgactttgcttcattgcatattatggttcaggttgagagagaagcagagcctcctacttcagatactactggtgctgtaaatgctgctacatcttctcatgggattgaagttgctgttgaatttaaaccagttgaacatccgaatgagcctcttgataacgataggccaattcaatgcccgctaccagaaccttccattcttaatgtaagctcatttcttggttcccttttactgttttgttttaacatttatattttctagtttatatattatgatgaagtatctggtttggcttaaccattcatgtgacaataatgattgttgtacttgctgctaccaatctatgtggcattaagatttacaagaaattcaaagctaaagttcagaaataaattttctgttaaataaattatcattcagacatccaatttcttaatcttaaccaccatttttttttccttcccttttctgctgtgcttttaacacactaatcgctagcacattatatcactttaaatttgtggatccagcttatttatgataatacaaagctagttgttgtttcacacaaaacgagaatgtgtgccaaaataatgagatatttttttgtcattgctttcattgtgagcctcttgcggaaggacctatcaagagtaggattatatggtgaaatgactcctcttgctgttgtgataagaaagaaaagaatgtacttgtttgttgaacttatattccttgcctatctagagctatagagtaaccaataatgcaactttgtatattctgctcaaaagcattttggcagattagataccctagacttgtgttacttatgtatttttttaaggtagctactgtcatcataattaaggtttgttttgacatatgaaggtttaccattcattccaaatatgcaggatggaagcatatggaaagaccgggtatctgcaacggttaggagaagaggcgatttgcctgtgatgaaggaaggaaattctcttgaagctgaggatgttgggaggaaacccaagtctgtacaagcacaaggcaaccgaatgattctaccatctctcagtgcacctgaacataatctcttaaacctgctagaagaatgtaatgcatctgggatctgaccaaaatcctggtaaattttttctttatggaaaaaataataattgaaaattttcttacataaataaataatataccttcctcgcactgccacatatatatttgccttaaaaagtagttgtaattttttcctgataaatccacaccctcatttctgtaagtaaatccaagcaaatgcataaattttgaattttttggtggggcgatggattctatcttaccaaaaacttgtattgtgcttttctatgttatttacttgaatggcaatttttacttgcactatgtgatagtgcaaatgtacccacacgcacacacccaagttcatttttttttctttaatttttgaaaaataacactaaacataaccctagaggttatggcttaatagctaatgaagtgttcaaaataatttgatttagctaatgaagtgttcaaaata

SEQ ID NO: 295029 - DNA, 3787 bp, Cannabis indica
tcctggtaaaatataatccaatataccattcatcatgagagtgtacaagattgcattcagacatgaagatttctttttagaataattgtatgttcttatttctctaaaatattttactattaataggctaattataaagaattgtacaaaaagaaatttacaactaatttcagctcagatcctaaaactcagaagaaacaagaaaaaatcactaagaaacggtttcctaataattgatattgaattaaatacataaaatatttacataatactacactccccctcaagttggtttatgcatatcaaacattccaagcttgcacattaattcatcaaaaaattgacctatgaagagctttggtgagaatatcaattgtttgaagttttgatggagtatagatgatttgaattgtggcatttttaattttctcagtgatgaagtgactatctatataatatgttttgtcctgtcatgatgaacaggatttttagcgatactaatagcagcctgattgtcacaaaacatctttatagatccttttgtaaagagtctcagctgaactaataatcttttcagtcgaatcccttaacagacaccaagagccagagctctaagttctacctcggcagaacttttagaaaccacatattgtttcttacttccccatgttactagattaccccaaacataagagcagtatcccgaagtactcctatcagttacatctcttgactagtctgcatcaattttgactttgatctatgtcagagtaccccaaacataagagcagtatcccgaagtactcctatcagttacatctcttgcctagtctgcattagttttgactttgatctctctgtttttaattttctcgaacaaaaggcctttcccatgattcatcttgagataccttaggattctaataacaacttccatgtgttctttagtgggattgttcatgtattggctaacaacattgacagagaaaccaatgttaggtcttgtatgagataaatagatcaaccgtccaactagcctttgatatctccccctgtccacgggtgtactgtctatttctgaaccaattttcttgttgaaatctattggacttgagattggattgcatcttagcatcctgtttcatttagtaagtctagaaaatacttacattgctagacaaaaataccatgttttgatcgagcaatttccatgttaagaaaatatttaagattcccaacatctttaatctcgaattctctagataagaagtctttcaatatttccatttcctccttataatcacttgtcaatatgatgtcatccacatagacaattaggttagatatcattttatcttatgagaacttgacggataaagtatgatcagtttgacattgagtgtaaccatttttgtatgattgacttagtgaatctactgaaccaagctcatgtagactatttaagaccatatacggatttcttgaaattgcaaaccttatctttgtttgaagagttctcaaatcccggtggaatgtccatataaacttcttcaatatcatcatttaagaatgcatttttcacatcaagttggtgaagaggccaatctttatttccaaacagatataacggtatgtgtatatttagtttggcaacaggagtaaacatttcttgataatcaactctgtaggactgagtgaagcccttagcaacaaggcgagctttaaatctctcaatgctaccatcagctttgtaaacggtaaagacccatttgcaacccatagatctcttcttaggtgttagatttgtgattgtccaagtgttgttttttaccaaagcatgtatctcatttactacaacttttttccatcgatgatcagccatttcctatcaaatagtgtgaggaatctatatgttaccaatggtagaaacaaacacctgataggatggtgacaacatcttataggacacaaaatttccaatgggatgttttgtacatgtacaaactcccttttttaaaacaataggctattgaatttgtgaatagtgaccagtgaaacaacttcactgctgttagatgaagagctaattgagacatcaggattagagagagtagaagatgtatctgaggttaggctttctttttcaatagccatggtgaaagagaagcgtgaaaggtgaacaaaaaaaattggctagaagatataattagagtagagaaaaagaagtgattagggttgtattacccgctctgataccatgaagatttctttttaaaataattgtatgttcttatttctctaaaatatttgtctattaataagctaattacaaagaattttacagaaagaaatttacaactaattacagctcatatcctaaaaatcagggatataaaataagtaaggaaacaagaaaaaatcactaagaatcaatttcgtaataattgacactgaattaaatatataaaagatttatataattctacaagacaaatcattacccatcttataaatctagcatggaaacacagatcatttagctattcttctaaaaaataccaatccattgtattataggccttactgagatctatcttaatagcacacttgggagaagcattttttctaccatagttcttgatgaggtcttgaaaaatcaaattattatgagctaatatattcttaacaaaagctccttgattttggctcaccaagaaaagaagaacagcatatagtcttaaattgttaggcactaggattagtatggtgtgctagcatataataaataaaaaaagtattttagtctttgtttgggagagtagttttgagtgaaaaattactatatataggtaagtaagaaaatagagagggtatgcaatgaattgagtaaaactctttgcattaaaggggactaggggctcccatagtttgtaattggttttctcgcacgttctctcaggcatatcgaaggaggtggacaatccaaagtgatactagttctctggcatcgactccatcttctggtgtttctctagtggcatttttctcttctcatccttctctataatcgtcgatttttaccgaggcatctaagcagcgaagagattggtagctaacggtggcgattgcataatctccaatcgatcatttgttctagcagtaaaaccaacgctggctgctaattctccctcaccactgtctcttgcgagaccttctccggtgtcaattccaacggttggtcagaaccgatttctgttttcttaggacaataattatcttatctatcaatatccaagatagccatcattttgttgaagagatggcactcgtcatccgtcatcccaagatttatcctttaagtctttgaatgtctcttcgctttccaacagagtcgtcgccctctcttggtcattcttttttgctttccttagtcccatatagtcttcccactcgtaacgaaattggtgttgtgataccatttgataagaaccggatgccaaattactcaaaccagtaaccaaacacacacaaacacaactgcaaaatgatacaaaaacagtggaatgataccaaaacagtagagaattgtatattgagtatgtgagaaaactaattacatattatgcaagcccttaggcccctttgatgctaagagttttactcaattcattgtataccctctattcgtcttacttacctttatatagtaatttcttattcaaaactactccctaaacaaagaaataaataccctttttatttattatatgctagcacaccatactaa

SEQ ID NO: 295030 - DNA, 2921 bp, Cannabis indica
attatatatatatacctttgatgaccctcatgagcatgtatatatatatctgttatattatatatatatgactcatattcatcatcatcagtaccatcattgtctatcagtgttagcttttgtttatctttcaactgttgaagcaaaatatgcttctttcacatgatcaaggccttctctagcttccttaaagccttagtactgatctgtcttgtcttgtctccatgtatataaatatatatttatatatgttggatcatgatgtggtaaagcttgattctttgatcatatacagtaatggattcacttgttcgatcttgacacccatggataccgatgtatattgataggtacgtaataacatatatatatatatatatatatataaatatataatataatatgtttcttccatttacgcataccgatctccgctgttttcacctgcagtactattattttctgaattaaagttgagaaatgtaaatgaaccctgaactattacttatgaaaaacgagctagatcgatatagattctcttattaatatattatatgtatatgtatgtatgtaccttttgcgcttgctcttcaaaactgtggaggtggatgggttgctgtgccaattccttttcctttggttgatgaaccagttgttaatttgcttcagttgcaaacctgtttcttgcaccaaccgtgccttgtcttcctcctaatatatcagtaaaacaatttattgcttgaagcttagagggaagcaaaagttccaacaattacacagttagtaaaggtgattaaaaaaaaaattgtttctcataaaatttatttcaatgacaaatgggaaattaagtatagctgataagaattgggggaagctttatgtaaagcttgtaaataatttattcattgattggttcttgtaaatcgttttgagtttaatatactgcaactactgattcataaaaaaaaacgtgggaactctataatgaatgtacgatgtgacattttttatgttatttgatatcatggtgcttcttaattagggtttctcaattaaataactaaacatatttgtattgactgctaaggcatgtgtcacttggtcatgtagcttaaagctatagctataagtaataataagattaagatgtagttaacactacaagaagtggcacctgatgaataattactcgttgtttatattacttcccatattaaattgggtaaataatggaataagttctcaaaattttgagtttgtaagcgacataaatttaataatttttttagcgacataaatacttaatatttataaaactgtaattttactctattttcgttagtacacactctatttttatcttaaacatgatacatataactctcagaatctaaatcatttggtctggacggaaacattcaaacatatagtactttcaaatcttctattaataaattcaaaacgaaacctttactaacgacactaaagaaagataacagtttaacaaatattaagtacttatactactaaaaaaatcattaaatttatattgcttataaactcaaatcaacgaataattttgccactatttagcctattaaatttgagcaactctagcatttcttacctaataagatatgtagacgtgatgtatatatatatatttggattttctatggcaatcgaaacaagtgatctatggattgtgtgtattaaattaaattaacgtttttattaataattgtacgtaccgtgggatatggccacttggaatgagattgccaccaagcttttaaaacagatgtagtgtcaccaggtagttttcctgctcttctctttcgaagaatttcttctcttatatcaacaattttctccttataaccctacaaaataattaattaattatttgatgaaaatcaagtttcgacgctcctaattaattaattaattaattaatctatatacctgtttcaactcatgcttcagctcttgtctaactcgctccattaacgacctttcactctctgttgggattagaggtccaaaccccatgctatcaggaccatccaaacttccatcaaacaaatttgcatcactgtctacttgatcatcatcgtcgtccgacattgtggcaccggttccttcacccggagaaactcctgttcatccaattattagtatattatgtaataataataattaaaaaaaacagaggaaagaaaacgagtagtactgaaaggcaagcagagaaagaagaaaaggatctcactaagtactacctgttaagctttgtagagattgctcaatctcccaacaagccataacagcttccattgcgtgaactcgaacatgttgttgaagttgttctttaaaagaacagagcaacagaacgtaatgtgtctacattattaacaaattaattaggtatcaaattaacatgaattaatacaggtaatattaatacatgcatagtgaaatcatcacgtactagcaaaacaactaattgaagctctaactataagcatagctataggcaaaaataaatgcctatagctatggttgattattattctgggtactaataactctttaaaattttattaaccaaataaaataataaagaatctttagttagtacggtgaggtaaagtaataggttggcatttccactcggatcatctatccaatcccacccaccaaagtattatttattttataatactataaaattgagcatagagagaggggagagcaggttgattcacatttaagaaaaagcaatggagaatcacattacaataatatattgcaaaagaaattaaaacaaaaggagttatttatatatttatatatgaatgattaaaattattaaattaatgtttaaatgaatatgaccaagattccgacagaagggataaagg

SEQ ID NO: 295031 - DNA, 5065 bp, Cannabis indica
cattacgcttatttcacttataacaaaatttataatttatgctaaattaagttagcacgatcagaatcctactcaacactacttaattaacccataattatataataaatcctaattattcataattagattttcgagatattacaatgggagacaagaaaatgagagttggacggatggaaagttgaaaaatagatttaatatgccaaccaagcagattaaagacaaaaagaaggattttcattcaagaatagaatttccaaaaccaaaagttcaaaaccttgaaagatatctagaaatctttaggatcccacgagtgggtgaaaatgaatgatttcaacttaaaaatgatacgcagttagagaattaagaggtctaatagaatgttagtcacaattacaagccctaatttcatctattctatggtctgtcaagaatagttcaagaacagataaattcacagtaagaaatttagaaagtaatgtgtatattaaacgaatattgcataaagtgaaaggaaaaatgacttcctgttctaagctttttgatatgctcacagggtatcatcaatggactttccagcaacttttcttcgaagatttgagagtaattaagaaagaattttttgctctagttctttgaaattaaatatgtatgaaaatatgccttggaggtttaagtccccctttataggtacctaaaagaggaaattaattccttttaaaattcaaaatttggggtttccccaccccccaaaagggaacattaagcactcattataagagtacagttgtcacacatgcagtgtcactcaatcgccagtgcgtgactcgaggtacaacttttaagaggcatttaatgccctaaaactgaagagactctcaatcaattcacgtcgaatcaacttcaacaaccagacacgcatcacccattcgaacaagaagtgttatttttttctctaaaaatacctatttccatacttttgatgaagacaaagaagatgcaaaaattagatctctgattagatgcttggaaggcacctagattgatagattatcaacctgggtgctgggtgcttggggccctagggtctcgagtgctcaaaatcaatttactctgattttgatgcatcaaatatgtctgtggtatgcttagttgatgtccccaatacaatttttgacccttttgcaccaagacggtcccaaaaactgaaaccctagttgaggatgccaacctgggcattgagtgaaaccctaggtgcccaagtgggcttccaagttacaagttcgtgtaatttcaactctcgggcttagattaggttgctccatgtcttcatggtacaaaatattgaaagatagtgggtattcaagttattgaagtccaaacttccatcccaaagattccaaagtcaacttgggcacaaggctagcgtcccatcccaggttaacttctatggctagggtatactcagctctatgacgtcatccttcatgccatgtgttaaatattcatgtccacgtcactaggaaaagtttttgggttaacatgttacaagttatttttatataatttctaaattaatcacaaccattcaataataatcaaatgactaaaaataaatatagccatcatggttacatatataattttaccattaaaatatcctcctccatatccatataaatagatcttgaaagcaaagaatttaataattatattatttaaaaaattgaaaacattaacaaaataaagtaaaaatttaaaaaattagaaggaaaataaattatttagaatttgaagaaatctattgcatatactagctcaatctcctgcaaaaaaaaatatatgatacattttgtgccctgttttgggtttattgtagttatgcgcattttttcaactaacttcggtttttaactacccctttcaaacttttatactttcccttttctttcttttacaatttacttcatcatctaggtttaacccctccataactgccactcatttttcctttgcgccccttttctgctgcatcttttgctgtcatggatcccctcctgcgttgccttgacactactctcaaccttaccgaagaaagagctttatgtttatttttagtgatgatgttgtcttgtcctcggtttcactgtccatccatgttttacatgcctctgtccccactaataactatgtccataagctaaccttcttggatcaaatatctggtcattgaaagggtcgattccctgctgttatctctgaatatagggatgatatgtttaaggtttcttttggttatgcaggagaaaaattcaaggtattaaacaaggaaccttggcactttcaaaatcacattgttgtgttttgcacgccagatgctctacaaaatgtcacagtaaaaaaatttaatgtctacaccttggcactatcgccatatctatttttgatatgctctgaaggtttatctccgctcttacaacatgaggaaattattggacaacttcaaggttactctcttactcgacgtgctaccccaatctctcatttgtttgttgtcgatgatagccttctcttttgtaatgcgaatgtgagttcttgtcttgctatcaagatagttttggacatctaccatcgtgcctcgggtcaggttcttaatcctgacaaatcagtcatgtctttctcacctaataccactttagcagccaaagtttttttccataggtagttatccatgcccatttgtgaacaccacaaaagataccttggccttccaacatattcgggacatgagaaacaataattgtttagtgacattaaagaaaaagtttggaaacttatgcgcacttggaacgaagatcttttctcttgggaaaaagagatacttcttaaagtagtagttcaatctatcccaatatgcatgagttgctttagactgccagtgactgtttgcaactagcttgaattattgatgtctaacttttgatggggttctaatgacacatgtttgaaaattaacttgcataattgaaagctactttgtaaaaccaaaactgaaggtggtatgagttttttctcttttgtgcactttaatgatgctttactcataaaacaagcttggagactcctagacaatccttcatcccttctcggtcagctgataaagagtcactacttccccaacaattccttccttaacgcaccacacgacaacactccttctttgacttggtgatgtatcatttttgcgagagaacttatggatgggttgtgttggaacattggagaacgcaggaacatcaattctggatcagccccacagattcttaaccatataattttctctccaatcagttatttaggtcctccaaatgcagtagtggataatctcatcactgaggaacgtcaatggaacaccgttgacttgatgaatatttttcgatgatttatgtggatagaattttaacaataccttacctctaaactttttctgaacaatgacaacctgatttgacatcacactactttagatctctatactgtccagtcgagtatcatcttgggacttctcttgataaaacttatcattcttcgggttcatccttagcctcctcttggtggaaatacttttggtcactaaagctacctcagaaaattaaaatcttcacgtggcgagttcccatgatgatctttcggttgttacatctctggtttgaagaaaagtcatcacagactccacttgctctatttgtcatacagtttgggaattaataggacatgcacttttttgttgtaaatatgcccgggctgtgtggtgcccatatttatctgccctttgattggtcaaaatcttgttctatgcataaaggggactatcatgttcacatccgtctagagcaaattatttagacattatgttgtatttggactgaacgaaccgagtggtccatggttagactgccaagcctacaagcaatcttactcctttgctgtgaactacatgaacaatttcatatcagcacaggcaaaataccacccaactgtctctactgttgtcactacatcagttctctctccctaccctgctttgtcattgtcatagcaacctcctcctataggcactcttaaactcaatgttgatgcggctatagatagccaaaaaaatatcataggggttggtcctataatttgtaatgattctgctcaggtagttgctgccctctcctagtccattgttggtaatttcgcatctcatgaaatggaagcaaaggcaatgtttcttagtttgaattggtcccttcagttgcaatgacaagtttcacaagtagaaattgatgctttgatagtttctaattctttaagtggcccttttctgcaattttatctttcaagagtttaattgttgatatttttagtcttcttttctttcttcctagtgtgtatgttgttcatgtcaaacatacaactaatatagctgctcatagtttgactagatatgctttaggaataaatgaagcttgctattgattgaaatatattctctacctatatactctgttattgtaaatgaatttcttgtttaatttataataacaaagtattttaccctaataaaaaaatctcctgtatgttaccaaatgttgatctccccaaaagagtacacaatctcaatatcttgtgagggagcaatgctcgtgcagtagtagaagaagattcagaatgaaaacggcaatagtcgtgcgatagttgatttaaagaaaaaaaatgtatttggtaatattcctattacattttcaaattcataatctttcttttttcattattatctcaaatttcacttttccaattcatcaaattgaaatttgtcaatgtttcacttgttttacgtgaatatgaatgatgattattatttattattattaggttaattaggattttcgccccttaaactttaacatgtaccaaatcatgtcccctgaacttttcttgccgttaaaaattctccctgaactattgagatttttaaatttaaagacttttgtctaatttcatttaattttactat

SEQ ID NO: 295032 - DNA, 3492 bp, Cannabis indica
tttattttatttttcaaaactaaaatcccatcaaatatttagaactaggttaaaatatccttgctttgtttaaaaaagtttcttttgatgttagtcaactcccatgggttcgaccttgcacttacaagaacactatattctgaaacgattcgtgtacttgcgagtttaaatattaaaactctcacttctcggtacaacaccatgcaaaatgctaaatgtacactggtcaaaggtaggaagtctatgagtatggtgtttaatcaatattccatggatcattttgagtcgtaatcaccagttctagaccatgaattggataacttatttcagtacaaagtaagtgaggaggataatacaatgatgtgtgaaattccaactatgacggagataaagaatgtagtatggtagatgcaccctattaaagctccaggacccgatgggatgtctggatacttctttcgttgctattggaatattgttgggaagtcggttaccaatatggtccaagattttttcaactttggagatttggacagaagctttaatcacactttcatctgcttgattcccaagttggaaaatacgaataaagtggaaaactttcgtccgatcagcctgtgcaatttcatgtaaaaaattattgcaaaaattattgccataagatagcggcccttaatggagaatctcatttccccctttcaatcttccttcatcccggggagatggattgtggtgtcttcagtcctaacgcaagagcttatgcagataattcacagaaagcatggaaaaggaggcttgatggcgattaaattggatatgcacaaagcctacgacaggatcaaatagaattttctgcatagagtgcttttggtaaatggttttaatgagtgggtttgcaaaattataatgaattgtagtagcacagtttcctactcggtcttgcttaatgggagccctatcaaaaaaaaaaattctcgcatgcagggggatcccctatctccattccttttcttgttgtgtcaggatgttttctcaaaattactactcaaggaagaagagaaaggagacatccatggtatcaaaatcagtcaaaatgctccttctatttcgcatatgatatttgcagataataccattttattctcaagagcgaatgagaaggaagctaaagtgctatctaactgcattagaaagtatgaaaagtggtcgggccaactttgtagcatggcaaaaactagtgttttgttctcaagaaatatggacaatctgaggaaaacaagtatcctgaatattcttaaggttcaacagactactagtatggaaaataatttgggtaactcatttgtgttcaagagaagaaaaagggatgattatttagccttgaaggaaaaaatgaagaagtgcatggaaggttggaaaataaagcttctttcgtttgcagacagaactacgatgatctattcggttgctcaaaatttgccgttttacaacatgtttaccaaaaaattacccatgtctacttgcaaagaattatatggtctggttaggaagtattggtggtgcggaagtattgaaaaagacagatttcttgctctgaagtcttgggatcagatttgccaaccaaatatgtatggaggcttgggatttagaaggtttaaagatatgaatagagccctcctttctaaattatcttgggtcgtggcaatgaagattgataaaccgtgggttaaaggctttacctctaagtattacttgaaagagaagttttggtcagcggctccaaaaaatactaactcgtttatttggaagaacattttggaagtgagaagaataattcagcaaaacagttgttcgataattagcagtggcaaggatattgatctatggaagcaaccttggattccttggctaaattttatggaattttgagatgtaatggaagtttgtcgtaccaagaatcctaggctaaaaacggtggttgatatctcttgtgggaatggttggaaccagaatatggttttggatctatttagtgaggatgttggaaataaaatccttgaaatagatagattttcccatgatgagaaggatctggttacttggaaaaatgacatctcgaggatgcactcggtcaaggcagcctatttggaagatcaaaggtggcgtttctacagtacaagagatatctggaatttgatttggaagccattcttgcatcctagaattagtatgatgctatggaaagcaagtcagaatactctccctactcgtgacagacttccttttgtgcaagaaggggatcgcccgttctgcttgcaatcaagggaatatgtgattcacttgtttagagattgtcctcttaccagagctgtttggatgacaggagagtctccaattcgtagtagcaatgttccaggtaatgagttaattgattttttaaagaatctctgtttgtccgtctaggcaaaggagagagaatacctgttgttatttgctggttgcatgtgtatggaaatctagtctttaaggaaccaaaggctctttgaaggaactaagattgattgtggtcgtctagtgaaggctgtcaattcaacagtcatttagcttggccaaagtcatgatgggagggatccgaatttactggctgctcagttagatataaatagtgaggtgcatcccccgttatcaatgatatcttctttgtggatgcatcttggaaagagggtgtcgcgggcttagcagcaatgtggaggtctcaagatagggtctgctggtattcaaaaaccataaaaaatttcattgactctgctattgaagctgaactcatgcagtgctaatggttcttcagtgggttagagacaatcatctcaagaaaattaccatacgttctgatgctcaggtggtggtccaggctttcactaaaaagcagaggattcactcttagagttgttttaatgtttctattttagtattaatgctattaaaaattttgaggtttgtaactttgattttgttaatcgtgcggataatgcgattggagatggtttggcaaaaagagctagaatttctagccaagatgctaatgtaattcagagggagggaccccctcctgtggttcccatctttgtttccttctttcaaaaaaaaaaaacctaaattgacgagttctcactgttaatagtaaaattctatcactaatacttttatataaatctctcatttttctatcttaaaaaataaataatattgtgtaacactttttatagttgtcctacattcatcatttatttattttttgaagaacattcacttttattgaatagacattccaaccacaccacaaaacaaaatataattatttctttttcttattattattatctatttcttctattttattttacaaaacataaaatttatgtgtaacttccatcctttttctttatttgtcaaaaagtacacatcactctacctaatttgaaaataccgaat

SEQ ID NO: 295033 - DNA, 5312 bp, Cannabis indica
gagagagttgagagaaaatgagttttttcatgaattttccaattttgtaaaatgagtaaaatgaaaatggttttctattaattaaatatcaatttaataattagattactaaaccccattaaaaccactagaagacaaaactcaaataggcaaaatgactattttgcccttcccaaactaaaagtcataaaaggccacttaggggtattttagtcaactcaaaaatcttgactattcctgacattctcaatgtctaactataatgtcccgctaaactaaaaatactaaaatgtgattctaatagccaaacaccgcgttccaatgttgtcggccacaaaacatgcaaaattatgaaattccatatatgacatataaaatgtattctaaattcaaataaatctccgtaaattaataattaaaaactaatatgcaagtttcataattaaaccctaattatctactaatttctaaattaaagctaagctgtctttacaaagactactagcaccagaggttacaaggcaaacatgttattgattagtgaggctgggagctggacaagatgaaggagactaagagagcacctaaaattgaccaggataaaatgtatataggccattgtggaggttcccagtcaagattatagctttggtcctcaaatccttaacatagcaaacaagagggtgaaattcaatgaaaaatatcattattaatgagcaaacttagaaacacttaacagattcttggtgatttttggtatgtggaacaagttttcaagatttaaaggtttatctacgttttgagacttaaagaaagcataactagtgtattgaatttccaaacgtgatccatttctaacatacaacctctctttaccattgtagttattgctttgcaccaggttgttcacatcagaggtacaatgattggtagcacttgaatcagggtaccattttgtgtcagctccttgagatgtttgaacaacatgaccttacattgatttggtgctcttgtcaaacctatagaaccactcaagagccaaatgtctagttttgtgacagatttgccactgaggtttggtttgatttgatggacaccttcccccaaaataagtagtgaagttgccacgtctagcattagcattatttgacccacctcaagagttaaatccagaattagatcttctagtatagtgataacagggaaaattggatgttgaatattgagagggattaaagggaatcttacctcgaggggcatttgaacctctaaaatttcgattgtaatgagcaggaaaggcttcataggacaattgatgaaacctgcagtgtgaaatgtttttccagggcactctatatctgtcttcgagtgttacatcctaccattcaagttagtaggctctcagtcaaggaggagagaagccatgaaactaacaatagatgttgaacctcccactccacaactcaggattatggatccatgcagcttgatctgcattgttgaggtattgaggcaatggtgcaccgtcttggatgaactttaaaagcatatttccacgaatggaagccaacacctgttgtttccacaaaaggaagttgtgatcattcaatctgatggacaaagtgtgcttgaaatgaattggtgaaacatcatcaattcttgttctattttgatctgcagcaaagaatccaggaggaggtcctggatatgtcgagctttagttcattcttccaatgtttgccatatttgccaccaacggtggtcgtggctttgataccatgttagtgttggaacctcttctagccattgttgcagagtttcaagaatactgtaaaaagacagaaagaaagagagaaagaatagagctagaggaagagagaaaaaagaagaagaagaagattgagaaagactacattgcattaaaatgagagtgttaaactagtttatatacacaagctcaaaagaagtgaaacattacagagcaagtgtaactgaaagccaaaagaaattacaaacaccaaaaaaaagttataactaactatcttgacaataatgaagtttttgaagcttaaagttcaaaatgttgaaaaacatggtggtgaatttgaccattgatgaagagagagaaacctaacatttttggatagcttgtctcactgcaagaaaaataggtatcagtgagggaaaagttttttacagaagggaatctttttcgtcaatgatgaccatcagtggcaaaatttcgtcactaatttaagagtcgtcactgaacgtcactatcagtgacgatattcaaagtcgtcacttcagtgactacaatgtcgtcactgataatattcacttttatttaactccgagggccattagcgacgacttggtcgtcattaaatattatattttattttcttaaaaaaataatattgaggattcaaattatttttagagattaaaaaaataattatttttaaaatttctcaaaaacttaaatatgtataattacaggtttttttattttctaaataaaatatcaataaaaattaaaaaaattacaaataattgaaaattacaaatagcaattacatttggaatcaaacccacaaattggttatacaattactattttggaatcaaataaacctaaaaaaaatataatcagatccaaatgccatgaacacaaagccccaagtcgctatcaaccattaacaaagaacttggagaccaaactaatcgaatgttgttcacctgtacattagagagagagagaaagagagaggaaaatgaaaatatagagatcggtcttgtttaccgagagttttagaaaccaataaaatataataaagctaaagaaaataatcaatgaagaatgaaactagaatttttatgtggttgggatgtgaaggagccttagttcacgcgtcaatatcattgctgtaaacttgaaaagccttatgaattacacaagtgtttgaaccctaaaatttatttgagcagtcaaggattgagattctagtccattgcatgaatgagttttcttatagtgctagtgttcttgcccactgatgaggtaaatacaaataatatattaactttgggcccatgtagtggagcctcacccatagggcattgattgtatgttgatgtggaggccacatatcgttgatagttgtcaaactgtgtcctactttttgggataataaagacatattaatacttgatcgtcaattactatatttctataatgggaagatatgatcctcaaatgagatcttgggaattaaatcctgatatcataggatctggtaattaatgagtgtgataatgaatttgatgtatggatgctcgcttattatttgtctagatgctctaattgaggtcttttatatgcaggctatgctcgagggttatctcatcttgatgagttatctgttcaacattcagaagacataaatttgttaatggatctagtccattatcttggttgggtcttatgttgagcctggagtaacagagttgtacttcttttggaattagatttgtcccgaactaaaaacacgaataaaatttatccgcaagattttggaactctaggggttatgaagcttgcattcttcctcccgcatgatgtgaggacaagtggaggctaaaaggaggaacctttttgaattccaaatcaaaatgtttatggttgacgaattcttattttttgaaataaagcaacatgtggcattgtgtctttggctcatggagattactttccttaatggagcgcgtgtagcatggccttgcaaaatgacggttgattatgtcagtgcgagtatcaaggagaagatcatcatttagatattttggttccaaccataacattaaatggatgattgcaactttctcagactgttagatatatcttgtgtttcttggacttaatcttgtgttagaaataatttacaaagatcttaatttactattcgatgcatgttgtattatgaataatcttgcatcctaaatataaattttataaaacaatgaattaaacacataagagttacagaaagctttacaatattggttgcagcaaaatataatatctctttccttttagttctttaacccttgatcctttctgttgcagagtatgatcaagaactgaacctagatcttcttgtcctttaatagtattcatcgcagtcttccacaaaggcctgagtatcaacttgaaaagtgtagattaatactcaaaacacctttgaacaatattgagagagagaattcgaatttcatgatgtatgcaattcaaaatatgtgaataaaagaaaagaggaagagagttgtctaacattatgaaacttaggttaattctttcttctcatcactttttttatatctccatcactcagggttaggtttagaattagatgggctgtaatagaagacttgagattatatcaactatagggtctatttatccatattttttcaaggcaagggacctatcatgaaaagaagaatacctgtgtctatcaccgtgttattggaatcctacagtatgactggaaggcattcccaaattaagggttgtcaaggataagaagatgttgggttttgtgtcctaaataaaactcatttcaatataatcagatttacaaattaataaaatatcaaaaatcattttatgttgcatggttcacatattttatttcatgtatgtttaatgtataaattctactatatccagaacatatatttattcatgattatagttttgtcaacaaagtaaaatatattcatgattatatgtttcaaagtttaagtacaaggatttatcagtacatcggatttaaacagacatgaaatcagtgaaagagtttgctttcaccttgaattagtgttatgtctttcacaatgcattggccaattatgctaggctcggatgtatggagtatacatcggactggaccaattgagtttggataagatatcataaacttaccgttatatctatgtaagtcaatatcagttagttgatcttaggtcaatagatcttaatcctaatatggttaggtttgatctcaactgtgttatttatgttcttggagttctttgttaaagctgaccaatagatcgacccaatacttacatcttgggaacatgttagtataattgagtgggagcactaaccatagatgtggaatctatagcttctataaatatttaaaagtgaaatgatgattttctttcagcttggcttaatagagattaatgattgaggtctcatttcattacttacattagtttaatgaaatatcatttatagg

SEQ ID NO: 295034 - DNA, 2455 bp, Cannabis indica
gtcccatagattatatcctagttattggtccaaacaacaatttagttgcttcattaatctcacaatgatttttctcttaaaatctcggtaaaagtttgtagaaacaatattgggatatacctttcataatctaaatatatcataggtatacttaccaagccccatatggagggagttacattgagtccaagtccaaccagttcagcacacaatggtaaaccatttttggatcacactttgtcaagagcacttttagagccttgcaatatctaacattaacaatactagaggttgcatttatagttaataaactaagccagttcatacatggtcccacattagtgcattggaatgcgtgtaagaggttgtttaagtacttaacaggcatcattcatgaaggattacacataaaggctaaacttaatattatatttgcagggctattcaaatcagatgctgattgggcaagttttcctgatgataagaaatcaacaggtagttatgccgtcttttttagaggcaatctcatctcctggtctgcgaaaaagcaacatgtagttctaaaagcagcactgaaagtgagttcaagtctctcgctaacacaacaattgagatttgatggttgtgttctatactttttgagctttatgtgacacttccagcacctccaataatttggttaccaatcaaagagcgactcctcttgctgcaaatcctgttttccatacaaggtctaaacatattgaaagacattaattttgttgggggaccaaatcattgctaaagaggttgaagtgagatatgtcccttttattgaccagatggctggcattcttactaaagctctaagcaaagacatatttacttacttaaaaggcaaactcaatgtgcgttccacaccttttgttttaagagagaatgataaagctactccttcttgtgataattagttagcaagttgtaactaactttcaattacaatagttattttagtaacttttattttctgttatttctttaattgaattgtaattgtgcttttataaataaaggtccctacattaagttctgcctcttttgcaagcttttttttgcaaacttagtgtttgtcaaaattctgcttgtattgataaaatcttacattaccttaatggggaatgcgttaggaatggctaaaggtatctgaggtacaacagagtttatcaaagttaattctgcctgggcaataggcaagagttctcgtgtgccagtgtgggaaccaaactggctctgtgattcaaacttattggtccacttggagcatctgaattccttgattaataatgacaatatatactatgggggacctcagggatcaatctaatatgtgttggaaggaggatgaggtgaggatagtcttcattttcgggggtagctacgagaatatcgagctgcaagaatggtagttattttgatcatgacactcttctctggattgcaactcaagatgggaggttcagtctcaaattggcctgttgggccttgaatgcaacttagtttggcaaagtcaatgtttatctaaaaaatgtttggtgttttgatgtgcctcaaagatttaaacttttcttgtggaagcactattggaatgccctgccttttacatcctaattgagccagatttttggtaatgcagctagtgtgtgtgctatgtgtggggagcagaatgctgatactcatgatcatgttttcttctgatgtatagttagtaaaactctctggttccaaagtttgtgggatgtgagggtggatcaccttatgtttgttttgggagcagagataatcaagtggttgctgaattcacctaaatattttgatgattcttctcaacaatagagaaaggagttctagactttttgggggcagtcttgcttcttaaactgtggagttttcgtaatgactactatcacaataagggtcatctcccaattgactttatggtaaaaagcatccaggagatattcattgagctgtggaatacccatcttactgttactccccaacttcaaacaattggagttgcggtgttggtggcagtggagatgtggtgatccatgtggatggtgcgttttaacatggtcgaggtgcctcaggtgtggtggttaaagacgagtgtggggagaccattggtctttttgttgatcggttcccgacagagtctgctttggagagtgaagtgcgggcactggtggatggtctccttgcgacctaggcttgctactctcggaagctgccttctcggagactttctcatctatttgctaagctttttttctgttggaaaactgttccttttcagtttcctggtgtaactgagaatcaatggtggcagcttatgccttggcttcttggaattttttaaatttgcattgtggttttcttaggtgtcgtttggtaacacttttgttttcaatttttt

SEQ ID NO: 295035 - DNA, 2048 bp, Cannabis indica
aaataaattccaacatcgacttcttcaactcaaaggtcgattctccaatatccaaaagggaagtctctctatttctgagtatgttgatgaaattcaatccaaatttaatgtgctttgtgttgctggctctcctgtcagtaaccaggatttaattttacaacttttaaacggtcttggaccagattttgattctgtagtctcagtgattacatcaagaagtgatgccttgacgattgaggaagttcaagctttgcttctttctcacgaaagtagacttgaacatcatcaattaatgaccaatcttgctataaagatgcaagccaatctcactcttggcaatggcagatctggtggtgttcgaccatatgccaacaccaagaataacgaacctgatgtccctcaagcatctataggtcgtggtagggtttatcctcgttatattcctcaaagagtgatctgtcaagcatgtctcagatctagccatactgcaccagtgtgccattatcactttgacaagaattgggtggtccctagaaacaacccatatacagtaacgacacttcttagaaaggttgatttcgagtatgatccacaggcctactcaacaaccatggttcaagactttggtgataataactactggtatgctgatactggggctactgctcatgtcactttcgatgccataaatcttgacaatcagcaggcctacaatggcactgaaacctgagctgtgggtgatggttagaagctattaatttctcatgttggtcactctacaattccatcttacaatccctcatgtcctcttcaattaaagtctgtgttacaagtgcctttaataactaagaaccctgtgagtgtatctaagcttgttgatgataattacatctttcttgaattacacaaaaattgttgttttgttaaggacaagcaaacaacagcacctctcctcaaaggaaggcgtaaagatggcttgtatatgctcagtgaagaacctgtggcttccagttctatactacaatgtcacctaactactgcttctaattttgtttggcatccctattataatgatcaattaattcattgtactgataccaatgattttgtttcatgtaatcagttcacaattaataaagacagtagtcgaatttcaaagtcagctgcattttatgcttctccttttaatgatatcaatgtatggcattgtaaatttggtcaccattcattagccacattaacaaaactatggtctcagttacctcatagtggttcgattaaaacacttaagtttcgtactgcctgtcatcaaggcgaaactcacaaactcccctttcccatttcatcaagtcgtgctagccaaccactcaaacttgtctatactgacttgtggggaccttctcacatccgttccaaatatggatttaaggtactacatctattttattgatgattacaacaggtttacttggatttatccactgtcattgaagtctcaagctcttgagatgtttctccaattaaaaagtatggctgagaaataatttggtttacctattaaagctgttcaagcaaatggtgatggtgaatacaaaccatttaagaggtttctaagtgatcaaggcatcctcttctctcacccttgtccacatacacatgagcaaaatgttaaggctgaaaggaaacacagacatattgtagagactaggcttactcttcttggcaaaagcaatcttgacttttcttagtggtggcgtgcattttagtatgctatattcactattaacagactccctactgctgttctcaacaacattagtccattttaatgcctgtttgcttctccacctgattataccatcatgaaaccttttggtggtgcttgtttctcacatcttagacattatcattctcacaaaatgcacttcagacctgagcattgcttgtttcttggctattcctcctatcataagggttacctatgtgagaatgctcacggaaggatatacattgcaaggaatgttatctttaatgaagatcactatcca

SEQ ID NO: 295036 - DNA, 6302 bp, Cannabis indica
ttctacaatgaaggaaattgaagatcagaaattaacacagaaataacaccatggctaattacaaaatctttccaaagattctgcaaataaaaaacatatatagttcatgattaggcatgtacatgatacttttaaaacagaatatttagaaaaatcggacaatcaattactggcaaaactgttactgacacatgttaacaaaggaaaagctacaatttcaattgatcatttgaattacactacacagtaggcccattctagtaaagcctttggataagatgacaagaactatcagtcatattgcaaaaacagaaatcaacgggcacaatggaatttcaaggggctatattgcagaaaacaagaaaatttttatagcaacaaaacctgtcaggcagcaaatcggcgctcccaaaatgatgtagaagacacttcatatttattgggtggagaatgatgtgctgaccatcagctgcctaacacagacagcatcagagtatgaatatcaatattacacttaacagtgaccaaagaatattgaaaccaatatatcttgaaaaagtaaggaatactacattaataaatggactacttcaaaatctcttcttttttctttctttctttccttttttatttttcctttttgagaaatcaaaatctagttaaaagcaaatatgtaggacgaacacttgttagccatttttttaatgtttaaaaaaaaattcaaaattgcacattgtgtagctaatattaccatcttattgatcagtctaagatttggaacctttattttctatcatattttgcaaaattcaaaatgtagagccacaaacatgatgaaaaatgagagaaacatctatcattcagtcacctggtaaaaattgtaagaatccttctccttcacatctccaaagaccttcgagttcctgtcattgctttcatcgtacgaagaagataacacaacttcttggggccctaacgattcagaggcatcagcagggtgatcagaacagatctgtgcatctaaacaaacctctcctatattgtcaaaattcttatttttatcagagacctcagtagacaaagtatcagagactactaaatcactgttattttgagtagcatctgcaactggctgtgtaacatatgaaccagtattccgaccgaattcagaagatttaacattatcagatgctcggtgctcatcccaatatttctgtctctgttctaaatgttccattgcagcacatacatatggaagcttctctaggtcatcaacaagccctgcgtctgcccttactaaccaaccgtctagatcagaaattgcctttctgaccgacagatctacatctgatgtaaatgtaaattttgaaaatggatcataagtttcttcagggctacctacgtttatatctttctcctgtttgtttttgtgggacagcatagaggagtccttctgtctagttaaaagcagaagctctaccttatcaccaaccctgtactcattaacattctcaatgacgagagtatacaagtccttaggtgatatcataacaaaacataaaggacatcttttccagcaatcacctttcgcatcctccttccccattaacaagtactgaagaatacatgggaaacaaaatatatgtccacatgaggttatctggggacaaagaggagattccaaacaaattggacattgaacagtagacgaggtagaatatctcaagcatataatgtcctcccaccgtaacattttatctggatccattgattcaggagtatagtttccagaatctagcaccacaaatttatagtttgcctgaagaaataaatctttattgtaaggctttatcttgtgatgtcttcttggaggaggagctcttggttgagaacgagaaatagggtcataatggaaatttaacaagtgattgccactcgtgacttgagcttttcttcctcccgaggatgcagagcttccatgagaattaacatgtccagaaacttgttggtttcgaggagaaactgtggttcctgagaacttccctctaccctgggctgatccagctcctcgtcctccagagcgactctgggaatgcacattgggcatttgatgagataaattattgtcaacatttctccccaactcagttacctagaaaaatcagaattatagaatgagaacatctacccacaacaagaagtagactctgtaacagctaacagacccaacctcaaataaataaaatgggttttgcacccaaaaagatattcttccaaaagaaaacagaatcacattcatacacttgacaccgatcatatatgtctatctattcttacctctttggaaagcccaccagaatctcgagtgccagagacgaaggggcctgcaagtacattgaacatataatggataagcatttcaccatcgacaaattcagtagctaaactaggtgccaactttctatctccatttcaagacttaaaatttcaatcttccccaattcagctgacttcaatttacattgcccaatacatacatagcatgctagtacggtataacagtcgatgaatacgaaattgaagaactccaaaagcagttcccaaaattgagctccgacactctagagttcacactcaatgttcaagacagcaaaaattccaagtaaagaaaaagcaacggcataactaattaaactaaacaaaacaaataaaacctgaattgtttcccacaaacataataagccaaatttctatctccatttcaagacttaaatttcaatcttccacaattcatctgacttcaatttacatttcccaaatgcataacatgctagcacgcggtacaacagtcgcagaataagaaattgaaattgagctcctccgacattctagggtttcaaaattccaagtaaagaaaaagcaacgacataacaaattaaacaaaacaaaacctgaactttctggcgacatatcgttgggaggggattgagagtgagagtgggcgatctgaagcgatccaaatgcgtggaattggcgggagggagattgagattgagattgaagtgaggatgagaagaaggttccatgattggaaggggtagggtttgcagaagagggagatgaagacgaagacgaagtggatccttgggctttgtcaggcaagatggacatgaaattgttcgatggtactgccacccttctttttcgttctctctggtttcgtctttttaatttctttgcttcgtctctttctctcttttctccttttattattgccttttctttcgcacgctttccaccctcgcacgtgttaataaaaatttatttatttattattattttaaagcataattagaatatctacaattatactatctattttttttggttaaaataattaaagagttaaaatagagactcattttttaaaaaaataacaacattaagtaaaataataatttaatagttaaattgatcttggtgaatcttaactatgaaaaatatcaaaatattagttatatagactttaagtattttgataatattcgctttcttaagatgcttgatattattggtgagttcttttcacataattatttttcgctagttttaaaaatagttgcatataatatgatcaactataaaatttcaataaaaaaaaattaaaaatatatgtagccttttattaatttaatagatattttattttactcaattattttaagattttaaatttttactctagtagttatgatataatttttacgaattattttataaattagttattttagactattaatataaataatataaaatacgagattttaagtaaaatatatttatttagtccaatattttgtgagatatttattcattattagagttcgtaaaagaatagtgtaaattttaaattaaatttgtataacattgtagatggtcttaaagcatcgatatccttatttattttcattgacttaaatcactcttttaaaaaaatatatttttgtgagataagataatctaataagagtgttataaaaatattaaagttggcatatgaaatgaataattgaaatgacagcatattattttgagagtaaattagatgatgaggagaggtggtggagggagaaccgacacgcctcatttgagctatttatggtatggtttgtttgtttagaatatgctattcttattgtagattcacatgtatgcaagtgctgccaaacttaaattattattattatttataactcatttaaaagtcaatttttaaagttaaaaaggttacaaattattatttattttttattgaaatatattgaacttaaaaggacctaagaaggtcattacacaagatagtagggggaatggagttcatactcaagttcccaaaaatgttgtaggcacttgcccatttaactagattgtgagatataaaattataatatatagaaataaaaaaaagaacaacaaatcacattattcttaagatcctcgatgaagttgctcaattcccacaacttgatctcgccattgaaagctctaatgacaacttgagcatctccttctactatcacaaattggatctctattctcaatggttgtggtaagcgctaaagtagcagcttttgcctcaactacaagagcattaggggcattaacagaggaagtggtagcccaaagaatttctcccaaatcaatcctggcaaccacctgcaacccaagaatgcttacattgagctacatcaagatttaccttcacctagccccgaggggggtaccacttagataaaacagttgaggaatgaccttgaatgagcacaaaatgaaaactgcaataagaggagagaactttctgggccacattaccagtattagggtagatgttatcatgaaccattttgtttttgcactcccagatattatcagtgacaacaggagcaaaaataaggaactcgttagcatctgtcatagataaaatacacttgaactaagccaaacagtctggatgatccctgttgttatgagtgaagttccatgggccagcaaatcaaagacattgagcaaagtcacaaaacagaaaaagatggtccatagtctccaaatcctgattgcatagggggcatcagtcactgtcaattctgaacaatttactcaggcaagatttgagaggcaaggctttggacaggatgcaccaccataggatcttatgtcgctcatgaagtttagccctccacccttacctttttgctggtgccaccttcaaaagagtctgactatttcttattgatcacgactgacccatcgtaattagatttgtctcctctagagttctccaaaggaacctacctcagaggttccacgatcagaatgggctcggtcagatcgatgacagaagtaaccaagtcttccatgctcagagccttagaagtagcctctggattcaaagtcggaggtgctagttgctgagatttgctcccaaaagcctgactctcttgcccttgtctccaccttccctggcgatttcccgaaccttgtcggacctagattggatgttgcccaagaacctgttcagtagccatgtttgtaaggtagctggttaatctgacaacaaaaaaaaacaaacaaaatatccatcaaacaaggccataatcaaggatatgatctttacaacaaattatcatgcaaggcatcgggaatatccaaaccacttgattttagtataattgactttcccctagcaaaaagagcaatgtcttctcgacctaagaagcctgagaagaaaattttactaaacgcatccactctaaaatgatagtgcacaggtgccacgaagtggttgggaatccttacgatgtaatctactttatctatgtattaaatgcaatgatatctatgatgatctaaatttaagaaatatggattgaatccacattaatcaacaatatttaagttagttagagtgggagccctaattataagaaatggtgtctcaccactactagaggtgctcgcccccagagcaccttcattctgcactacctccttgaatcttgtagtgagttcttcagccatgcttaggctttttgggaattttcttctccaatctgccagtcattgctcatcgacttttactaccttcaaggctcctcaacagtgatgactacaatagcctccttaacctcatctagatcccctcggagagcatcctggacttggtccttcatggaaggtggtgttatataaattaatataaaccccaagatcaatttgtatataacatagaacacaatagt

SEQ ID NO: 295037 - DNA, 1375 bp, Cannabis indica
ttttatattacttcattagtttgatcttacttattggctgactttatgcatgcagtgactttttgacgacatcatatgacattggtggtgttattagtgtaatggctctcagtagtctcttcatccttatgacgcagcatggtttagaatatcccaacttctatgaaaaactatatgccctactggtgccttcaatcttcatggccaaacatagatcaaaatttttccaggtaatgctaattagttcagcactaatgccacttgagggttgaggctagctcaagtaatagggtgggtgagtgtgttagtgactgagttttaaatttcttaatgtatcttatatcataaaaggggaggagaaaacgagagttcagcactaatactcatgtcaaggtttactgtctatgtgttaatacttatacttagcgtatctcaatgtattctaatttcatctgcagcttcttgattcttgcttaaagtcgccacttcttcctgcatatttggctgctgcttttgctaagaaactgagtcgactgtcgatttctgtgcctccttcaggagcattggttattatagcactaattcataatcttctgcgaagacacccttcaataaactgtttggttcaccgggtacctatcaaatcttacctttttacttttctattttggcacttcaattctgttcaagattaagaatgcaaatgagtttggttgactaaattggtacatagatgtgtttctgtatgtgtgacaagcacactatttaacttatttgataggatcactcgttagttttctcctctgaatgtggtttagtttagtgcattgcaacacacgattttcatgttaggaagtttattgcatgatttgataattaattatatttttaagcattcaaattcttagtcgtaatgtaaaggttacaagtttagttaggaatatttcatgtttgggcaagtggttgagtgggtgtgtgagtggtggggcccaagtctctttaattgatctggatatcccatgtttaatatttagttacttaagaaagttcagctaaagcgcagtggaatttttaacgagcagaactgttgaatagatttatttgcccaacaattgtatatgaattaagtggtaattaggggatatttgcggcgaaattctcttaacatttacaattgttatatgaccctaataaaaaaaaatggtggcaaaaatactttatcttacgattttgttgcagtagtgctcttttttggttgttaagtgccaattaagtccgttaagtgccagaaacacatggtgacatatttctttagcttatttaatatgtggtttaattatatggcgccacgtgtttctgagttgacacttaacgg

SEQ ID NO: 295038 - DNA, 2797 bp, Cannabis indica
ctcccctctccttcaaagtgcagtcacctttttctatttatccttcctctcctttgctccttttttttcttcattactgcctgctggactttctgccaaaatatacttactgggctgacaaattgctacgcgatcaatgcagtcagcaataagcctttttctgcttcttttcctccttgtccccaacatttccaaatacctatttttgcattttttttctacttaatacacattaaaacaacaacataagtctatttaatacttactaagacacgcacttccatttattacaatgacacaacaaactaaacacaattacacacttatagacactaattacaccataatttagcttaaaattcaagcttaaagatatcaaaataactctaaatcctagagttatcaacttgcatctaggcgcccatacacctatctacgaggcttataaaataaatcaagaatgttcttttctttggtacaattcatttaatatcagccactacccacaccatagtcgcgctgagatcctatcacgatagtcgtaccactatgatagcatcagtctatacccaaaagtactattgaccagtcactcttaacaagcattatacttgtgctgccaacccgatactatagtttacactattatgacaacgtcaataaataatttatggaattaaatattagtcaaaaccaacactaaagtcgcactgttgatctaaaactatagtttgtgtcattgtgatactaattcattctggcccctaccagcactatagtgtgtggtaggctcggcactatagcttgcaccgctatgatatcaatgcatacattctaacaatattctcatataaattacatgcacatatacatatatatacaaacattttatgctattcttacctcatttgtagattcaagtgtactagtcagcctcaatggaaattcactcgctgaacagaggccctatatcacatttacatataacgagtaaagaacatgcaaaaacctttttggagacttaaactaaaaaatttcctattaataaatggcatgaaaatactgtaaatattgaggaaacagaaaaaagagactttgcaaaaactgcctaaataatggcacgtcatttccataaaaatggcagaccgttttttggggtccttgctagtaaaaatagtagaccatttcctcaaaaacacacctaacctcaattcttcctcaaaacaactccaaaacatctagatatccttcagaaaacctaattagggcctaataaacataacccaagcaataatagctgctataacttagaataataaaaaacatcattattgagccaagtttgagttcttgaactcaaactttctcaacaccacaatcagtaatcaaaaaacacttaaataagcttcaaacaactcaaccaaatctcaagaaacaatccccactcgcctattgttcggataaaacctcactccaaattttgcaagttcaaaccagacaaaaagattcaaaactcaaagaaaaatggattctaggcttacgtttagttttaaatttcaaactctcttgattatcactacagaaaaatgaagaaaagctcatcttttttttggtttcttagggtcaaactagggaggaaggttggtgaagaggtgacttttgtgtttttctttttctaacttaatataataaggatttaataatatttaattttattttaagttaataatctgaataacttagaaaattctacaaaacactaacaataaaactaaaattctttgggaaaaatgataattttgtcccttgcttcacccttaagtaactttgaagcttaggggtaaaatggtccaatattaaaactttgcctagtcctaacatttccaatatcaaataaaaattccctattaaatgaaaggttctaaacaatacatgtgtgactctaatagccaaactgtcacatttctatcattattgagcaaaatctctaaaattaagaaattataactctaattcctatttcttgaaaatagggtccttacaataaaatattaaaatatttacatatattcataaaatattatttattagttctaatgcccttactaatccatatcctaagtatgacgtcattacaattatctccccgttaaaagaatttcatccacaaaatctaagttgaataactctgaataatgagtcttctaatcagactcccttctcatgtgctttcctccacctatgtacacttcagaatttaggtcctattcttaaaatctgacccatttcaggatatttatcagttgctctaaattcttacaactaatttcatgagttatcaaaacttattttgcatcaatacatgactaacaccatgttatcccatttttcacactatgatgtgggagcatgtactagtgacacctttctgtcattctttacacttggttggagaaatattccgaacagatttcaagcaatgcatctacacgcacaaagtctgcttgaccgagcagagtaaaggtcaggtaatccaagcaaggagtgaagttagctctccgagccctgtatcaagacttgactactttagaggttatatcgtgaagcctaagcacaaaggcaatccctacaatcatgggattgtatcaacgggatacataagactgtcctaatcccccatttcatgtattctaaatatataatgaatgttcttaccaattatagatattgtaagcaaaaggagaaaccttccctcatgcatttagccctataactaatgatttagcttgactgaaaa

SEQ ID NO: 295039 - DNA, 7624 bp, Cannabis indica
actaaatttcaggtgaaatgttagttgggccagcaagagcatttttcatggatgaaatatcaacaggcttggacagttcaaccacatttcagatcatcaactacatgaggcaaatagttcatgttatggatgtcacaatgatcatatctctcttgcagccagctcccgagacattcgagctcttcgatgacattatcctactttcgaatggacaaatagtatgccaaggtccccgcgataatgtgcttgaatttttcgaacagatgggcttcaaatgccccgaaaggaaaggtgttgcggattttcttcaagaactaacttccataaaagaccaagaacaatactggtgtaggaataaccaaccttacagatacatatcagtacccgagttttcgcaagcctttaactcttttcacattggccaaagcctttgtgaagagctaagagtcccttatgataaaaccaaagtccattcttcaactttggttagagaaaagtatggcatttccaattgggaactcttcaaagcatgtttctcaagggaatggcttttgatgaagagaaactcttttgtttacattttcaaaacatttcagataacagtcatggctgtcattgcttttactgtcttctttagaacacaaatgaaatcgggaaagcttgaagatgggacaaggttttggggagcattgtttttcagtctcattaatgtcatgtttaatggaatggtggaacttgcaatgacagtctttaggcttcctgtgttctataaacaaagagattcattgttctacccggcatgggctttcgccttgcctatttggatacttagaattccgatttcactaatggaagctgggatttggattgttcttacatattacaccattggttttgcacctgctgctagtaggtaagtaatacaccaagaaaaagctacttagggtttattttcaccccgaaatattatcgttaccaaatctttccctttgaattttttcctgtgttgaaatataggacttctgttaaattctatcttaggtggctaataaaatgatgatatggtcgatggacattagaatttcgaagattaacaaaagtcttatatttcaacattgtcagtagttcaaggaaaatttttaacagggaagaaactttagggtgcgtgatttgatagttgtaaaagttcagggaggcgaaaatgccttttacttgtaatttgtagattgtcccacatggaaagtgagtgggagcattgtaccatttataagaacacagattacttcacttggttttgagatgaaactccacgagtattattaccatattgtcatcttcttcttcttctttctttgtgtttttcaggttcttcaaacaattattggctttattcggtgtacatcagatggctctttctctctttcgattcattgcagctgccggaaggacagaagttgttgcaaacacacttggtgcttttacattactattggtctttgttcttggaggtttcatagtgtctaaaggcaagtaatgtcactttagtttcaagactcttttcatttcaaaagtaggcttttttttttcccttattcactaaaccaattaaccatgtaaatattatttgaatgatagatgacatcaaaccatggatgctttggggatattacatctctcctatgatgtatggacaaaatgccattgctattaatgaatttcttgatcacagatggaacactgtaagatacaatatagtctaaaaaaatatttgtttagagttcgtttggttcgtcgtattagactgtgttaaattttgattcgtattaaaagagagtatagttatatgcatgtaatggcagacccagaatttaattttagggtgagattagttaaacattaaatataatccaaaattgttaataacaagttaaatttaagtggaatgatggtttaacaacgtccttcaattctagtggttataagtccgaatctagtttaaaccttatacttggtgggatttttttagaaaataaaatgtaaataaacaaagaaaaaaaggggtgattcaagcatcttaatcaactatcttatttaattactatgtatatatgttttaatatattttcaaattttagggtgtgctttaatccgctttgggctcaagggggtccgcctctagttatatgcacatataagtcaataccaaatgtaatactggagaaaaatgtgatataggaaacaattcaatataatacaatgcaatacgatataatacaacatatcaaacagattcttaaagtcttctttattaggttcatatcttatatgctatcactaagctcaacatgattttttttcacagaccatatgtacatgtgaatcaagccagcctacagttgggaagacccttcttaaagagaggggactttttgtagatgaaaattggtattggataggcattggagcactacttggattttctcttcttttcaatgttctttttattgcagcattgacattcttaagaggtaagtcatgtgttctacaaaagtttatgccttgttttttaggtattttcttagtattctatgtccaatcttaatttcagcttttggcgattcgaagcctgtagttacagatgaagactttgaaaatcataccaagaaatccatttctaaaggttggtgattgtgttaactgtagaaccaaaaatacaaaatttagttcaggctttcgtgccctttctataacatgacatatcactattggtacattttaatatcgtgtattgtatattctaatttgaataagcattgctacaaggcacctaggatgctcaacaccctaggatcatatatcgattttcacaaatattgatatagggtgttgggcactctagattgctctttagcatttctctacctaaatttaaatatgagacccgatattaaattgtactaataacagtatgatatgttatagggtgttggataccatatggtgcccattaacaattttccaaaaagagaagtattatgcttattctctattcatttggtgttacatttttcactattcatattgcaatggtaccacatacacataaaccttcatgctcataactttttcctatgatatatgtctgaatataggttctaaaaatgctgaagaaaatgttgtgaacaagaaaattgtattggcattgccctttcagcccctaacacttgcttttgaccatgtaaattactatgtagacatgcctgtggtgagttacttactttctccaaaaaagacttaaaactatacattcatctatgtcaactatgtccaatggtgtttttcttcttcttttccacattatcaggaaatgaagaagaagagtcgaggagttcgagaaaccaggctcctactattgagagatgtaagtggcgctttcagaccgggtgttctaactgcactaataggagttagtggtgcaggaaagaccaccctaatggatgtattggcgggaagaaagaccggtggctatattgaaggaagtataagcatttcaggctacccgaagaaccaagctactttcgctcgtgtttgtggttactgtgaacagaatgacatccattcaccttatgttactgtccatgaatctcttatatactctgcattgttgcgtcttggttcggatgtgaagaaggaaacccgaaaggcaagttgctttaataagatatttttgtcaaattcatatacaaatttaagcttagagtaagaaaactcaagaatcaaagcagattacactgtgttcatggggtcaacactcaacccataatcttaacattgccaatagacacaatcccaacaagttaaaaactcatttgaatgaactattaggttgtgtttggttggaggtaataaaatagaatggaaatgaatcgaattttattctattcctttatttagttgcattttaaagtattagaatgtcattccaataaaatgacttttctgccaatttggtggaatgacttcttctattttgaaacggaatgaaagaccattccaatgcattaaattttatttcgtttcattaccattcctattggctattcccattttgataggtaacgggtcttcttcgaaacatgacaaatctcttaattgaactaaaagttctatcttctcatcccacccttcaaaatcactttgtcctcgaggtggtaaaattaaaaaataaaactaaaaataatagctacatttctattcgtgtgttttcattcttcccaaccaaatgtgcccttacaatttccttcttcactcctctatctaaaaggaagactctttcactttcacaaaactttctctgaaaataattaactcattgtaacactaagtaactaccaatgttagttacaatctctgacaactatgattatgcattaaagacaaattgcttcctattgaaaaatttgaatactaaccttctcaagttgttatgaagtttattagagatttgactttaaatttatttacactttctttagatgtttgttgaagaagtcatggagctaattgagctaaattcattgagaaatgctttggttggacttccaggagttaacggtctaacaaccgaacaaagaaaaaggcttacaatcgcggtagaattggttgctaatccttctattatcttcatggatgagccaacttcaggccttgatgctagagcagctgcaattgtcatgagaacagtgagaaacacggttgatacaggtcgaactgttgtgtgtacaattcaccaaccgagcatcgatatctttgaagcttttgatgaggtataatgtgattgtggacacttttctttataggttttataaggtctaattcatgtcaactttgtttcttttttcagctcctattgatgaaaactggtggccaagttatttatgctggacctcttggtcaccattcacaagatcttgttgaatattttgaggtagtttttatatttacaaccacataaaataaaaccattaattaggcaatgtgatcaaagaaattattgagatttgtagtgatttttttcatttcttttatcttttgcccccgaattcttaatggggttgctcatgttttggctaagcacgcttttattgttacctaaaacactgtttggtggcccgaatttcctttgtgtgttcggtccttgattgagacagagtcctctatttaatgaatctctcgggtccttgttctgaggcacctctctcttttgaaaagaaaagattctcaactagaggggatcgggggaagttccccccgccaagctgggaatgaaggaacgtactctaggggctctcccatagctccttaaaagcagagggagagacccagagagggagtgactgaatgaaccagtgtataacagaccgagggactcatgggtatgagtcccgagagactttgttaagactatgaactgcactgaaatactttatacaattatattatcgttatgatatcaaatttaaagtaaacaagcgaatactgatttatacaagcgaaatcttctaatcgaatcgataaatgtgccaaagaaagaactttgatttgattagtgttttttattcaatactttaaacttcttgcaggctatttcaggagttcccaagattagggagggctataatcctgctacatgggtcctagaagtgagctctaatgttgttgaaactcaacttggcatagactttgcaaatgtttatgtcaactctaacctctatcagtaagtcaactttccacttcaatattttccttaacctcctaatccaatcaatttgaccataattaatgatcttttttacaactttttaggagaaatgaagaacttatcaagcagttaagcactccacaagagggttcaaaagatcttaactttcccactaaatactctcaaagctttatgactcagtgcaaagcttgcttttggaaacaacattggtcatattggagaaactctcatttcaatgccattaggttcttcatgacagttgttattgggattatgtttggagtaatcttttggggcaaaggagataaaatgtaagtcaaattctttacctaccttttagtaaaaaaaaatgtgcactcatttggtatcttgtgtttaatctaattacagtacattgtattttaaaatcgtacatatttgtctatttggtatcctaaacttagatttgatcaatcaaatttaatcaatacggtctaattttcttctagagttctaaattcaaatttaattattttattacatataatccagggcagtttagtcaaactttattgatcaaatttgatgtacaatttcaaaatataaggtaacaaatgagcattattagaaactcgagtaccaaacatgttcttcgagaaaatataggatacaaaatgagtgtattctaaaaaaaagttattcttcttgaagtaaacttctttatgatgttggattcttgttcatatggattttttcctagagaaaaacaacaagacttgattaatcttcttggggctacttattctgctgtactttttcttggagccacaaacacttcagctgtgcaatctgtagttgcaatcgaaagaacagtcttctatcgcgagagggcggccggaatgtattctgaattgccttatgcatttgctcaagtaagaaattaagtaccatttttttatgtaaaattttaaatctttgtttttactaataatgtaaattaatttttgtatgttggattcaggtggctatagaaaccatttatgttgcaattcaaaccatggtctattctcttttactatattccatgattggattccattggaaagtggacaagttcttctatttttattacttcattttcatgtgctttacctatttttcaatgtatggaatgatggtggttgcattaactcctggccatcaaattgctgccattgttatgtccttctttctcagtttttggaacttgttttccggcttcctcatccccagaccggtatgtctcttgaatcttcgttgagatcgcaaaaacactagttaacaattgaactggctttttaatggggtgtttgttatgtgaattagactttgagggaataaagttagagggtgcttagagtaagggaatatgaaaagtgttggagatcgtcaattaaactttaagattctgtttggttggaaggaatgaaaacatagagaatagggatgagaataaagcagcaatatgaatgaaatgaaatttaatattaaattttttcttatcttccattagaatggtgtttccttccatttcaaatagaatagtcattctattaaaatggtgaaaaaatcattccagtagaataacattccaatacttcaaaattcattccattaccttcattccaaatgccacctaaaagtgggacctacttagaaatataaacctcttggtcaataaaatttagtttaccaaacatgcaaggccggccctaggcatagacaggctaggcccgtgcctagggcccacacttttcgggggcccaaaataaaaaaataaaaaaatattaggcttttattaaagaaaaatttaagtgtattata

SEQ ID NO: 295040 - DNA, 3316 bp, Cannabis indica
tttcgtaaaaataaaataaaaaatatattttaaagtataaaaataaaataaaataaaataaaaaatccttcataatatcccctcaaaattaaagaaccaataatggtagtaatgaaacctaaacaagtgcaccatttttataatagtttcgaccacaccagaacaaacgtgtaatacaaataccggcactgtccaaaaagcctccatttccaaatactcttttcaatgattcagtcaaaaacaactctctgagaataagtttcagactcagaaaaccccaaaattcaattcaagctttcatcttttcgatttcccatgatgcataagtggaccaagaagaaaacccacttccctttactcgcattgctcttcttcgtcttcatcgttttctccattcttcactacgagcgcagcattctccaaattcaagaagaccaagatcatattcaccatgatcataaccaccatcatcactctcctttcaccttcgtaaaacccaatctcgctagacttcagagtcgaactccaggtaattaaagttgtgatctttatctctttctctttctatttttgttcagcttaattcggcttcttctgggttttgcttttatggattttaatccttactgggtttgttttcttttttgctattttcagagattcttgatcgattcagtagatgtaactctacacgtgagtacagtcgccggaaaattgagtgggctggtgtgaaggagaagaccagtcgccggagaaagacttcggagagctgtgacgtgttttcaggcaaatgggtatacgataacagttcttatccgctctatcaggagtcggagtgtccgtacatgtctgaccagttggcttgtcacaaacatgggaggaatgatttggactatcagtactggagatggcaaccccatggatgcaatttgaagaggttcttttactttctttttttagctatttatttatttatagatagagacttttcaccttatctgagaacaaaaaatggaattttgaatgaatcttcttgattggatttacttgttgtagggattagattaattaatgtgacaatagagctttcctaatcttggttttaatttaattgatgattgtgtttttttgaacctttttaggctaaatgcaactgaaatatgggagaagttaagagggaaaaggcttatgtttgtaggggactcattaaacagagggcaatggatatcaatggtgtgtttattacagtcagtaatacctgaagataaaaaatcaatgtcaccaaatgcccctcttaccattttcagagcagaggtaacttgagagagagagctttaatgtcattacccttgttattcattttctgagttttgtgtcattatattgtagaattataatgcaactatagagtttctttgggcaccgctgcttgcggaatcaaactctgatgatccggtgaatcacagactcgatgaaaggataattcgtccggatacagttcttaagcattcatcacagtgggagcatgctgatattttgatttttaacacatacctgtggtggagacaaggtccagttaagctgttgtaagtaaaatgaatcatagtaacattttgagttaagtttcagaatatgatgtgttgagcactttgtacttactatgcaaccaatttattatgcagatggagttctgatgaaagtggaatttgtgaagagttagatggtgttggtgccatggagttggctatggaagcttgggcagattgggttgctactaaagttgatcctcgcaagaagcgcctctttttcgttacaatgtctcctacacatctatggtaaagttctttacttcttaactcttcaatcttgaacaaaaattcaatgctgtgatcgaaattacatggcatcatttaggcatctgtgtcttatatttgattttgtaattgatattagagaatttgcattatatgggagggtagtatgctatgcttacttggatttgaactaccatcatcaatcttattcctatcatcacttttgtgtcatattagagcttctcttacaatttcaggaatagagaatggagcttagaggatgaaggtaactgctacaatgagaaaactcctatcgaaatggagagttactggggaagtggttccgatattcctactatgcgaatggtagacagaatccttgacaagctaagctcaaaggtctcagttctcaacataactcaactctccgattacagaaaagacgggcacccctcgatctttcgaaagttttgggagcctctgaaacctgagcaattggctaaccctccaagttactctgattgtatacattggtgcttgcctggtgtacctgatgtgtggaatgagttgctctttcattctttgtaaaaaaaatatcacaaaacaaaactaaaaatgtacattttgtaaaacattctttgaaggctaaaattcaatgggaaaaatgattcaactctctacttaacagtgtttattttattatatagtaaaagaaagtgtttatttgtttgtttgttaagtatggaattgaataagtgattttaaaaatcagttattcattttgtaatcatcttgattatcatccatgtgggcataaatcttgtcagaccaactaatattattattgtattgtatgtatgagcatggttaagtttaaggatataatcatttgtattatataaatattattacataatacacatcataatatttttttgaccaaacgtgtgtttctgacttccagtcataataataattttaaatattacttagtgtttgttgcaaataataataataataataatttaataaaaagtttaatcctgaccagaccacatgtaattaactattgataagtggtttgttagaatttataagggtctttagtttttttaacgaaactataaattaactaatgtctatggactaattttgtattataaatttgttggtcgttgattgtatatttatatttaattacattattagacttggggtgaaattttgaacatgtatatatataaaggcagcacaagagtgtcacttttgtatgagacatctatatttttggtatttaaaaaaatataactcaatttctttataggatggtttagggtttgcatgaattaatttaatcaaatgataattgattaatttaattacaattgactgtcaaatattagatgtgcaattgtgattggatcgaattagatgttattttctaacgggatcggatattggatgaggtgtccaaaaatccaatacatttaatcgaactaatt

SEQ ID NO: 295041 - DNA, 1823 bp, Cannabis indica
tagttaaaaacgacgtcgttttgcgcaatttttgatacgctaaaacgacgtcgtcaatgctgataacagtaaattgtagattctcatttttttacagtttcactttcttcagttccttatcgtttcgattaggttttttttttttcaataattttttataaaggctgacgtgtcattatacctcatcattatatacaggacttttgtgatttcatgcaagagatgatctcaatgatgaataatgtgaaagacgaggtacacatttttatgttctttttagaaagagaataatttttatatatttatttttattttttctgctctgagggcaaaaatgtaattttatcgtgcggtgttacacgattaatttttatttattggggaaaactatctttgtatatagggcgatagctttgaggatctccagaagatgttcgcagaaatggtcggtggagatggaatggggtttgactacaatattaatccaacggctacgaagagaccacgtggaaattcagcttctataagtagtgcaacgaaacggaagaccaacgcgtgctagtattgcacgagcttaattttactgaattccccatttcgagatttaactccatgaggggaattagctattagttaggggtaaaagggaattttgtgttttaggatcttttttgttttttttttgttagttaataatgaaaaacagtttcttactttcttcttttttaatataataatagtttaatttgattttattaataatttataatttgttgttctttcgttgttaatggtgaaaagctacaattgtcagttgaagtggccccctggaacaataaatgccatttgttaatgctaaaccatgcacattttctagtgaaagactacaaatggagacatgtttttttttttttttggataattttcagttgaagtggcctttgcaacaacaatgtctactatttattttttacttcggagttagaagttaatttatgtttggtattaatatatggtataaatgtttactcaaagtggtgatgtgacagagatgatgatgtggcatgaaaatattgaaattaagttaatgaagaacatgtaaagtcataactataaattacaatagtcacaatcgatagtcataacggtaagataggaagtttgacagttacccttccttcctagcataggtaaggtggttaacatcggagaaggtgaataattactctcccaacgaattaaaaaatccacacacttccgaaggcgaattagtttaggggtattgctacctctactccgaaggtaacttaactacctaagagtgatggattggtcgggtataccctttacctcctacactcctatgagctaagtattggtcaggtataccctttacctcttacactcctatgagctaagtatcccactctagctacatatgacatgattaatacaatacgtcttccattatcaaggctacatactgttaattattaaacacaatataagaagcaaaggataagatctctggggtaccgccgaaagatgagtactatcccccttagagggttaaacggttgggtcacatcccattaggtactctcaacgtaaccaactcattcaacatttcaaattctacaaaaagctcaataatagttgtaaacccacgaaaatatagaaacagattttaaccccctctaaaaagcaaggacacggttaagatatttctactaggcctgcacatgggttgggttgggcggtttttgggcggtttggcggtttttttatttagcggttttttaaaatcacaacccatacccgcc

SEQ ID NO: 295042 - DNA, 8842 bp, Cannabis indica
caaaaaagtgattttgaattctttattcagaaacagatttcgatttgattaattcaaggagccaatttttaatttagttatttcaaaactgatttttgatttagttattttaagaaactaatttttgattcatttatttcatgtaactggtttttgtgtgttattccgacaactttcccgacgacgatgacaacttcggtaactttttcagtgacgataataattctggtgactttttcggcgatgactacttcttcgtcaaaaatgtctactccgacaacttttctgacggttgtgtctgctctagaaactttttctagcgatgatgtctgccccgacgatttttctagtcatatttattcttagaaatcttatcaacattatttatggtttttttgtttagtttcttatatatttaaactctgattgcttattagtctctattacctttttttttttttttttatggccatatcaaagtaaacaattaattttttttcccatatttatcataaatccccatgaatgaatgtattaggataacttaaaatgtatagagtttctctttataacatctagatatataaatttttaaatgaaagtgaaaagttgtaaaaaaaaaaaaagaaatcaccaataaaattttcagcttatgataacatcccttaactacaagaaggaagttctctccggtgtcaatggctcaatatgttgtcaatggattcttagtgctaactcaaagacataaaacagaaacattttaactaatttcctttcccttttatgggagcaacataaaaggaccaatatctaaaattaattagtacattacactaactgaagcaggaaaagacaagcatgactgttactgattcaaacaagtagtattctattaaatgcaatgacaaggtgagtgagcatagcgaaaaactaccttagatcttgcttgtggtggaacaaagtataagaaatatctggtgtgatgcagacaagaaaatggtacaccaaacttatgtaggaaagggtcaaacactcttcgaatgaatttgtcacttaatactttagagacatgaatttctaaagcaaaatctgcttgaaataaggcatgagatacttggttcatttatagcatggacggcttcattttccaataatttctttcctttcttatgattctctttctttcccaaagacttgttgggatggcttcaaccatggtataaaataattggttcagttactccttttttgttgattaggaagagatgtttctggcatcctggtgctctaaccagtcaaatatggctttcaagaatcctttttctgctataatgtcgctgccccacaatcttcgtttgagttacaactagtttgcatagaattccttctatattactggactaattcatcatagtttgatcggtctcacactatgaggtctcagttcttgatcatgagcatgtgactcaattcatagatacaatgaacacaggagagtaagctcacaatctgcaggtagactatattcatctacatcacttccaataatacattgcttaaactaggattgttggcggaagaaccaacatgtcctcattaggaaatccacaaatcctctttctcaattctgctctctcttttccttgctctctctcgttttgctttctctctccttagagctcttagtctgtctttatggctgaacccacttaaatcctcaatgtgggatgagacactaccatatgtttcatcaccagtatttctgtattgtctagcaacatggccactcgcttctcccacgtcagtattgtcagtttttgccaaaccaagttcgtcgtctatggtctcatgctcattctgttttccagttaagatctcaattaacggcttctcctgctcatcttcaaaagctttgcctcgaggattcaagactgtggaatcctctacttgatcttgatagctttgttgtttctcaactgaactgccattgtactccatcatcaaggaatccaaataactctttataagaattaacaagacacaatatacaaaagcaccaagcatgtacagaaagttgggtccatcatttcccaatatttcaatagaagtgtccatggtcaattcaagaagaaagctgaacataccaagcttcacaggctgttctctttgagatgatatggtcaatgcaaacagagaaaatgatccagtagtgaatacatcaaattgattcccttggaaaattctctgtcctttcttcactccacaagactcaatgtaagttgaatgtattctaaaccttggatacttgttcatgaaaatcaccacagaaacaatcatgaagaagaaagatttcaccatggtttgaaccaaatacttgccatgacacttctttaccactctgttaatcaaatgaggtgcctttagcaaagaatagccaagcaaaagagaaaaggtaataaagcagacacctttcaagttctcagcatcttcaaattgctgctcaaaaaaaggggataaaaataaacaaataaggccaacaattgctgaaaatagttccaaaaggttccgaaatatgtttctcaatttcccccttttatgacctttgagattaacaggtgaaattatataatcatcactatctctactacccaataatgattcaatataacggcgtagaaaaatcaacccaatacagtaaagaactgccccaaacatataccggagattcggcccatcatcatatgctggaatttccatagaagtgtccataatcaagcctatcagaacactaaacaagccaagttctatagttttgtgactatcagatgataaaagcaaggccaaaagagcaaaacctccgatggaaaacagagtatattgacttccatgtaacattttctttccttgttcctcaacacaagactttctatacttagaatgaacatcaaaacgaggatacttgatcaagaatgccaataaccaaacaacacccagaaaaaaagagtcgattaggcatttaagagagaagtttaaattccataccttttgcaagagctcactccagcttggagccacaaacacaagaaatatgagaagagcagaaagagaagcaaaaacgaacagccttgaacttgtagtattgttaaattgaatcttgaagaaggagctttgggacagaaagattaaaccaacaatggctgaaaacattcccaaagtaattcgaagatagtatctagtattggagtttattacatccatggaggagaagtatgaaaaaaggaaataaattacagaaattcagaatttgcatcgaaagtatagtagaatcaagataatcaagttggtatcagagtgaggacgacagaatatacttcacatacaagaaagtcaattatttctggaagacaatatgatataatatgaagggaaagtcaacggccagtcaacttgagcaggtaaacaagcatagttgtagctctatatcctatgaaacaaattaaaggtcgtcaaataccaagattgacccagtaatcttaacatttttcgatgtgagtttggtacaaaacttttctaaattagataaaagtaaagtactattaatgccccaaattagatctaatcaacatcaacttatgtagcacgatgaagaaatttggatttgatgtaatataatggtaattgtatggataatcataatataaataatcatttgagctaggtgggtgtgtgttggaagtcctgagtttgaggtttaagtaaaatatggttgtaatatataaatgcttaaataaaaaaataataatacaaatagtaatttaatgcaacacaaatgagaataatattattatactggtcttacttctctaataagcctcaacaaaataaaataagagtctatttagtgacgttttaagtttaataaaaaaaataataataatagcttggagatgaaagcactaccgaggaggaagaactatgcttttggggccaagtggttacggtgaggtgctatgaacaaaaatggtggcgcagctttttcgaacagtccggtgaatgaagaccataccaaccacgatggtgaatcgtctcacagcggtagtcaatctgggcttaatcctctggggatctcaattactaaaaatcagggatttactatccctcagccgagaatagaggacagtaatgaagggtgcgtaggtgggggaatcaattcccaagctggaaagttgactactaataagagtattgatgtgttaggaaaatctccaattaatgagtgtaacatggcaacaactccagtcaatggggatgaggctctcatgatattagataataagaggagaaggatgggccttggaaacaacattgggcctgagaaagatagcaatgtgggctatagtgatattgttaataatgttgaaggtgggctatcagttatggaggatgtggaaatggggggtgagattggtattattacaaaaaacttgttgagggcgggttctggttcacagacccgcctatcattatgaatgtcttgagttggaattgccgtgggcttgggaaccaacgggctattcaattcctcaaagagattgtgtctcaaaagaaacctaatttattttcctttgtgaaactaaaagtgaaaaaataaaatggagagagtgggccgaatgttgggctttgactgtgtcttttctattgaagcccaaggaagctcaagaggcctatcattgttatggagaaatcaggaggatggtcacatattgggctattcaaataatcatattgattttttggttaagtcttctgagaagggacattggagactcacgggtgtgtatggggaacccgttcgagctcgtcgccatcaaacctgggagctgcttcgtttcctggccagagattcaaatctcccgtggtgtgtaataggggatctcaacaacatcgtcaggcacgaagacaaaagaggaggccgacgatacccccaacatctgattgatgggttccaacaagttctaaatgattgtcgacttcaggacttggagcttattggccacccgttcacctgggagaagggccgtggaacttcggcctgggtagaagtaaggctcgaccgagccttggttaactctcagtgggcataggttttttctctcgcttcactttttaatttggaattttcctcctccgatcactgcccattatttctagaacctaaagttgttcaaacctttgtggctaatcggaaatttaaaattgaaaatgcctggtttaaagaacctgtttgctttgagataatacgtgactgttggcagatagctgggaatgctaagttttctgataaattattgctttgtgctgataagcttagtgtgtggggaaaagatgtgacaggaaatttcaaacttagaattcgaaagctgaaatctgatttgaaaagtttgaaaagtaaaagagatgctcactccattcagcgatacaatgaaataaaaacgaattgtttaaagttattgatcaaagagaggcttttggaaacaacgatcaaagcaaatttggctaaaagaaggcgatcagaatagcagttattttcacaagatggcaaccacgcggaaacgtcagaacaatattgaaagattgaaagatgaccaaggtaattgggttgattgggataatggcttacaaacagtagtcacaaactattttaattcactcttccaatcagctaatactagttgtcaagaagtcattgactgtgtccgcaactcaactccggatggtgcacactctgaatttcgtcagacggtaacagaagaagaggttaaaaagacagtatttcaaatgcaccctgataaaagtctcgggccagatggaatgactccagcattttatcaaaagtgttggtctattgtgggcaatgatgtggtcaaggtagttaaaaaatactttgacaccagggaatttgaagaaggttatggtgatgctcatattgtcctcattcgaagaaaaagaatcctgaagacatgactcagttacgaccaattgcactatgcaatgttgtctacaaaatcattaccaaggttctggtgaatcgtatgaagcccttcatggatttaattgtttatgatactcaaagtgcttttataccgggtcgcctcatctcagacaatgtactcatttcttttgaagtgcttcactatttgaagagaaagaggaaaggaaaggagggttttatggctttgaagctagaaatgagcaaagcatacgacagaatagaatggaaattcttggaagaaattcttcataagataggctttgatacttggtggattcggctcttgatgaagtgtgtgactttggctcggtatattgtgactcatggtggtcgtgagatgggtccaatttctccctctcgtggcattagacaaggggaccctctctccccgtacctcttcattttgtgtgcagagggccttactgccttgattcatcgttttgaggaaagaggactgttacatggttgtaacgttgctaatggggtaccccgaatatcacatatgctatttgcagatgatagctatctctattgcaaagcaactagtccggaggctactcgaatacaagaagtgttgggtaagtttgaagcggcctcggggcagaaagtgaatttttctaagtcatccatatttttcagcacgaatactgtattggcaacccgtatggatattagtaattttcttggtatgaccatagctggagagaatagtttgtctttaggcttgccaagtaccatctctagaaacaagtcggcagtgttgggtttcttaaaggaaagagttcgaaagcgcatacaagggtgggaatcgaagttcctttctagagcgggaaaggatgtcctcattaagacggttgctcaatcacttccaagctatgccatgagtgtgtttttgcttccggttgatattacaagtgatatggagagagtaatggcaaagctctggtggcagtcttctggtaacactgggaaaggaattcattggcgctcttgggataggctttgcattcacaaagataagggtggaatgggctttcgcaaccttcaggattttaattggctctgttgggaaaacaaggttggcgtttaatctctcgacccgaatctttggtggcaaaagtgttgaaggcgaggtacttcccgcatggattgtatcttacttcctcgctagggaataatcctagttttgtgtggcgcaacatttgggaagctcagcaacttgtttgtaagggggttaggtggtgtgtgggggacgctcgcgacattaaggttactcatgatccatggttaccgtgtagagacaaccctttcatcatttcctcacatcctaatctattgcatgcttcggttcaccatctgatgaaggttgatggtgtgggttaggatttggagcttctggaagacatgtttgaaccaagggatgttgagttgataaaaagcattcctttggtttcagatctggacaaagataggctgacttggtgttaccaaacttcaggtctatattcggtcaaaagtgcatacaacctactccaaagcatttatggcaggtgggacaatactcaaacagaagattcaaaattctggaaaaaaatttggcgcctaaagttaccaccgaaagtcaaaaatgttgtttggcaagcagggagtaattgtcttccaaccttgtgtcagttgcaaacaaagagggtgaatgtcagctcactttgtcctgtttgccgtttggaagaagagactatcattcatgctttagtgacatgcctgacgattaagcaggtctggaatcgagtgggcataggtacatcagctagaattgtagactgatctttcttggattggtgtattcaaacctttgcagatttggacatggatggtaaacttcttttaccaatgctctgttgggcgatttggagtgcaaggaatgattgtgtttggaataggaagatggtgggagtggataatatagtagtgttagcaaaaggttatcttgatcaatggcaaagtgctcaaagctctcttattgagacatcatggtctggtttacagatgggtgatggtgctgagcaatggaccgccccaattgaaaatagtatcaagatcaatgtggatgctgctatatttgaaggtgctaatagttacggtattggattagtatctcgtgaccaccatggctttcttgttcaaggccgaactgatctctttgttgggaatgctacacccgaattggctgaagctatcggagtacgtgaagctttgagttggaccaaagaaaatgcatggcaaagagtggtcattgaaactaactgcctagtggttattcaagcaattcgtagctcagtccaaatgatctctcctttcggtcaagtcatttctcattgtaagcaactcataattgatttgccttttgtttcagtgttgtttgtgaaacgatcagctaatgtggtagctcataactttgctagagcttccatattatttcctggttgtcgtttcggtatagagtctgttcctaccaatttgttaccttgtttggtaactgattttgttggttaataatatcacattttccattcaaaaaataaataaataataatattataaaaatattttcagcgggccaaataaataaatatacaatctaaataaaaaaaaattatacaaataccacttgtacacaccttcaattaaggatcaatacttcctgggcaactatcgcgcaaccacgcagcaactcaacgcaaccgaaatgaaaattcaaccagaaagagaactaccattaattctagcgac

SEQ ID NO: 295043 - DNA, 2065 bp, Cannabis indica
tcatctctaataatgttctaaatatgtatgcaaagtgtggtgacatttcctctgcacgccaactgttcgacgaaatgtcccataaaaacattgtttcttggtcagcgttaatctctggctatgagcaagctggggagtgtctgctggcacttcacctgttttctgagattgggttttcacctaacgagtatgtatattccagtgccatcagtgcttgtgccaaactcatgtcattatcacagggtcaacaaattcatgctcaagctctcaaagttggctatgcatctgtttcatttgtttcgaattcacttatctcaatgtacatgagatgttgtagctttaatgatgcattgttagtccatgaatgtacaccgcatccaaatttggtgtcttacaatgctttaataaatggatttctgaaaaacaaacaacctggaaaagggttcgaagtgttcagattaattcaacaacgaggtattgttccagatagtttttctttcacaggagcattggaaatttgtgtcgtgttggacagtttacaggcgggaatgtcgttgcattgtcaaacaattaagcttaatctcgactccaacaatctcgttgggaacgtgattgttgcaacttactcaaggttcaatctggtggaagaagctgagaaggtctttagagtaatagaagagaaggatgtggtttcatggaacacacttctcattgcatgtgttcattgtgctgatcatgctaaagggctaagagttttcaaacagatgaatggtttaaggccggataacttcactttcacgagtctccttgcagcgtgtgctgggcttgcttcaattaaacatgggaagcaaattcatgctcacttaacaaggacaaggccgtgtcaagatgttggagttggaaatgccttagttagtatgtacgctaaatgtggttccatcgagtatgcgtacaaagtatttgaaaggatggccagtcataaccttctttcatggaatacagtaattgtcggatttgcgattcacgggcttggacaaagagctgtagaagtctttgagcaaatgaaaaaaattggtgaaaaaccagactctgtaacatttgttggacttttaatggcttgcagccatggaggactggtggatttgggaatatcaatctttaaaactatggagggaacttatgggattaaacctgatgtagaacatttctcatgccaaattgatatgttgggacgagcggggagattggtcgaggcagaagagtatgtgagaaaatctcccttcaagcatgatcaagttgttctaggaagcttactttcagcttgtcggctacatggcgatgttgctgttggagaatatgtagcgagacacctcctaaatctcgagtctgttagtacatcgtgttatgttttattatcaaccttgtatgcttcggatgagatgtggggtgattttgcaaaggtgaaaaagctattgaatcgtagtggattgaagaaggaacctggtcatagtctggtagaggtgaatggaagttttgaaaaatttacagtagggaatttttctcattcaaagattgaagagataaagatcacactcggaagtttatgttgtccagtaggtgaagtttttctagatgtcacttagcatggctgtggattctatcactgtaactgtaaaaagaaaaattttagtattcatcaaattcaatctacactattttactcatagtacattcgatctacactaagtacgaatttcatattttgaatccaattcaatccgctcaatatttcaaatctaatccaattcaatcgattattttggattggtttattttttattttttattattcaattatttaatatttatagaaaaaaaaagtattatttttttttacataactaccaacaaaataaaataaataatttttattttatgtctccaataataaattaaaataaataaaataacaaataataaatttaaaagaagaaaaaaaaatgtatgtataaaaaaatatttaattttattttaaattgtatgtagaaaaaaaaattatatataa

SEQ ID NO: 295044 - DNA, 4660 bp, Cannabis indica
agatatttgctaataaaaccttctccattcagctgcaaagtagacttaaacctggattgagagtcaagggaggtatttgaggagaaaaaaatggaagatttatccctgttcaccaactggccacaagcttgatgataaagaaggagtatagcattgattgcctctgaagagtgagaagtaactggggaaaaaatcatactatcatccgcaaatagaagatgggacaaagagggtgcacccctacaaatttgaagacccgagaacagagctgcattttcataaagacgaatagcagcaaacagaccttcagcaactattaggaaaagataaggtgctaatgggtcaccttgccagatgcaacgagtggaagaaaaaacattggacaaggtcccattgagagataattggtaggtgatcgttgaaaggcacttagaaataagagagacaaaactcggggggacccctacatgataaagaaatttagtgataaaagaccattcaactctatcaaacgctttttccatatccaacttgatggcagcccaaccaattttgccagatttcctagaatggattgcatggatgatttcgttggcaatgaggacgttgtcagttatttgacgaccagcgagaaaggcactctgattggggctaataacagagcgaataacacttttaagctgattagcaagaacttttgacaggcatttataaagggtgttgcaaagactaattggccgaaagtcacgcactattttgggattctttttttttgtgggataagaacaaggatagtgctattaattaaagagatatccccttcgttgttgaggatttgaagaagggcctgacaaagatcgggccctaaaatatgccaattttctgatagaaaaggaaatttaaaccatcaggcccagagactttatccccagaaagaataaacatagtcgttttaatttcatcagcaatgaaaggctccgcaaggaaggcgtattgagcaggagaaagatgagcagtaacaccttggagaatagaagtgatggcagagttattggtgtcctgagagtggaaaagattcgagtaaaaagtaaggaattgagagaagatggtgtgagaatcatgggtgacagagccatcaggaagagttaagccacagatataattgtttcgttttcttatggaggctttttgatgaaaaaaattggttttttatccccagcacggagccagtcaactctagctcactgcttccaataaatttcctctttgtgaagcagcctgttgagctccgattgaagatgggacgcttgttgtaaggtatgagaagtgggttgtacaaagttcaacaaatggtcaagatcatcttgcgttctagtaatttggagcttaagaggctgctacgaatttttccaatccttaatgtctgagagacaaagggattgcttggtaaggaagctttgtaggggagaggatgaggaagatataagaaggcgccaggaagtgagaaccgtgtcagagaaagaaggatcattgagtaaaaagttttctatgtgaaaccatgagtgctttcgagtgttgggagaattgtcatccaattaaactttcaggactctatgatcagagccataaaagcccagatgtgagagagaagcttggggaagaaggttctgccaaagaacattaacagtacaccagtcaaggtgctccaaaatgagcccatgacgccaagtgtacttattcccagagtgatggaggggaatgagacgtcgacgatgcaaaaaatcatgaaaatggtgcatagcatgagaaggtggaatagttgttgagtttctatcattaacatacaaataatcgttaaaatcacctataactaaccaaggtaagagaggagcagtgtcatataatctattaagaagagtccaagtaataggtttataatcaggataaggagaaccataatacgcagtaaaatgccagttcatatcattaaaattatttataatacagtccacatgattaagggaataagagacaacagtaacatcaatatagctgttccaaaaaagtaaaagacctccccctaaaccttgcctagggacctctaaaacattatcaaaatggagtttatgcttcaaagaaatttcacgacctacttgaaatttggtctccatcacaaaaaacaacatgggctgatgttgcctgaccagcagggagaggttacggaatgctcgaagactccctaaacctcgagcgttccaactgcagatactcatttttctcagcggggtcacgacgcgacgcccgccgtttgatcatcatccgatagagagggaaccacagcttcatcactggaggctgctcttgcgtgcttaagcatcctttgaacagagtccccaacctgagtagtctggcgagtgaagtgccgcctggttccaacagaaggagcaggagaagattgagggctaggctcattaatgaccagacccgcagttctgttgcaagagggtgtggtgtggtggaagtagtcaaagctattccttttccttttttggtatgggtgataatagaggtagttatgatcggtggagggatggtggaagaagagggctgttgggggaaagccataggtgcactagtgagaggggtagtagaagtcacagtgtgggaagctggggtgtccatacggagaaattggttcatagcatgttgtaagctatgatcattggtagaactatgaggaaaaagttcctcaaaaggagtcgagttggagattttgaaagggttcttcttgagatgggcatgggtagtggcccgaagagagtcacggtattccaggaggggtggggaggggaaattgtcgcatcgcaataggtatttggaacatttgttgtaggtatggtccataagaccacaaaaatagagaaattgggtaggctttcaaacttgaaaccaatccatttagggtcatggatggaccaaaaacggatagtcatgcccgtacaaaggggctttgtgatatcaagcaacactcgatcctaagataagggccaaaactctcaagaagggacaatgggtaaatttcaataagatctcccagttcatcagcgattaactgagccagctgaggacttttacgcccaaacggaatgttatgagcttggacccagaaaggagtatatcgaattgtattaggggtaggtgtaggggaaacatcagggtgggtaaaaataatgacgaatttatcgaaatgccatggctggtcttctaagactcgacgacgatccccatcacattggaaggtggacaggaacagaccagagtgatattcaaaaatttggacagggaaacgaagggtccaagcctcaaacatggctttctcaatccaggccggcttcacagatttaggagtgagaagtttgaaaattaggcagaaagcgttcaaatcagtggaaggagatagggaaatgtggtcgaattcatgaaccaggttttcttccacagaaagggctgtgagaatgttagggtttgttgaagaagacgccatcgacagaggaatggggtcagtagatgtaagcaagaagaaaggatatgggggtggcaatcaaagcagagactgaaggattaaataaaaaatcatagaaggagaaggttgcagaaaatacctggagtacgagagtcgcctcaaggagtgaaacgatctctgaagcatctcttcgattcctgcaaggggcttccgcagatgggctagggaaatgattactctggagttatgtctggagaagagggaaatgacggttagggtttttgttggggtgttgtgaggagaggggaagagatagaaagtctgagtaggcattaaatgtgaaaatggaagagctgccaaaattaaatgaagatgggagagagagagagcattaaagagtaactgagcgtgagagattcgggcgatactcgtaatgattaagggtgacatgaagcaataaatacagaaaagacaaagagtttgcagagaagaaatagggggaaggcggagagagcacttgctcactgtaccagagctaagcgtggacaaagcttcaagaagaagacctaatcttcaataacttgtttgattagatatattctattatttgtatattcatttgacaactatcttttgtcccaaaattagtagatattttcttgggtgatttatagaattattcttatcaaattagttattaatttttaaactcatataattgttaatttacaatttatcgatctataatctatatctatttatatgtatatatgtattataaaaaaaaagcacaaaacatatttaggtggcatcatgataattaatttttaccatataaatttatttttttactgtcttagtttataggttttttatttttcatcaaatatataataatataattaatttgattaaaaaaaattttttatcatagtttttattttattaatttttccttgtaataatttttattggctcacaaaaattttcaaactaagttatttaaaatgaaactaataaattatttttttctgagaaatttacatgctttactaacttttccaattttcttttatttatactgtgacacgctgaatataacttttttttgctttttttctttgttttttattttcg

SEQ ID NO: 295045 - DNA, 1768 bp, Cannabis indica
gtggcgttcctttagattagggcattacaaatatagtgcgctaggttcttaaaatataagaataagctaggtacattaacaaataacatcattgttaaattagggtgaaatcaaaacattgacaattgtttttatttgattattctcaactttaatttgtaattctcgtcgttgctattctcttttaattttctaatatcattcaatatcgaatgcttaaataaaattatgttttaatatttgccatatttaattactttaattacttttaatctctttggtatgatatccctctcttgatcactattattacttgtcgatttatgcacttgcaagcacataaatatatgaataaaattcgcaacaaggttttagcgtcgttgtgaggtttaaatctttttaattaatatagtgaagaaattatcaaattctagtctaagtttttgttatttttattgtttactaaagttgttttataattgttgctgtgaaggtgcatctgcaaagctcgtagttcacctttcttaccttttgatcctaaattaaaagaaaattaaagtaaattaaaagagaactacgagctagaacaagaaagatggctgataatagtgtcaacaataacaacaacaacactgctgatggtcccaatcttgtagcaaatcggaccttgagagattactgtaggtcaattgtcaattatgatttcttagttgtgagaagacaacaagtgaatgtgaacaactttgaattaaaacctgcattagttagtatgggacaataaaatcaatattttcctcatgatacctaaacattagcatttctactttcttggaagagattgctgaaaaattcctcacaaaatcctttcctcattccaagacttctaaattaagagtgaattcactcaattttgacagcttgagattgatcaattttatgacgcatgggatagattcaaggagatgcttagaaagtgtcctctacatgacatagaagattggtttcaactctaatttttctacaataggattaataaaaaactgaggtctcacattgatgttgcatctagctgtacaattctatcaaagacactaacgaaggctatgagtttatttgaggatatggcaatgaatagttgtcaatgacaaagtgagtggtcaattgttaaaaaggaaacaagggtaattgaagttgatcagagtacgtccctaatggcacaaatttctatgttgacaaatcaaattaaaaggcttatagaatgtaaagtggtacaaacaagaatagtgaacatggcacaagctttaggatctaatgaatttgtggatgaaaaatttcaatatgttaatcgaagctacaattttaaaaccaacaacaattcgcctaaccactatcatcttggtctccaaaatcatgagaacttttctattatcccaaaaattgcacgaatgacgtggcatcacgaagagttacatgtggcctcaattaagtagctggtcgagatatgatgacctaagtgttgctcgactaattagtatcctttgaagcatccgactagcctgaattagcaggaaacatcattacgttctcgcaaggagatattgggcggaccttctagcccatgatgtttacttgttcaaaatctttgatccataaaacaataaacactgattaaatattctataaataaatgttatttaataacactttatctctataaataaatctttgatccataagtttgaaggtcattgactaattcatgaaagtc

SEQ ID NO: 295046 - DNA, 4550 bp, Cannabis indica
atggaattttatttagggcataaaacctaacactatccacattgctgagaacccggtgtatcatgagagaacaaaacatgttgaaatagactgtcatacagttcgagaaaaagatcaacaatggaactctccaaatgaatcatgtctcatctcaaaataacttggccgacatcctcaccaaaacactctttccaactccattcaaaaacattgttttcaaaatgggtgttaaggatttctataccccattttaagggggcctattagtgatagttagttggttaggtaattcagttatttctgttattgaatgtcggttatactcatatattcacttcaactatttatatagctcctctcttgtatcattttaattcattcaatcaataaagattgcttttcattttctttcctctatttctccctgttcttagtctttttctactattatttaatgaaatcattatagtgtaatgtaagttattaatgcatgcattatgtaagtaaaatagagagtgacttttagtctttacaatgtaaatagaattttagagtgtaaaaataaaatcaaataaaaaaattgaagtcttttgatgaaatagaaaacgttttaatttatatctaatgaaattattatagtgtaatgtaagttactaatgtatgcatgcattatgtaaagcaaattaaatgtaagttacttttttttagggaaagggtgcccgctaaagggaaagaaaatcactaagattgcaagggtcatcgccaatctaaattgctacttcgtctaaccccgaagcccaatttgccaacttatctatgaaagtatttgcagaccggttgatatgagagacaaaggcagcaggaaggtgagacaaagcttccttgatttgacttataaagtcaccaaaacacgaaagatcttctttagggcaattcaatgcgtcattaatagctttacaatctgtttccaccacgtggactgggaaattctcttcaatacaccaatgcagggaggtatggagagatttagcttcaagaatggccacactttccaccccctatgtagggagaggcgactgccgcaacaacgtttagcttgaggcattgcaacatcaacgtttagcttgaggcgtccaggttatggaggagaccaggttgtgattgaggaagactgggtgaaggggtatggagctttggagccgaagttgaaaattggtagtccgccaggaagctttgggccaagttcactatagcatgggtccgatcttgtacttgtcttctaagagctctattcctgttattccaaataagccaagcaatacaaagaaagcattcttcatcttccttgaataaagaaacatagatcatgtgagcaacatcatggaaagtaattgtagtagaagaagaaaaaaatataaggatagaaaaccgtacctttccagactcttcgaatgctcttacaaaagaataggacacgtgacatagattcctccaggtttccacatcgatcacaaaccggggattgaataattttcctaaaagcagattcctgtgtgggggaagggtagagttggtagcacgaaaagcaaagagtttcaccttaggtgggattttaaggtgccagagttttttccaccaaggcgagggtgaggaagaagaaggaatgtcctggggggggggacgtgaagacagactgagatggtaaccagttttgacagagtaaactcgtgttttgaaggctcctagatcagctcatcactggatgggtggagaggaagggggatggaaagtatctcctctacaatatgagaggggtagcagctccttaggagaggaatgtcccaagtcatattagacgagataaaggaagctaccttatcaggaacagggttaagaggggtgacctgacaaaaaccagggatccaacgatcaagggaagtagaagtgttttgcccattgccaattttagtaatgaggcccttgtgcagcaactcttttccccaaaaaatgctacgccaaacaaacgagggagaatggcccagagaacagtttatgaaagaagagttttggtagtacctgactgctaagattttggacatagttgagtttggatgcttaggatgtgccaggctgttagccagtagagcctgattgaagtggaccagagaacagaagccaagccctccatcttttttggacttacagagtttttgccaactttgccgatgagtctcagcccacaaaaagttagccataatggattcaagggagtgacaagtggccacagtgagacgaaaacaagccatagaatacgtggggatagcttgaatgacagactcgagaaggatttctttgccaccttttgagaaaactttgtgcttccaattgttaagatgaccccacactttgtcatgaaggtaatgaaggacttgttttttgttctgccgatatgctggggaagacccaggtatttttcaaaagaggttctgacagggatctacatgaaatcagaaatcagagtctgctccctcaggccaacattaggggagaagtaaagagaggattttcggaagttcactagttgccctgtagccctttcataaagaccaagagcctctttaatagtattgcaggaatgaatggaggccttacaaaagaggaagctatcatcaacgaaaaggagatgggatatggctggtgcttgcctggcaactttgaagccggtaagagcccgacttctttcctgctgctggaggagggaagagaatccctcggcatagagcaagaaaaggtaggggaaagagggtcgccttggcgaatacctcgagagggagttacatggccggagactttgccatttacattgaattgaaaagtggccgtcgaaatacaagcagagatgaggtgtatgaaacgtgaagggaagttgaacttcctcaggatggccaagatgaaaggccactcaactctatcaaaagctttagccatatcgagcttaaccgccatccagcctttcttccctctggatttaagctttatggaatggacgacttcctgggcaataataatgttgtccgaaataagcctaccaggaaggaaatcactttggttggaagatataaggttgttaagaacaagcttaagcctgttagctattgattttgagataattttatatatgatattgcacaggcttatgggtctgaactccgtgaccgaggtaggctgtttaaccttgggaatgagagttacaagggtggtgttaaaaggggcaatgtccccatctccattaagaaagctgagaaccgtagtcaggacatcttttttgacgagagaccaatttgctttgtaaaaattggaattgaagccatcaagaccaggagctttgtccagagggagctgaaaaaaggctttctcggtctcctcaaaggagaaagcttcatccaaaaaggatttatcaatttctgacagaaagcggtcaatgccttccagtgcaatttgcatgtcaatacgtgaaggattcgtggatgtgaaaagagtgcgaaaatgattttcaatttctcgcgtaatgtcttcgttcgaggtgacaatgctcctagtagacgaatgaagattaaggatttattgaccttcttcctatgagaggcgtggcggtggaaaaatttagtatttctgtcaccttgggccagccattgggttctggctctctgtttccagtaggtctcttccttgtaaagaagggcatcgagacgggattggagatctttgatatttccaatcgtacgatcatccaagtgggagcaggatcgggcgagctcaaggtctttttcaagtctactgattcgttttttgaactggaagtcctttttgtggttccaagcattaagttaattagcacaagtggcttgggttgcaagaagactgggtatggcttcttggtgaatagtggatttagtccaagaattttccatggtcttcgtccaattcgtgtccgtgagccacacattttcaaaaagaaagcgtttgtctgggcgtccaggagtagaagtgatagtactagaggtaaccaactcaagggcgcggtgatcagaaccgaagaagccaaggtgggtgagaagggcatcagggaaaagatcggtccaagaagagttaacaataccccaatcaatgcgctcctgaatgttttttggtgaagccacattgttgttccaggtaagcaaaggacctttcgggtcaagcggggttaaattaaaggaactcagcagatgtctgaattgaaaggaagggcctctgtcgggattactgccttgtttgtcatcagaagagaggaaagcattaaagtcgacgatgacaagccaagggtctatggggttatccttcccaatcttattcagaattttccaagtttggggtctatgcaactcaattggtgagccatacatgatgtaaataaattaaaaaatgactttcaattttacaatgtaaatatagaatttataatagagtataatataagaatattttatttaaggaaatatatttctatttaa

SEQ ID NO: 295047 - DNA, 7233 bp, Cannabis indica
ttcacttttggtcaatattgtttttaaaaacactaaccaaacgtgacttgtgttttaaaagcttcaaaaagtatttttttgttctcatttctaaaaataattttttgaaaatgaaaaacagaaaacaataccaaacatgctcttagtatttttgtaaaaatcccaaaaaaaaatattacattattttcatgaatgaattgctagtcgttaatttagtgagaatctatagactattagtcattttattaaattttatacataataaaaagggagagcagaaagaattaaaaccataaataaatgagcaattttaaaagcagtataaaagacttagttttaaaatcagcatttttaagaccaaaaataaattagctgttcgcttttaggttgggcagtaagggtcagagaagagcaatcactcattcttaaaaccaacatttttaagactaaagagtcaggtgaaaaagaggggaaagctctctgttcttgattatcttgtagctagatcttccgaaatcacaagaatttttagttaaaatgagattttaattcagcaccttttaagattttaagaagagttactttatggttcttaaaaccaacatttttaagactaaagagtcaggtgaaaaaggggggaaagctctctgttcttgattatcttgtagctagatcttccgaaatcacaagaatttttagttaaaatgagattttaattcagcaccttttaagattttaagaagagttactttatggagagtacaatatgatgaaagttatatatgtatggtgaaagaataaagttagaattgcagataatttatcaattgtaggcatgggtaattagtgcttataagttataaatgtgtacccatatttttaagatatattcaaaaaacaaaatggaaaaagaaaatatcaaaattctgttcagaaaaaaaaagttgatattattggttgatataaatttctattagaaaattagatatctttatagtagcatataaaagtgacacatgtatgtaagggaatcattatccataccatagatataatagtatcattttgatcgatattatgtaagcggctttcaagaaatgattaacggtataatgacaaaagcttaggcttacacgtgcataatcacttgagtattatgagtccaatactcgaataactgttttttccgtttttttgctcagtaatttgaataataagactcttgatagcattactatagagattagagaacctccaatgcttgttattgtgggaatttacttttcaattacaaacataaggcttatgttgggcaccacagttccaattttttttttctcttcttttcaatttcaattggttaatttataattttttttacttgaatttaaagttgggtcaagcaagttgttagcattaaaaattaatattaaattttaccaataataatataaaatgtgatgtgttattaatattattaattaagaaaaacctgcattaagaattcaaaaataaatatttataattattttttttcaaaaaagaaataagtatttattataatgtgcaatgtttatcaaaaatgttaaatttcgtttctgcttacgtttctagaactaattttgtgggttgttctgtccctttttgatgtcacacgaccctagtcctactcctaccctttcaatcattgaactcaagaaaatatattcacagaaagaaaaaaatacattagcgtattaaatcgttttagattattagcagttcttattatttaataagaattcttttcaatttagtatcaactcattactttgttaatttaaactggccatgcaccaaatattatttagctgtacagatacttttgtgtcttcgacctgaaaattaatgtcggtgtaaaaaagaaagtttttaagaaaaaatatatcaaagttgtattctacaattttgatatctgataatgattaagtaacccaaagaaatgaaatagttattattctaattaattaattgaaatttgaaaccattagttataagttacagcttaaaaatattcatgtcgctcgaaagagacaactgaatgaatacggttcctttgtcacattttcatgaaataaaaggcagtttggtgtatattattgggaacgaaacgtagaatttgataagaaaaaaataggaaaatgaacaacagatggcaggcactgttttatttactaaaactagtattaagtccaaccatttttaagtttaaccaaaaagacaccaccagccatctatatttctaccaagtttactacatagtaaatgctaacaacacacaagtctattttcgagataatgatcagattcgtatctctttgcgttagtagtacaagctggcaaatacataatacctggtcatttaaagtgaagtgtaggaaaggttaggattagaggttgatagcaaagcaaggaaatacctgtttaggaaggaaacggcaaatatctattctactactatcaactatatgagctcaaatcaaagccaaattctagaaaatatttgttaccctgaaattttctatcttttctgaatcaaaaggaaatcaaagaaattctaattctatcatttttgaagtttcatcccataaaggcatcaggattggaaaaaccactgctggtaactagatttagaaggcacttctttatacatggaaatactcgattcttcatgttataaaggcaacccatctaaaagaaattgacaagaagtcacaatgtgaaagtatacaattagcaaagaatgaatctttccacttaatagatcgtgaatgaatgattttacagggtatctgaattcttgactcaaatattatatctttagttgaactgtaatttttaacaaaaaaaggaacaaaaataacgttacttttcaagcattattctacattactgtgctattttgtgtaaaagcttcttaatgaaattcccttttcatacggttgtacttactactttgagacaggattgatgaccccaccatgccgctgcatagcaataactggttcattgcatctcaagcatcgaaatgatggaactgcagcacaccttgttctaaggcagtagtaacagtatctgccagcatcagaaaccaaattaattttaggctttcttctctcaactaaagttggattatatttttgtaaaactaaactcaagagacttaatggcaaaagtcagtgatgatgcaattatagttgagtacaaataattgaagaaccaaatactacagattgtatattgtcagacaatgaactgttggtacaaagtattagaagttgttgatatagtgagggtatattgtagcaacagattaaaatattttgccagaaaagttcatctcatagttaagtttaaagatcatatcatcacctcaggagtgtcgccattagtcaaatttagcaaaacttattagattaacgaaaaaaaaaacgcctttcattatatttacctgtgctcgacacgggaagggttcctagaaaaagaaatgaaaacccttattagtaagttctcatagaagtattcttatatgagatgagtgttttgttttcgaatagtagaagctaggctgctggaaaagaaaagaaagagactagttttatctataccactgcaagctattaatgcacttgtgttaccctcactcttggttaataagagattatatccctctttctttctctttggaaaacccctatgtataaatcggccattatacaagtggaaagaaatgacaaataaaataaaaaaagaaatacaagttacgaacaagctagctggcctaacaaatccaagactgcaatcaggcccagattgggaattcatagaagcaacagaggaataccctgtcccatgccaaagggaaaaagaacaatcaaagagaaatacgcaattaggactaaactaaggacaaaagcaaaaaagaagaaaaccacaatcagactcagaccacacaaaagtcaccaagtaaaggcaaaatagaagtttgcattttaaaaattcttacaaaatgtgcacagcactgaataaactttaatattaaaatcactattgaagaaaaatgcagttaagatgtcttagaatcaaaattcctcatcaaaaaaggttacttcaaatcatctactattcacagagttataaaagtaaaggctaaaaacaagtagctaccgagaattcattccacactaactggcgattcatgtactcaaagctaacagctcggttcatattaggacttccatagacaagtctggctcttaaagctctttcaatgagattcctatacctgcatcaagggaaagatgtaattgacacccactttaagaacaaatccagataatttttacatttgacaaaaagaaaaattatacattgatcttttgtgaatcagaatgaaagaaagaatccatcttgtaggacagtcaccatacacttgctgaattatcaataatttcctttcatctaatcacaattgacttaatttatgtaaattattcccaccaatgaattccagctgagtaaatttaagatccaagcaatgaagtaaatgactacatactttccggtataaagaaatacaagcaggtttccaaatgaggcagctttataaaagccttctaatcgctgtatcaaaatccatgctcgccttgccaatgtcctctgggtagaagaaaaagtagaaaaacccaattatatcaacttcaaacgaccagaactatctgccttccattatcatgttcagtgtatggagaggcaaccaataagctataaaaataaagtacctgctcagaatcaccccatcgacgaaaagcagaaaaagactgtaaacgagcccaaatgtattgaccaccaacagtcgcagcacagtaccaaatcttctgtgcaactgtaagaccgggtccttccaggccagttctgactgtatataacatgacatggttacaaaaaccatggaaaacttatcttcctatgttttatgcagccaagtttggaaagcaacatcaaaggaatatgcaatagatttcgtaccttttgctcttgtctccatcgcacgttcatctctatacctcaaattcatgagagaaatccctggagtaggcttatcaacccaaattgagaatctccaaataagaaactcaaggaaagcatcgagctcagcttcatactgaaatagcattcctggctaatcccaataaaataaaagaagaaacaatttgacgaatgtcaagaacacaaattgaagctaatggttctatgttctaaaattcttatgaaactattttataagtcttgagaaacaccttcattaaagagaaaaccttgaccagttgctcttttaacatagctgacatttcaatgtccagtcttgctgcatcaacttgatttactcttgatattgtaatgggtataattgactgcaaagaacaatcccgtaactgaatttgagttttatatcatatgagtaattaagtgcaaacagcaattccataaaattaaaatatactttcattcattgaaacaaagaaatgaaatatcatgaatttcacttataaacataaatacatatatttatataaacatcagggattagacggtaacgtaacatattcatgtaaagctttttggaactaagtatagcaaagtaaggacatagaaacaaccagagcctttaaaatcaatactttattaccgaattccatatttcataaatttagagtctgaattacgtttcaatttcaactcccaaacccaaaaatgaaggaaagagaaaaaagagaaattagattacctggggagagcgaggaagagcataggattgccagtggggaagtaatttgtggtaagtatgacgccaagcatcctgaggtggtgggaggagacttgtggcactcattgaaaccctggttcagaggccgatgatgatgatgatggcggtggtggtggatgagtttggttaggtttccgagtgttttctgtggagaatgagaaagggagggtttatggatttggttttggttttgggagaaggggaatgggtgggtatgacccgctccgagctctgagctccgcggctctgagcacaaggaaagcggtggtgatggtggtggtaatggcagtagttgcctatttattattgttaatttattgacaattttcacactttcaaattggttattttgaataacaactccttattgttctttttctttaaaaaaaacctacttaggattttttcgcctaactttgtcatgtactaagttatgtttcctgaacttttttgccgttaaaaattctcttatactattgagattgttagatttaaggacttttgtctaattttagtaaaaatattctaacatggatgaaagttcagaaacataatttagtacatattaaaatttgagagacataatttagtagatatctaagtctagggagtatcatttagtacataaacaatcactgaaacataaaattgaatgaaattagacaaaagttttaaatctaacaatctcaatagttcaggaataatttttaacggctaaaaaagttcaaaggcatgatttcatgtcaaagttcggaaaaaaaatcctaaataacaactctattattatttttattattattattattatcttattatgatctcattttgtatctatgtattgcttcaagaaaccaatcaaggggcttcactcacactgaaactaataaaataaaatatagaaataacatcatactcggcaatttgtatatggatacaccttttctttgtcaataattctatttttttattattatgggtgtgcacatcttccaaaattttactaaaatctaagagtaatttatcatgtaaaaaaaatcgtcaaatattttatatgtataggaaataaattgtttgaattttgtatgtattgcaaattattttgtactatatactattatataaaaataatatccttagaattatttgaatatataatttcaaagaaaaaataattatttgattatataaataaataaataaaatatcaatacacttatttttatttaatgcactattaaagtgccccaaataaagtttagtagctaatattattttgatatttgcgacaaaattcacttaacatttataattattatacatataatcttaatcaaaacaagtagtaaaaatattttattttatgattt

SEQ ID NO: 295048 - DNA, 3970 bp, Cannabis indica
tgaaattttgttttttaaaataccattttttttttatttttaacaattaacagtattagtgtcttcactttgactttttttttttgttcaatgagtcgatgatgaataaaaataggtaagggttaaaaaaaaaaaaaaagacaactagcatattatttcattgagaaacaaatgtataatatattgaatcattgatattacaaatacagaaaaatatatagaaaaataattaatgaactcaaaatacttaaattcctgaagaagagagaaagaagatacatgagtactaagtagcagtggacagcttgcttggaagaatcgaattaatctggttgcagcctgcagggatgagataacttgccgttggaggaggagatgagatgatgactgatcaattcgattcaaggatgagtcggtcggtcttcttatttttcgtatcctttagggacgaatcaatttattaatatattttacttatttaggattatttactatttaaggatgaaaaatattttttctaaaaaaaaatgtttattgattcgggtttcgtgtgtccacctgagttccaaaatatgcattttaaaatccaaacatgatacccatatataccattttcgggtgagacccaacttgatcatgcgggttttgtttttttttcggcttttttggcagcgagtcggggcgggttggcgggtttccgggttcaaatgttcagtactaatttacatgaagaattatacataattttggttaacttatcaatgaattgacatgttcacaattttttatgatatttttatgagtaatttaacatgttatgtcttatttaactaatttaatacaatttacttgtaataaatataagagtgcatacttttaaatagatcattgtcgtgttattttaggattagacgtgtttgttagagatattcttgcaatggaagaaaataaagatattacaactctattacaatataatacaaggactaaatgattaattaaatagatgtcacgttacatacacttatatgttattcgcgtttccagaaaggaaacatgtggcattcccaattcaagactaatcaattaaggcatggtcaaaaggccatacccagaagataggcccaatgtgtatggacggatgggcccaaacccatcattggcgaagaatagatactcccgagactagacctctccgaacccaagcaagtattctgcccttacaatacaaagtaactaagaccctatagatgagcatttgagatacatccagaagggcattctgagaggtggcccgatgatctggtataagatgatgtggcagccctctgacaccaaatctcaccgaatcaggggattgtcccctgtgccaaaccctacgagtatgcacacttcgaaaaggaaacttccattgtatccgacgataccttctctgacaactatagtacataaaggcggcacacgcatgccatctgtcaatttcgcatagtctccaagtgtacgaattgcctctgctccatcgattgggcctcggccaatgggcccaaagtcaacgtatcttatgtgtttaccccattagtgggctaaacttccatgcaaactctagcgggtcacggatatacccaaaccttgctcctagtctataaatactacgttattccctcatgcaaagagttgaaaatttattatgtaaacactatagcatgaagctagggttcttaagcttacaagaactgcattgtagcacatcaaggctacttacccaaatacgattgactcatggactaaggttcaatatacctgaaccacgtaaaaattttctctcaactctctattaatataacttaatttctcaactcttattttaatcggttctaaaagtcttggtaaacactttggtgctttcattgagagttggcgagatccaaatacctttgcaggagtctccccatgccaacctgggtgcatggctagggacccatcttgaggtagactgctatgactagggatatgggactctgcggatgtttttcttcttgccacgtgtcataaataatgtccacgtcatcagggctagtttctgggtaaatatttgccccctaagtcgactttacacttgttcaatgctcacttaatgatgcaaactaagcatatttcatgtgaaactaccaattgggcattaatttctaacttctagcaattattactggccttcttaagtgatttctttgatttgagaaactttgaaaattttgaaaaaattaaaaaaaaaaatgcgagatttatttaacttttttgaatttagacgaactcctaaaaagcttaggagtaggagacattctgttataaaaagagagctctctcctcacttattccacacgcatggagtaataattgggggtatgacaattctactttttgctgcttcagaaatttcatatcgtcaggtaattttttttcttctccccttcgtagcgcatgattcgaggattctagggatggttgggaatctttgaaatccagatagagttttcttgtaagctctatttctatttttgcaactgcattccaactggcttgtcttaaaatttctttaagtgaactgaatggagctgttttgagctgaacataagtcgaattcagctgatctaagtcgttcagaaccaagttgagctaaaatatgaactgtgtgaggagaactagaagaaagcctgaagagtacgaccctcacaccactcaatttatgagagcaaatctcagaatgcctaagtctaagaacttagacaaagtgtgtggtggaagagtgatgaccaccaaattgctaactatacaacaatcgaaagtaaaaatcccaaggacaagaacttcacccttaagtttcttgttatttgttcacaatactctgactgtgaactaagtaaaactcatcaaagaagagtatttcttgctgatgttgtagtgagaaaactaagaactgaatgtcccagtgcagtgcttctcagaacccttgttgtagtaatttatcgagatttcgtatgaacgcgggtgcttttttgcctattcacccatggttcatttagactgcaaactacttcagaatatgctcctaaatgaatctaaatagttaccaaattttgcagcatttttcatcttttatcgtctgcggggtttgcccattcctactccccacgaaatcaacatcctctgtgatctcaagagaagtgccactcggaaggccaaaggcttcaatcatcttcatcactatagcttatacttggataaatttacgaagagcaactgtagtctcatgaggattactttgttactcccaccataacttcaagacgcatcacttttcagaaggccaaactgtttaagggaccgactctgctaattgacatgaagcggagagtgaatgccatgttgaataaaatttttgaaaaggagggaaataggcagatgcaattcactgatgacaatctttgtcgagttggactgatggcgtcttgtcagcgaatgtatgttgatgctctctttgaaaatgattcatggaccatgtcccttgataaagagaaaaatgggcaaagtggtaccattcttgcttctgaagaagtatcagaagataacaattcctcttttgatgagttggattattcaggggaaatatccatgtctcttaaccaaagtagtgaagacactaattctgaaagccaggccaagatagagtcttcaagtcacacaaaggcttgtgtgcctgaggaagctggtggattagcaagtcattgatgcaccacttactggagtaaacactagtactgttgaattatgtgttttctgtacgttttcttacaactacttgtttttcttattttttgtagtgacaatgagttttcttgatgagatggctacatgcaccaaaagaaagaaactttcttctaatataagtgtaacaccctaactatcttaggcg

SEQ ID NO: 295049 - DNA, 4518 bp, Cannabis indica
ctctctctctctctctttgctttttgtgaaggtggatgacgttcgacgggctttgtatttggcaggtttttgggtcgtagcttggtgtgtagggctagggttctgggttgcagcttgttttttgtattcgttctattttttttaggtttcttttgattctaaaatgtgatatattgtataactgatctcaaatttttttttagttcaaaatgttttatatttgtttatttttttcggtaaatcaattcttatttgtgttttctgtatattcatttattattttgtagttttttttagagagaaaagctatttttattaatgaacaagttcatttataacaatagcttcaataggggcttgacaaatagccctccgaacagtatcattatccacccgtaaagcgtatctagcaagcccatgtgcagcagagttagcactccgacgaacatagctaagaaaagcacatggaaaagaggacatctgatagataatatcatgtatgagatcttgaaatcggccataatggtgaggaggatgatgaacactttgagatacagtaagagcatccgtcttaataaaatgaatttcgtaattaatatcctccaaccaatgaagacagcaggagatagctttggcctcaatttccttaacaaagaattgtcccttcattggcttagaaatggcagcaataacttgaccaagagaattgggaacaatgcctccaatacccattagaaaaccctcattatttaaggcagcattcacagtaagcttcaacttaccattaagtgggggttgccatggttgggtgacagcaagcgagttttgtggaggcgtaggagagtggctattggctgtgagaaattcgttaatgtagtccatagctttttccataagagcatgttggggagtgtttttgggccatgtaaagaaccattgtgattgtaccaaataaaccacatgaaagtaagaatgagttccatttgattgtcatcatagcatgagaagaggtcatgaataaagttgttatcagtcgatgaagataaagccatgaagatccacagaaaagggaagcatatgccagaggtttttaacagccttgcagagaaaaaatgtatggtttagagtctcacaatggttaatgcatcgagaacatgaagagctctctataatgtgcatgtgatggagttttgcagcaagaggaaaggcattatggagcacatgccaagcaaagatcttaattttgcgaggtaacttaagcttccgaaaccggttccaccaaagaataggcgattgagattgtgagggggacacaacatcaagtaacatagcagcaaaatgatacccactcttaacagagtatataccagtaggagaatgattccatataagcctatcatcaggcgggtggtggctcaaaggaacctacaagatgcgatcgatgtcaacattagtaaagtgcctctgaagagaaacgatattccaagttctgtcatgagaaataagatcagagacaaataagttctgatctgcattgataacatggaatggtttgaaattggtgtgtctagagagccaaggttcagtaatacgaactgaagcaccagtgcctattttccatgaaagaccgctaataaggagttctttcccccattgaatacttcgacaagtataggagggattgttacccagattagaatgcaaaaaatctatacggctaaagtagcgatggtgtaggatgcggaacagaagggaatttggtttgtcaaacaagcgccgagcttgtttagccaatagagcttggttgaaatcaatgaaagatctaaagccaagacctcctatttgcttgcttcgacacaagtaattccatcttttccaatggatagggtgaccattagctttgaacccccaccaaaaacgagcaatcatactttcaacactactgcagaaagatgtaggaagcttgaatcaactcattgcgtaggttggtattgattgaacaaaaactttgaggaggatttctttcccaccaatagaaaagagcttctcttgccaggtagttaacaacttccaaattcgattttttatatcatcaaaagtagcactcttgttatgacctgtatatgatggtaatcccaagtaatgttcatgacaagattggataggcatgccaagaaggaggtgaaaagcattttgatctgcagtggaaatatttggggagaaagacatgactgatttatcatagttaatgagttgactagaggctttattgtaaaggtcaagagtattcttgaaggcaacaagagagcgggcattcgttcgataaaagaggagatatcgtctacaaaaaggaggtgcgaaagagtaggagcatgcctaataatagataaaccagtcaacataccttgctgctcttgagactgaagaaattgagagaaagcttcagcacaaataagaaatatgtagggagaaaggggatttccctgtctaataccatgctttggttgaagatgtccagtaacatgaccattgattaggaaggagtggctcgctgaacaaatacaacgcataataagttgaactataccatggtcgaaccccatcttaagcaaaacacactcaacaaaatgccattcaactctgtcaaaggctttgctcatatctagcttgagagctgcatagctaattctccctctagttttgttacgcaaacaatgaaagatttcaaaagtaactaaaacattatatgtaatcaatcggtctaagatgaaagcactttgatattcaaatataaccaaaggcaagtaaggcttcaaacggagaacaactgctttggatatgatcttataaatcacattacagaggctaatgggtcagaattgagccatagaagtcggaatccgaaccttgggaatgagtgtgattaatgtcttattgatccatgtaggatccttgttatggttaagcacatcaaggacaacagtattaatggtagggccaattatattccaatgatttgtgaagagcataacagacattttgtctaggccagggctcttgtcactactcatgctttgaaggacaacaaggatatcatctttagtaaaaggctgctgaagaagaacattcatttcagtggtgatcgttgtagggatagtgtctagtgtggagttaagagtagaggagtcaatcccattagtggcaaataatttggtaaaataagagtgaacctcgcctgaaattccatggggatcagagacaaaattcccattaagagtttgaagctttttgatatggttgtttgccttgcgtccagatgcacgggagtgaaaatatttcgtgttagcatcaccagcagttaaccaattgatgcaggatcgttgatgccaataagtttcttcttgatcaaaaagatcatctatgatttttttagagtgatgaagatctgaaaaaaaaaatttgcataaaaaaggttagtgttcctaagatctgaaattgttttttgagcttttgcaattttattcttcatgttgccatacttgctcgtgtgccaagattgaagatgtgttgcaatcgttccaatattgttgacaacctgatgcagagaattgatatcagaggaggcccaatgcaatgcaacaatgtcactacaatcaggatcattcaaccaaagagcttcatatttgaatctagacttgtgtttgggcttcggctgagatgcaatactggtggaaaattcgagttttagagctctgtgatctgatgaaaaataattaagatgatgaaggtatctccaaaaacttgctaccaatagtgattaacaaatgcataatcaagacactctttgacatgtaaatttccaagagttctattattccaagtgaatatgttatcattgtgattcacatgagtgagattcccatagttaacagcagcatggaaattatcaatcaaaacaagatctctattagcaccaccctctttaagatgagtagagaatatttcattaaaatctccaacaaccagccaagggtcgaaaggagaaacatcagccaagcttttaaggattttccaaacttcagattttaaatgtgtttctggggcaccataaaaaccagataaatgccatttagggccattgtcacactgaatataacaagaaatatgattcattgagtaattaaccaaagttacatcgatattgtctttccaaagcaacattaatccacccccaaggccttttcttggaacttcaataccattgggaaaattcaatacatttctaattttattaatagaaccagatgctaactttgtttccatcaagaacaagatgtggggagcttactgagaaataagcaagcgtaaatggcggagttttctcgggttccccaaaccccgagcattttagcttatggcattcatggcaagcggcggggttgcgatacactgcccgcaaaactagcttcaccatctatagtagaatgtgttgaagaatctgttagaaattattttacc

SEQ ID NO: 295050 - DNA, 4012 bp, Cannabis indica
acagtctaccgtagcacttaactgtaagtttttggacggaggtgtacatagcaaaacggaatgggagtttagatagtttagccgacctaaattttagtttttgtggttaagtattataaaccgtaaagttcaggtggtttaaccgccaatatccctacattatatattatgttcataataatatacatataaatataaattgaacacactttacagtgtgccttaatctacaatatatacttaattatatgaaatcagaactcgaaattgtaaaaagagtttattaattaaaaaaaaatgagaaatttatttattatttattgagaacaacatgcattttattataattggtaaatggtataaccaaggaattcagtcctcccaaatagtaaaaaaattgtaccattttagaaagaaaatatataacactgttctcagagcagttacagtagatttttctagggtttccattatatacaatatatattatatatagataaatatatatatattaattagcacgtgataaataacagaggtgtgtatgagttatgagttgtattccactattgatgttcatatcgagacctaagaataattcacttcacttcagaactgtatcttatagattatttttgataatatatcgggaacttaaataattatatactgataatttagtatatattagatggaattgtcttgaagctaagtctgcacaacatatcatgtgttcaacattattattttaccacaaaataatccatttgtgtatataataataattttcagtattggtttaggtgcatgaaagtgacaaatatttatgtgtatatatacacctctagccataaaatatgagtagatttcattagatttgtgtttttcataattaatgtcaagaatataatagaaataatgttattaattaaacacaaaattatgtatatgaagaataattcttgtggtataatttatctaaatgaagagatcttcaaaaattattttagttatgtaaagttaaatgtcattcagaaaggcattttcgaaatttgtccatccaaaaaaagaaaaatctcataataagatagatatcgtccagaagggcattaatcctagaagtctatcgtgtccaatcggaaggagtctttacgaagttagtcttcctctggaatggagttctgaatggctagctagttgttcacttttggaagggagttccgaataattaactctagttgttgccttttctatcctagaaatcccttcaacatacgctttggtcttttttccaagaagtgtacgtctcatctggaatcacgttgcttgtgttgacgtggagatattgtttcttggagtttgttaggttggttaagtcgtaactaatttaacaactttgtacttgcaactatcgatcactttaggatctatatcctagatctataaataccatcatactcatcatttacgaaggttttgtatgaagaattttttgtagataaagaagattgttgagtaagagtgtgagagataaacactttgagagaatctaacagagagtcgatctctattgtattgtacattgttcttgctcagtcaataaagaagattttagtggtatttcagaattagagtagagctgtagatcacattgatcatatcaatactcagttcatccctattttatcttcaattatcgtttgtgaattgttaatcttgtcaatgctaattgtttattgatttgattttgcacattagttgtaatttttccacaattctcttaatgtcatgtggttgaacatttgggctgggttgggtacaaacccgaccaacctgcttgggcctgactcgtacaatccaattcttggaaaaaaaaatcgataaaaaatggatgtgtcaggcttaacctggtcacaatgaacaatgaacgggcgagttcgggtagagttttcacatgtgaccaggtccaagttagactcaaacacgcccataacctctccttttctctaccactttaattttgaccagattgccccacccccaccccctctccctctcttccactttgattcaagccaaacccccctactctcaggttgctggagacttacccccctctccttctctatcttccccttgtgattcacttggactagaccatcgattttcacccttgtacccaaactagccttgccactactcccagtcgccactaccccctcctccttctttcgcaacaacaataagaataacatcatgttgtttttttattatgtttcaaatttaattttatttataatatcatttacaaattatttgaaacaaaaaaaaaaacaacttttaccaacttgtgcacttgtgaatctggccaacccggtcattttataggcgagtaaatgctttttattttagttcaaaacccataaactcaaaactcaatcaacccgtctgatattcaactctaatcaggtgtgtacatatattatataaagtttcaacatttgtttgatttgaagagtaattacaataattgttgacaaaagaaaggttacttagaacattgaattatattattttttgagtaagaaaagagatttggtgatgtaacgttatcttttagagtaaattatgtaaattaattagagtgaagaattttgaaacatgtcccatatcgtttttgtggctatctaagttggattactatagccatatatatcaccaacttaaaaaaaattccatacaaactgtaatacttcaacattattgaggtttgtagaatttagtagtgagacggcgcgaaaaagaatatatgtatttattttattttaaactaaaaagagaatatgtagactaaaaatgagtaacaatggtacgagtgctaaattaaaattaaaagttgttgcataaattttcatacaaacgatcactgtatcactattaattaaaaatatacaaggatacaaataacaaaggggcttcaacaacacaaccaactctcaacaaaagggaattcagttacaacaaacaactcaatactctcaagattccaacacacttcataacagattatcacaacatcttatctgagtctcaacaactaaatacagtaacataacagtttatactcaaccatcaaaaaattataaaagaaaagaaaatcatatatgagagaataaagcttttacaacctgcatttgtgcattggctctagagcttttagagagagaagctcagctctaatttagagagagaaaccactacaagaaatgtcacttttgccagtatatttttgtgctggtaaaagtttagtattgcgctggtaaaatagaatttacttctgatgtgttggcaaaaggggttggcaaatcaacgttggtattagaacttttgacagcacaaaatgaaaagcccgggcaaaaatgacttctcccagcgcgtcaatgtgttggtaaaagttagattttagccactacaaatgtgcactggtaaaactttaacatttttgccactgcagtttgcaaaatgtattggtaaaagttacttttaccagcgcaaaagtgatatttcttgtaatgaacccaaaaatacaagaaagaaattgtgagaattagagagaaaatagagagatttatacagagttttaagcagaaaatagagagattaaagagaagcaagaatgagattaccttgttgttttgtagcttggaatctccagcaccattgttttgaacccattgaagttgatagctcgtgcacaattaggcctttgagggagcttgacggagatgtaaccttggttttagggtgaactctgagaacaagttcttcttgtattcttcttttctatttgtttgtgtatatctctaatcaacaacactcaatctagattgttgtagttgtgtgtatacttttgtgtctctgttcttgtgtttggttgctgcaggtttggacggttatataagaatatttctatattgggaaatatatttctatttaaggaaataaataaata

SEQ ID NO: 295051 - DNA, 6882 bp, Cannabis indica
aaaaagatactgcacttgtatcaaaatcaaggtaatagtaaaccaagcaatggaagaggtgttgattatctaatgaatgtgagacaaactacattttcccttgtacataatcttacgatggacttatttttctaaattttcttgcaacattttgttaggcatgggttgtaggaagacagctgtcatgaatgggaatggctggattctcagtgagggttatttggtggttagactattatttaaatgtggaggtggggtgagaaaaggggcaagaaatgtgtgggtgaattgtggttagctttgagctctagggaagttccaggtccctcaaaagcacctgggttattcattgtattttcccctcagttctgcaacagaatttctatctttggcctattgtttctctgttaatgtgtttgttttgggtttggtttcttcacatttttaaccttatagagcaatagcctaacttggacacacctcttaattttctggagattgaacattatacatttccttcttcttgtaactcatcctctgatattcaggtggagcgatctcttcttgtaactgggtttggttatgagcacgatgaagcatgggccaccaacattgaattatttaaagaattcactgacatcagcagggtatgaattgatattcaacctttttgtttgtcagaaatgaaaatatatgttttcgttgcttctcctactttcttatgctgttctctaacatttgatatcagttcttttcggtgttcaacttatagggtgtaagaagacttggtgctgctgcagtagacatgtgccatgtagctctaggaattgtggaagcatactgggaatatcgtctgaagccatgggatatggctgctggtgttttggtagttactacatatttatattctgttttacctttcgtatccataaatggacttttgattcccatgacatattatttcgtgcctttgggatcttgctagtaagctcaagtttctttcctgcagcctacattgttcttaatatggaataaattaggacttctggtgaccactgttgggcttttcaattgctcattttgtttatatgtgttggagcagatagttgaagaagctggaggagcagtaacttgtatggatggtggaaagtttagcgtatttgatagatctgttttggtatccaacggtgcattgcatggcaaggtttgtcataacatctaatttttgttcttttaaataccatcattatttcaaggtattaaactagatcttgcagtttaaggtcttggcaacgcatacacgccattcatttttctggcggtagtggaagattccaaaatacttttgatttgtattatggggtgtttggtgtactcggtgggttttagttgagtaagggaatctcaaactctagtgtttaaagagtttgagattactccaaaatgatgggcctgcaaacataaattctctactaaaatcataccaaacataggtttggttttacattcccattgccaagatcccaaacccccataaatagtatcttcctttgattgatcaacttgtctattatgaattttcatcaaactgtgtctgatatctacccgaattccaacagtgaggtttattcatgtatccaaaacaccagtacaagcccagtgacatttttttcaagcagacttcactgaattccaatcatttcaagccatattgagaataatgccggtgtgttgaatatagacgcctgatagatggctgtctaacctaagatttctctctatctagacctgcccaccattttatacttgtttttgcacaggcactgcagcagtaatgctagggttgttcttgtccatgttgacggtcgtcttaaacataaccgatcacatctgctgacatatgctctaaatttaatgttgtaattggacgaattaaagattacatggagctagtagtttgaccttaccttagcaatgttggtgaggttttggtttgatgcagagattagacagtgagaattgtggcgagtgagggaatgagagtgaggaacccaccttgtaggctaatagcacagatcatgtggactttcattatgggtttagtgtcagtctattaagtatatttgcttttttctttctaaaaatgatagtgagagtggtttagacggctgtatgtttcctcttgttcatttttctttctgaagtgaaaacaattaactagttgacttgattgatcaagtattatttgtttgtgaaatgcagcttctggaaaggattgccccagctacagagaaactcaagagtaaaaatatcgatttctccttgtggtacaagcctgataactacctcacagaactttgatgtggctgagagcacggtagtagttttcccggcacgatgggttttcttttgacaaataactggagccaatggctgttttcttagcgttcacttcacaatgccctcaaattctcaagagccaatgtatatttattacaatgtaacctgtaattgtgctgtatatatatatataatacaatgtatatatattaatcatattctcttgttttcaatgtaacagatgatggcgactctagaatcaaaatgtgaacattcatgatgactagacaaaataaggaagacctcgttagaccaggtttagacctcgttcggactaaataaggaccttgttcggagtaaatcaattcggatataattcgttaccttttttttttttttttaatatataattcgtacctcattgagactaaattcacactctggccatattttcacatcttattcatactaaattcacactaaattttgaccaaatttacatctcattaggaccaaattgacacttaattcctaccgaattcacacctcattcaagctaaatttacacatgattcaaattaaattcactccatttcaaattgaattcacacctaattcaggccaaatgatatgtgaatatagtctgaatgaggtataaacttcaatgctttgaattaggtataaacgaattcacaattaatttagaccaaataaggtgtgaatatggtctgaatgaggtctaaatctcatttgttttgaattatgtgtaaatttggttctaacaaggtcgaagcttggtgtgaacaaggttcgaacctagcccgaggtctaaacatgattcgaatgaaaattctagtatcttgaaattatagttaaaattaagatctcaacataaatttattttttgccaaattttttgtccaaatcagttcaaaaattcaatctacattgttgtataagaaacccataacttttgattaacaagaatacatactcgtaataataaaaaaattatttgaagatgagaatttgacatgaaagtatctaagagtttctatgaccagcggatcatggtacaaaaagtgcattggttttgtgtcttctttagttaattttatagcttgatcaatgagtttgggtcgttgtgtaggtagttaatttagctcccacacttcatcatcacgatccaacacttggacataccgcttcagcttcccgcgattcgttcctcctaggtggggacccccagagatcacgaccactctcccatttggtctaggagggtgctgtggttgactgttttggttgtctaggatttagagctaatggcacatcgacttgaaggtcaggaactccatgagcttattctacccctgtgagaggtacttggcctccgaccggtctttactgcatgcgcgacaaatgatttttgagccactcgtatagatggcctaattatatcaaattctcaattttgtctcttgaagacttccagtcattcgtatcatgtccaatgtcattgtggtacatgcatctcttgttagggtcccttttgaagcggtcttggaacatgggtagagacttgcggtagtgtatgttttggcgagtcgccaagtatacttgttcctaagttcccactagtttagtacgttgggtgtatagttgttcatctttgggagccttcctcccttttttatcatcaattcgtgtgcttcctttgcttgacctcttactcctccttgtctgttgcgtgggtgttgtactggcagctagagatgctgcaggagcggagtactaaacgaatatacagggagtagcactgcaagttgtgggcgtgccatactcggagtaggttggcgccacagaggaaccttgggaatatgccactggggcttggaattgtacactggagggggcatccctcctgttaattgcgacgatgtcaggtgacttactcccggatattgctttccgtaagcatagtttggacctcccactgggtaatacccctctgaaagtagtaatgctctcttcaatgttaatgtacttcttggcccatttttgaatgttctttaaactatccatgctttcttgttggacttcattttaaaaaaaaggtacctgtttcgattcctgcttgtaacagggccaactgctgcctgtcgtctactttttttgttttatttttgaagcctcttctttggatgttttaatgaggggttttaaggtctctgtaggcaatttctcaatgtaggttagggcactaagttcgaggttgaccatcctggcgggacaaaatgtctctggatgttcatctgcaacttgttccagcaacctatggagcttggttctaactttttgaacctttctttagcatattttcctaaagtcagagggaagcacaaacacttggtgtcattactgactcgtaaatactatcatgaccctatttaatcgagagagatgatcactagggtcggtatctccagtatacttggtcatttcaggcattttgaaattcttggggagctcaacttctaacgtgttcttagcgcatggcttccgatcatcattatcagactcggagtcatcacgcctctatctctgggatactttggccaaatccttcgagagaatggcaagtttagctagtatttcttcatttagtacatcccgctgtggtgtcgacttgcctcttctagtgtttaaacgaatcatgaggtccccttggttggccttggtcctttctctcaaatcaaccagggtgtcttttctgccaatcgctcggagttgtgttgctttctttgcctttagtgtactgatatactttggcattccttatagtcttggggtttgcacttccttcaaggaagcttattcccttgctgacttttcccttataggaggtcagaacacacccctttagggtcgcgatttactctgctcccttggtactgtaatagggtttgccattgaaggaggagggtcctctggaggataccttatttgacttggcaccctttccttttgtttcaagtttttctaatgttgggaagaacctgcttcttcattgcgagatataggtggtatggcaacaaaatttacattgaggcttgcagtggtcaaggcttgtctcatggcagctaaggcttcctacatccttctgttagtctctttttgctttgccagcttagcattgtgttccatggcttgccgtcgtaatgagacaagttcaacatactcgtccttctcaaagtcctcaaggtaaccatctttcgagtaatctagattgttggtgactttcctcttccccaacacgagaggctacttcttcctctagacactcttcaggattagatggcatgcattgttctttgtttctggtgaccaccatcgcaacgaaagaatttctggtgaaagctttgtacaacactcaatgaaagtaccataatgttgcctgagattttcggtaactatttaatcttattttgagaaattaattatgtgtctagaaggatatttttatgtggttcaggtgttaattaatcttagtccatgagtaacttgaatttatgggtgtaatattgttattacaatcgagtctttctttctgttatagagttggctctgtttgaattaattttttcttgaccccatattttatctcttacattcttcccctatttataggccagaatggggaagcatatcagggttacgagtgcatcgtccctttccccctaggctctccctagtctcttcctaggtataagaaatgatttctagttatgattgtatcaagtatgatctaaagtaggagtttggtgagacaagactagacgtatttgcggttgatgggacagtacaataagagtttatgggaaaacataatatcagaaaaataagggttaaatcttaaaaacttcatccaaaaaaaatatatatctcaaagacatcttttttttatgtcctaatccattttgatgcctgcacggaaggagtcatctacagtgctttgccttgggaaatttatcaggagtagaaatgatctatagatgtttgaggctctggaaggtcatcatcctcccggaggctgagactatgaatttagttttgagaactcttttagggctattatttgctcctgcataccaatatgcctcccaaacacttttatgatctggaagttgatatgaatcatttctcttttattgcgggtccattagacacatgactaactcccgaatggccatgtatttaatttcttaaatggcaatatattttcttatatagagtgtaaaaaatactgatgtagtaatatttatttaatttatttgttgatctttgtattttatactgcaatagaataatagtatcttgattttttttttttattattgtaataataaaatctctaaccgctgctaactaagaatgttatgtttgtttttatcaagaggacattatcagtttgatactttgagaaattgcaacttaattttttttatatatatatactaggtgaatgtacgtgccgaacca

SEQ ID NO: 295052 - DNA, 2296 bp, Cannabis indica
ttagaacttccctatattcatataccaaaaatatataaggaatgcacaattaaaattttctccaagagttatttcggtagactctttatttaatttagtatttgagagtgttttagttttttttttttttaataattacgtacgttgtaactatttatgatgacttataaattttcagaaaattctaaataatataacatcaaaaataatatatgttcaaacaattacttgccacgcatataagtaaaaataattacgcatgtaataaaatatttgaatcttatttttagtattgtaaactatttcgggcccaaaataaaaaataataaaaaaattattaaacttttatttaagtaaaattaagtgtattgtaaataatgtcatattatacaatgtcatgggttcgaatcccgggccctgcttacactataccatttccctctattcataatttaatagtagtttgtttgaattttaatttgagtttcaggcctgcttttagtttcatcatagcattcatgacagttatgggtatgactattgcttttgccaaagatatttcagatattgaaggcgacgccaagtatgttatcatcctaacctatttaataatcactggaaattatctgatcaagttaatattttaattttcttaaaagataattatgatattttttcagtgtaaatcgtaaaagaaaatagtgatgaccttatcgttcacacaattttaattaaatatcataaattaacaataataattatgttaatttgtagatatggggtatcaactgttgcaaccaaattaggtgctaggaacatgacatttgttgtttctggagttcttcttctaaactacttggtttctatatctattgggataatttggcctcaggtatgaatttaaatatcattatttgatactattatgtatattgaaatgaagtattttgggccataaataaagtttaatttacgattgtaaataaatacttaaatttaatttttgacggcagtaatacttaagttatatttttaaaactttgtaggtacttcgttattaaatatattaagtaaattgtcacgtgacaatttcagattgatcgaagatgaatttttattttttttttttaagaaaataatttatatgtacaataagaaaataacaggtataatgacttgacatttaacgttcagtacttacacagttttacaaatataacttagatattattaccgtcaaaaattaaacttaagtatttatttacaactaaaaattaaacttaaatattaatgtcccaaattactcaatagaaatttcatatataccagtctcatatacaaataatttaaaataaagcttatagatatgatacatatgataatattaaatgcataatttaatgcactatatatataataaaatagaaccattgggtgatgtagtatatataagcttctcaatcttaatctaataattatatatagtgactatgctggggtgaccacaagagcattccataacagaacaaaatcatcagtgtgttcatatttcttatatttcaggttttcaagagtaacataatgatactttctcatgcaatcttagcattttgcttaatcttccaggtttgccaccacaattaaattctatttcctttctctaaaagaaaataagagaaaaatgttatattatatatatatatatattattaaacaaaattatacctaaatatcgattttaatttgtttaattaattttgtacagactcgtgagcttgctctagcaaattacgcctcggtaatatattctgaataaacacttgtcttattattattattaatttagaaaaaaaaacagtaattttctgataatattgaatatggatgcaggcgccaagcagacaattcttcgagtttatctggttgctatattatgctgaatactttgtatatgtatttatataagaccataatataacatatatatgtttattacataaaattgggacacaaaaacgtcaattatttggacaaaagtactcagaaagacctctttcactacaaggggaggccatttagttatacttgggtttcaatcaacaaatttataaatttttaagattttatttacaaaacattttcatgtgtaattaaatcgatcgtcatttattttttggatacaacttggttcaacttattttaattagagtgcttcgtaatttaactacaattatagaagggcattttacaaaaatactggatttggggtaatagttttcaattttactgccacacg

SEQ ID NO: 295053 - DNA, 2649 bp, Cannabis indica
atatttaaggtaaatatattaaagaatctaaattcattgcgtccttctatgcggaggattctgcttagctagcaaaagacattctactcggagcattaagcacaagtctagtttagatgcttactaggaaactttgagtgtagactcttctagatagagcatctggaggcaaataacccgttcaggtcttggaatgatcttcatgtgtcaccttattgggtgtcacgtcatcccatgcgaaaattgaaataatatttgcccccaagttcgtgtggaaacaaccgctcgtacgtgaacttattcagtatgtaagttacaaattattggttgtctctttagtatccttagcatttaatgccttgcataggaaatagaatcttggctattgtgagtaaggttacataggaacgtgcttctgatggttatactctttaatgagtacttatgagtacttattgtcctttcttacggggggggggatgccaaatacccctcagacaacttataaaaagggaaacaagcttcttttttttgttgaggttctcatatttcaaagttacacaaaccattcctagaatgattttcataagcttgatatagtgagtaagttttctcaccatttccttttaattttgacatatttctattttccttaaagtgttctagaaaatctagattttggaacttgttctttgtgagtagaattagaattttcaattggtaacacgaatgcatgcgcttggttcttggtctttggtttccaattggaattacaccttttttattgcgaatttcttgtaaatccttgttcggcctcttaactctggcccttcggagcttctgggtaatttttgagtttttgaagctttctgttttggacttttcatcgccgggatgaatttttttccctttttgatcctcaaatccttttggtcagagtatcactctcatatgttcggtcctcacctccctctccttttgtaggtgaacttaggaaaatttagggaaggtgaacaccaaatagttagcaatctactccaactgctccacgaaaaacaaccaagaccccgagcagattcatcatcagcaagtggagattcattcccttcaagcttcgacgagtgggaagtatctagtggttcttcagagtctttggaacccaccgttcagcaccatcattaacccaaatagataggcagcaagtggttaaaaggttcatttgggaaatcaatagaggtttgaggcaatacctcctgaccttttgggcatataaggtgtgcgcaagcatccctgacacactttcggagggccacctagggccttggagaagaaactccacgcaggcaaaaattgcaattactgtagctaaacataccgtcaagcttactcctctacccaaacccaaaagaatggcaaagacttagcaaaacctgaggaggttgctattgaggatccccatctttcctgacttactgctatggctactgtcgagtttgccaaaaagccacagaacgaacctgagatgcctggggctgctgaggaaataggggaagctgatggccaagaggaagcccttgcaactggttctcttgaaggtgaaggagaagggaaagaggttcctcaggccacaccgtacgagggatacaatgaaatataaatcttatttagtagtattcaatttcaagtccctgtgatttgacctcacctatgtgagtactgctgtactgcttgatacttgcacttgcgtagctttacaattttatataacaaactctggtatatttgatctactcatcatgcttctaaccatatccattagagtgtgatttcttctttcaacaacacaatttttctcaatttaaccaggcatggtgtattgagaaactgtataattttcttgtaaatattaagcaaaaagcttcatgtgtgtcaagattttgaataatgatcataatattcttctccacgatccaaattaataaacaactttgatgactctttttaattgtttctcaacctcattttgaaagattttgagtttatcaagagcgtcaaatttttctttaatcagttaggttaaggcatatcgagaaaattcattgatgaaagttataaaatacttatttattaatttttttttggtaaaacgtagtggaataagatccactaatgccattgtagataattcttaataaatattgactacggttagcaatcttctttcttgttttagtcaatttccacgagcacaataaacacaagtatcctaactagaagcataaagaggagaaagaattttaacttgaagtaatcgatcaactcttgcttcaaaaatatgatctaatcttttgtgccattacaataagatattttcttaatataaaggaaagctaagggagtataattgtaaagaccaatagaataaaagtttccaataaattgggagtcaaatgtaatatcaatatgattattgcaaaaagaaaaatattatctttgtttaaccaaaagcggaagcgaaactaaattactcttaaaagtaggaacaaaaaaattattgttcaagacaatcttaactctaaactgtaattcaagaataaatgagacaacttagataacgtcaatttcaacataagtgcccactttaagctt

SEQ ID NO: 295054 - DNA, 4073 bp, Cannabis indica
gcctactctctctctctctctctctctctctctctatgtatatatgtgcatacatatactgttgaattacagcgaatacaagaatgaataggaactttcatagcatttcatatggttttagagtgtttttactgttgtgattcagtgtacaagatggagttgctgaaggagttattgtgcccccaaattcttctggggatttgtcatcagaaatagaggttgctgctttcaaacgcctttttcctcttcgtttctttgaacgtcatctttctgagtctataagacctgatggtagagctcttgggaaagctagggattcaactttagctttaggtttgttgaaattgaatttgtatatgtattcattttcctatttgtattttagttgatgaaactttctaactcaaaatttggtttactctttcattgtaggagctgttgcatctgctaatggatcagcattggcaaagattggtttaactgtgattgcttctatctcttgctcgttttgttttgttttgtgtgttataggttagttggtatagttgagataagagctttgttaagtggggttcttttctttgtgtagacaatgttggctgctataaaaatggaagttatgaccccttcaaaagagtcaccagataagggatgcataggtttgagtttgcgtctcttgtaatgtttattacattttctttcactttagtttttcgggtgttaacttttggcttgcaattttcagccatcgagttccacatgcctccgatttgctctcctcttgtcaggccaggtaggccagctgaggtagcaccagttgtgtcgaagcagttgtctgatactattgtaaggcatgtaaagtatttctctattcataatttatttttgcttaatttgtttcataaagacttgtagttttcttgttcaaacgtttatatgtaccttggttgttgcagttctggcatgatcgatttggaggaattatcgttggttagtggaaaagctgcttggatggcctacttggtaatgcattacctaaattttaataacattaactcataatttgatctgccatgtatatatttgttaaatgcgttatttttggtttccaatgtttcttcaaccataatttttcctaatcaactttctttgccaaagaatgaatcttctatgattatattgtcttgattggatgcatcattacaaactaataatactgtggttttccatggtcaggacatatattgtttggatgctgatggtgctctttttgatgctgctttgctatcagccgttgccgcgttttctcattgtaagaattctatgtaattttatcattagtaacctaagctttgcaaagatttgggatactatgataatactatgataaggctagatttattcagcttccttaaatagtataactgacaattgtttttataaactaattatttttacatattgttttaaacccaatttttcttgttagtagtaagttgatacaaaattccagccttacacaatctaatagtaaagaagaaaacacaaaatacccgtgttcatgaaagcaagcaccgtatgtgctgcatgatattccacttatcttctataaatgccagttctattctaaccacgtttggtgttttaccatgcgtccgtaggcagcaaaccatttcagtgtaatgcaagttagacttgggtaccatgtcttttggcttgacctcaaagtttagagctatgtaaaggtagtagaaagcttgtaaagttctatttttcgggaccatgttgaaaagtttgctatccaagtttctttaggtcttgtagctgtatagataggacattctgcctgcccatggaagtgtgatcaaaagccactctcagttaaaaccaaaaaaaaaaaaaaagacagttggaaagttctgcttgagttatagctttatttttcagggaagggtattagtcgatgatttacaagatctttaatatattcatagttgtgtgtagctatcttggatttgagttacattcaatctttatgtgtttattttgtttggtatatgaagtttcttcatgtccaggtttaaagatagccagaaggatagtatgcatcaattagatcgcaattttataatgtgaaagtactgttggctaatatttcaagtatagggaatagtatagctttaaggaaattgtttctcaaaaaacatgaaggagcccctctgtttctaatctaaataatatacatatatatatttaaattaaatttctttacatcaagtccaattggatttatgctatgtgaaaaactatccctttatctttgttatttcgttgccttgcagtgcagattcctgtagtttccatgaatgatgatggaaaagttagtgttgtctcggaagaacaagatgaaggaagagatgcagtgaataaagagagaagaaaactcaaattaagcaggattccattttcattaacttgtttacttcacaagaaatacatattggctgatcctaccgctgaggaagagtcgatcatggatactcttgtaactgtggttttggattcttctgatcaacttgtgtctctttacaagccggggggatcagctctcgccaatacattggctgttcaggttagtctctaagccttaataataattcatcgggttcgataaacagagtgaggttttcggtttgataaaacaagagtctgatgtttgtttcaggattgcattgctttgacaagacaaagagtaaaggagctgcaaatgattttagacgaaacgatttccaaaatggaagttgattagttttattcttctgagggagttgtcttattattagatgtatattcctttgatgagaaagatttttggaaagtgtcataattttggtttgtctatgaactatttcacaatcttctcgtctttgggacatttaggaaaaaagagctagctagtggagaatgaaattaccactatgtggggtggtctttatagattttggtattatttatttccacttagtgaactctaaatttttgccataccctttaagtagataaattttgacctagaatttagaaagcaatatcttctcaaaacaaatatttagtagttacaaagggagtctcattctgtggagaatgattaaaaaaaagagttctcttctcaaagtaacattttttttatagctcttccaaatatatgtattattaatatttttttagtctttgcactatattgttatgcaaaatagagaacatacaagctaaaattgttcaatgctactgagaaatcggagacaggatattggaaaatgttaagggcaaatacggttattgatgtattttaatattgattcttacttattttgatttaacaaagaaactaataattaattgtaagatagtttaattgagtatcggacatgaataattgttgagaattgacatcaatgttattttttaagttagcaccaatgtcaagttttgacattaatattgttattctttaacttggcatctctcccaatactcacattattgttattcttattctgattttagttacagtttagtaaacgtaaggaagatcgaaaatttgaatgaaaattacttgttgtatggtgtaaatgtaatggtatggatgttagttcatttattggcatcttttgttacttgagtcaaggtttggaatctcacaactttttattagaaaagattatgtttggccttttagaaagttagttgattagttttattcttctaagggacttgtcttatttatagatgtatattcctttgatgagaaagatttttggaaagtatcataattttggtttgtctatgaactatttcacaatcttcttgtcttagaaacctttgggaaaaaagaggtgactagtggagaatgaaatggccactgtgaggggtggtctttatagattttggagtaatttgcggcaaaaccccctcaactatcaatttacttgcaaaaaaccatccaacctcatattttggtgggaaaaccctccaaagtactgtttcgtttacatttttaaggtgccgtctat

SEQ ID NO: 295055 - DNA, 1151 bp, Cannabis indica
tattaattgtatatataattctttttaaaatatataaatgtatagattagattggattagattgacattatcatctaatttgtaaattttagatttttcaatctaatttaatttatccaagagcaaatatctgtacttagccttaaattgagtattttatgaacaactttagctagtataagttatttcatatttgtcgtgaacaaagatgtctaataaaatatttatatgatgtactattttatgcaattgatgatattctatatcccgaggtatagtacctttaaagcgcactgcagcaggtataattttctccttcaattgttagttacattaataaagtgacaaattcagtcaacaaagataagaccttgcatattcacacacgaatttaattagacatataaattaccatccgcattaaatgatgtggcacgcaccctcaaaaatttgatttgtcagaagtaaataaccataatatgaagctgatttacgtacactttttcagtccaagatctcaaaaattgtaaagaaccttcaaggactatattccttttttttttgtgcactaatcaaatcatctgtatttctcaacagccccgttcccaaacgagcagatcactcttgtatttataaacttggcatacatgcttcaaactttacactaagtaaaaaagaccaagacaaaaaggatgataaacaggaccaccaaaaatagtatcatcataatctggcctttcgcaccagccttcttcatgaccatagccacctttttctgcaacaaaatcagtccagacgttttcatcctcttatgagaccactaatatatggcattctgattgccaagctaaatagatttacagctaagctcacttctcagaagttggaaaaaatgaccagttcagaacatagaaagaccaacctgaacaaagtcaagacggtttgatgtgctatccatttccatacccaattcatctatgattttttcctgcacataaaatatatattatcaggccattcaccgtgctctttcagtcctttaaagattacatcaatttcttttatacattatatatatatatatatacatatatatgtaaaatctcagcaataaaaatgccgtatgtgtgacatacctatgttacgtacgt

SEQ ID NO: 295056 - DNA, 1064 bp, Cannabis indica
aaaaaaacataaaaatgtaaaaacatttacaaaaaaaatagtattttaattcatttgtgccactttttatatagcctactattaaactacactgttttttaatgtaaccgcaacacgtggtttattggtaaaaccatatgaaaagtggtacaaatcattaattaaaattctagttttagatttatcccttaagaaaattcaataaaatttgtgatgttattaattagacacaaaaaacactttttattacccttttcttttcccaaatataacctaaaatcataatttatacctttatcaaaatccaattggatctacaaattataactcttttttttttaatcttgtttgacatgttgaattattattttaaactttacaaatatttcgaggatgatttaaataattacatacgatttacactattatataaaaatatttaaaaataaaactatttaggtattgaaaatacaaagtggtgcatcaagaaatacctatttttgaggaatgcatcataaaatttccccattccctatttagtaactttttttaagggacaataactagggactttgggtctactaattcatatgtaatatttctcaaaatttaaacttaacggccgccttatagcgaggtgtagtggacagaacgacactgtaggagatgggttctgccagagatagacaccttctctttaagcacgaatgcatcttttgtggcagaaaggaattgtgagggtttgggtggagtgatctgagatgctaatgtggttgttagggtggcttcggcgatggggagggggtcgtttccagttgttgtggtttgagcatcttgtgatcttcggtggggagtgtgattcttcaattgttgtctcttggattgcaaaatcttctagtaattttgtttttgcttgataatgttattaattcatttgttgattagttgttgttagtggtagttcttgttatgacattctacattctgcaaataatatagcccacacctaactcagctctgaaatttagtgggctataggaaaaaaatatttttaggcctttatt

SEQ ID NO: 295057 - DNA, 2162 bp, Cannabis indica
aggttaattataacctaacaacaggggcatttgcattcctcttagtcctagacccatgaggcctccctcgtcaatgccttataggcggatcaatttgtgttaggggtacatcatctccagtcgccctgccttttacaacctcgctttccaattctgcattccttcggtttgagttggctaatctttactgaagatgtggattatccagttctaccagaggaacataatgagtggggtcataggctccacgatttcccctttctggaatttgttcttcatttttgttcatttcgaaaccccattcaattggaccttttccaacattctggccctttggagggtgagccccctgaggctcttttccagggcagtgcaccgtctcttcttgttcatcattgtcattttgggaagtattttccatggcgggaaaatattagcaatattcggaggagatgtgttttctacaggttaattttcaagaggctctcaatgaaagcactaaattgttaatttagaaattcgttaacattaaaagtgaaaccttttgacaattaattagcattgaggtattaaatgaaacttaataaatattaaatgcaaactattaactcagaaattcgtcaacattaaatgaagacttatgctaattaatcaacattgaggtattgaatgaaacttaacgaatattagatatagacaaagaatctttaacatagttttatagttaaaattctacatactctacgaatcacttttattttctgagttactatttacaggatataagattggatagaattctctaagtatttgaattattgaccatccttctacaatgatttctaccactatttatagggattagatatgatagttattttcttgtgatcttatctaaatgacaatttttcttatgaaacatggtcattctctacatttcatatagtttttacatgtgggaatataatgaataactgcctaaatttaaatgatacatttaataaccactatatttgatcttatcttgaatggttatttattggcccatccttttgttcaatatttgtactcctcgcaaataacacagatgagttagcgtatttcgcgcaaatgctttgtacaaaaagattggttcgttaaaaattatatctgtagagtttgctttaaatgaggtttttgatcagttttgtacaatctttgcaagtaagttttttcaaattgtatctcttgtgcttcttgtgattaaagcactaaatcctaccacttgcttagctttcttcttcttgctacgttcatattataatgatacgagtttgtgttgatactttaggctcaatttttcccgagaaggtataggcctcttgtcttgctcatttcaatcaatatttttgacttaatcttattttaaaaggtaagacctaaattctaaattatattagtacttcctgagatgcattaaatagtacatcaattttttaatatgcaagcttatttattgtcaaattcctatacacgtgtcgtatttatatttactgctcaaaacacatgcttctaaaataaaagattatgaaaccttacatttgttcttatgggccaaaaacttaggacactttcttttgatgtgtccctttcctttatagtaaaaacatgtgcattagtttcttggaattttatgagggacaccccaaaatttaattgttatgttactgctttgcttatactaacataatctttactcttgtagtgtgaggaagcagcaagactagctgcagtagtattactattattaggagatttatcatcatcctcagaaatattcaaattattattcttattagcaactaaatcatcagcgttatgttcaccattgtcattaaggacaatagaattttcaatatttgcaccagcaataatcactggaggattatgatgaccttcaagcaaatcttgatagtcttgtacctcttgaagaagaatatccaaaattgttctcttctttgtattaatagaaatcatgagtcaaactgttcaggataagataaatataagtctgagtgttaatctcaagtccaagaatatacatttggaacttaatgaccatcttttgaagatgagtgttaattatgttagaatttattggggtcacaattgtatatataaaa

SEQ ID NO: 295058 - DNA, 4472 bp, Cannabis indica
aattatatttcaagcttgaccacaaatacaaatttatatgtacgtatttattaatcacgtaataggattagtggatttatgtacacgtgacacgtggattttagaatgggtacacgtacgattgaatccggcaaataaatatgcggtgctttttaagattgagcccaactatgactcacattaaaggtaagaaagcgccacgtgtcatgtaatacggtctgactttcaacttagaaggttgaaaatgccacgtcatatagtccaactattcaattcaatgtgagtcggccatgcatgtgatcccaacgtccaacaatagtccaacatatcatctctgatgtctcccatgcccacgtaacaccccctgatcaaactcacactaattaattaattcaactaaatgggtccctaaaataatctcatctacaattttgcctacgtgtgtatatatacatgtattggtagaatattgctgttatacaaatagctcatacttaattatactaaattaatatacaaagagctcatactataatatatatagtaatatataagataacataatcttaatattaagctttaaaatatttcatctcaaactcaacaataaatagagtaatatatacattttatattatattaagttcttacagtacattattattaatgcgaaacttaatatttataaaaattttattactaattagttttgaaataaaatgaattaataaattttcattactaattaattttgaaataaaacccaatacactttaatcacatcttaatctcaaattcacacttcaccctattgatatagttctttcatttattttatttgaataatgattataaaaaattgctattcaatggggtacttaataacaaatatgtacacatgtgaatcatcaataataattttcattcataaattagtgacccattaaatcaaatatgaacatttcaaggttttattatgcgtgattgctattttccactaaagtatacttatatatagtttgagaaagctactagatatattaatgcttttatccaataaggcaccaaaccaataatttatgtatagttctatatgactcccttaagatagctaggcaaaattttcatttgaaatatagatcactaaaaagggaaattttattattgatgaaaaaataaacttccattaatgtttcgaataagaaattataaagacttcttcccatgtgccaagttatattagtcatagtttgaaaacgataagacccccattttattaaagaggaaatttttatcaatttttctccactatatggcccaattagaaatcattattattccctgcttttcatataacacaaccaataagagtgactaaatcaagtgacaacagagagaaaatcatttatgaagttgaactaattaattacaaaaatataaattctaataataaatggataattaagagaagaagaagaaaaaataaacattaggatagtgggcccactacatgtgatatgcacttgatttttcaatctcaatcacttgtgtggatttggctttggatttgggttaggatttggcttagctaggctggctacacatacatacgtacctcactctctctttaaaaatttcctctataaatagaggcttccctagttttacttctaaatatcttaaaacagaaaaaaaaaaacagcaaaagaaaactctcttctctcaacaatggcaattactcaagcattttattccatggccttattgactactcttcttttaatcacactacacattcaagccaccgccgccgattacggcggctggcagaacggtcacgccaccttctacggcggaggggatgcctctggcacaatgggtatgtaaatacacataaataattagctagtgaatttttttttatttaattgtaattaatttgtgttaattacttaattaattaatgcaggaggggcttgtgggtacggtaacttgtacagccaaggttacgggactcaaacagcagcactaagcacagctctattcaacaatggattgagctgtggtgcttgttatgaaatgaagtgtaacaatgaccctaggtggtgcctccccggaaccataaccgtcaccgccaccaacttctgtcccccgaatttcgctctctccaacgacaacggtggctggtgtaatcctcctcttcaacatttcgatttggccgagcctgctttccttaaaattgctcagtaccgcgctggaattgttcccgttgcatttagaaggtaacaaattttatcgctattggtataatttaatattaaacgaaaacataagtaactttttaaaaaaatgtacttatttttgtcacgtgacatatgtatacaaatagatacaaaacaaaaaacagaaaatgaagaaatttggtttggtttgacagggtgccatgtgtgaagaaaggaggagtaagattcacgatcaacggtcattcttacttcaacttggttttgatcaccaacgtcggcggtgcaggggatgtccatgcggtctcaattaaaggctcgaaaactgggtggcaagccatgtccagaaactggggccagaattggcaaagcaataactacctcaacggtcaggctctctcctttcaagttaccaccagtgatggtagaacggtcacagcttataacgtggcaccctctggttggcagtttggtcagactttccaaggccctcagttttaattatattagcctcattggctttatatgattaacaaaaatttagaaaaaaagaaaaaagaaaaattgtatatctaaaataattatttatataatgtatgaacttatattttgattccataatataagagtactttggctaaagactgtggtggctaaatagcacccgttatgcccttttgttttagaatttgtgagaagtgctaaatttttttacctgatttggggaaatttatatcgaacttctctcttgtaacatttgatgatttgtaataacaacacaatacaaatctatatttcttaaaatggtatattgtcaatggcaaatagcagtggaaacagagttggtctcagcatttgcattcgtggcttcggctatgcaagtaaatttagaactcgaataggcatttgatacgatggttaaacttggtgggaatggatatatcaagcttaatttatgtgtaaagtaaatttaaataactaagagcatctctaactatattatttaaaacacttctcaagctaaaataaggagtaaattttaaaaaataagtttcaactatacaaaaaaaacatagctcaatagatagataattttctaaatataagtaactctctactatttgcttaatttattttaatagcaaatattattatatttttattgttttattaaattaatttatatttgacaaatttaaattatcacatattattaaaataattaaatattaaaaattcaatttttctttttgactttggagaagaggggattcaaatttagaacttcatctaagaagaagtgtggaactactaaactacacctataaccacacctacgattcaaattaattaatgttaatgttaattccttctaacaatggagtttcatattttcttaatttaaacactcttttaactctactttatctaagttcaactcacataagaaatactcgttagtagctaggtgtaatattgttccattgaagacttggttttaatcaagttaagttaaggtggattcggactgtttaaatattgagtgtagtaaagcttcacaaaaaggcagctaagttttcgtccactggtgtgtgtagtttattgggatattgtataatttacatgctttctttgagaagtggtgtttaattattgtcctaaaaacacaaaaatagagtatagctagctctgctcttgagacacggaaattagcacttctttgaatcataatcttcatatatggtggaaggtggatgacttttctagctctattgtcatttttgtaattgcaggataatattttaatcttttattacaaaattaactacttgattttctttttgttaaatataatgaacgaactatgccaaatttaatgacaaaaataatatcgacaatatatgaagaaaatttgtatgcttgaacatgaattaacattttaaaacatgctatatagaaaagccttcaataggggcatgtattttttgtccccagcaggatcaaatggtcaaccgtttagattaaaatatgatgttcagaattcaaactcaatttatgtcagatattcttcaatattttgaattaaaaatggggaaaaacagatgtagatggggaaaaaaaagttatagtagaattatggaaaaaactgagctaagtgtttagcaaattataaattttaaagtattgtaaagattctattataatagtgataatattttaatctattttatt

SEQ ID NO: 295059 - DNA, 4082 bp, Cannabis indica
tagttagggtgttacatgagtactgttcatagtgctcgagaaaagaatactcgatttcatcaagctacatttttgctcggaccatgattcatacttgtttatacattcaagaattatcgtggccatcttcgtatttgcccgtgtgaacaagatggtgtcatctgcgaacatttggtgacttacctctggagcagaccgagaaatagagattccatgtaactgccccggaacttgcttcttcaaaatcagttttgagaggacatcatgacacagcaggaacaggaatggagatagggggtcaccttgtctgagacccctttccggatagaacttttttttgaggcacaccattaataaggacagagaaagaaatcgaacgaacacactccaaaatgatattcgtaacctgatcatcaaagccattgcctctgagaacctccctcagaaagttccattcaagcctgtcgtaggccttcggcatatctaattttaaggccacgagcccaccttttccgttcttcttctttatggtgtagaccagttcttgggtcagaatagacgactccgcaattcgtctacccggcaaaaaagctgactggaaagggcaaattaacttgtttatcacctcccttagtctggtagcaataatctttgacaatatcttgtacgcaaaattacacaaactaatgggtctgaatttgtctaccgaacaagcattttcttcttttggaattaaacagatgaatgtatgattcagttggccctccattctacccgaaataaagaacttctgaaccatgtggatcacctcattaccaacgatctcccaatatcttctaaagaaataacccggcatcccatcgggacccggagccttgagaggatgcatagccgccacaacactccaaatttcctcatgagaaggaattttttccaacaatgtattctcctcctctgtaaccataggagacaaaagctcatagaaggagttatcaagattcgtattggccgagctatataaatcatgaaaaaattcattaaaaaccctcccaatcttgttctctgttgtgacccagacaccgttgttgttcttcaccgctttaatctcatttcttctccttcgaattaccgtggaggcgtggaaaaactttgtgtttctatcacccaacttcagccagatttccctcgatttttgtctccacattccctcttttctaatccaaagttcagagatctttttcattaaactgttctcctcttcttaaagcaccttcgagagaggctgatcttggatccacccaattctgttctccacttccttaatttgcttatcacaatccccaaacgattcttttttccacctttgaagcgcagtcctcgtatcacaaagacgaccactgagattggcatttcccactccccgattcacctaggcaatcttaatagcttcctcacaagaactttcccttgcccaagcttcaaagaatctaaaaggcttgaccccccttcgccttttattaatggtgtcgaagagaatgaaaccatgatccgaaaccgtgatcggggcattaaacactaccacagaaggaaaagacaccacccactctcccaaagccacagctctatccaatctttctctagttaacccccctaggaatcttttattttgccacgtatacttgcacccttgaaaccccaagtcgatcccgcccgtattctgcaaaaagtttaagagagtctttgtatccctcggcgacaccctttaacctccattcttgtcccacgggtaagcaatcaagtttaggtctccaacaatcaaccatgggttggagcaggtggatacctttgcttccatcatctcccagaactctcttttttcattttcatatggtctaccatagaccgcaaacaaattccaaattagattagtgatcggctccgtaaccactacttcaaacacaccttccttagcttcaataaccttaatctcaacctcactattccatagcaaacaaaacccaccctgaattccctccgaagggataatagaagagtactgataccccaacattctagaaattcccattattccttccaaatttgttttcgtttccatcaagaagatacactccggtttgtacctcctcacccaagcaagaagcgcttgggttaccggggttcgcatagcccccggcaattccacgataagagcctcatggcgacggagggggcttgataagggccgcctccttgcccgtaaccagcttatgtgactcatgaacctctatatccactaactcactatccaaattaatgtttgacgtacctttaattgactcttccaccatgacgggatttttctttctatcacatagcgaactcccttgcttcctccctctctttgcattcccggaacttccccccggagctcatattgcatgctcttttttcctgctctggtttgactccagtgtggcagcggttgggggtgtagttgatgcttcgtcgagatgtacatagaccaatgcaggaaattctcttttttctctatgataagttatctcgtgaggtttttgaactattgatgacaactctttcgttgctttggtatgatcgcaactcagtattatttggccacaagcagtctagattagatgttatccaagagttagcccattatcacatgttggagtttaaagaatatggtagacgggtcttcatttggcagtgggccttgcaattctaggtgcaagccgatcgacctactcgatggataccaccacggcctgattcttttgctctagcgactgatgcttcggtggcaccgaggaagggttttgccagattgggggagtgatatgggatgctacaagtgtggtttgggtggcgtgctcatctagtgagttaggtgatttctctattaatgtggcaaagctgcttgccattcgtttggccctaactcttgcacatcaatatggttttagtatctccactattaatagtgattctacagtaacaattgattggattaataaacttcatatgaattttaatattcagtctaactcggttagaaggtcactaactcggtcagacaagtatagacataatgaaaattccataaaatgtaataacgtgacaataagaattaccggacaagagatttttgtcaatcaagatccacgaagatatcacttaaaaccctaaagacttgatcatcaatcgatcctatgatctaaaaatttatagttgcaacctgaatatttggattaatgataattaattgtaatccaatctataaatatgagctcttctcccacatggaatggatgtatttttatcttacattgcaaaaattctgccaaaatctctcataatttttttttgcatataaaaactagtttagatattgtgttagaatttgtgaaataattaaagttaaaacgttatgttagtaaaggaataaattatttaaggttaaaagcttaaggtgaaaattccaactagaagggatggagtttcatcttacatgcattcaaaaaacttattttttgtgcaaatttcaatcaaaagatgttttaaaagtattttaaagcataacataagcattataatatcatagaaacatgtctcaaaagatacaaaaatcatcatattgtatacaattcatatgaaaagttcaaaccattcaaatcacacacaaaaaaaaaaaatacacaaaacatataatttcattttaagcatatttatacatgaaaataaatattaccaaaaactttaaggctagttgttgaaaatcttttacaatggtcttatttattagggttgtatataaatttttgtaaactgcccaacccgaacaatcgactcaaatcaaaccgagataatccgacaaaaaatacaaactgaaaaacccgacgaaaatatagtccgcccaatttttatattaggcaggttaaaaataatatcaacccacctaatcaacccgaattaactcgaccaatctgattaaaagggtttttttatatatatatgtgtatttttattatatattaatctatatattatataaattatataca

SEQ ID NO: 295060 - DNA, 6988 bp, Cannabis indica
acacgttacaacagaggatggaaccctatccaattaccaacaggtacagtaaccataatatgcatactttgaacaaaaaatctcctaaaaatctccgcagccatagactacaatgacgaaatttagagctacatcgaaacagacataataattgattgaaggtacacgaagtccccaataaggaaactgtaactttgcaaaaataaggatcaaacatattattgcggattagaaaaaaagcaagaaaagaattttattgaatattaattgaatgaataaattacaaaataaaaccaaccatatctataaacaatgactcaaattaactaaactgacttgaccataactaattatcaactaattagttaattacaaagataaaaatgagactagacaaatcttaaccataactgtaactaacatgtgacagttgattaggttgtacaaagcaactgaacaacaaaaataacagatgcaattcttgttaccccctttcaaagtggactgcataaatcgtatgcggatattttggccacatggaaagagagtattgtggaaggaaatggtttggtaaaggcatcatcaaagtgtaggttgctggagataggtataagtctaatggtggagctgttgattttgtcacaaattaaatgacagacaagtttgatgtgtttagtgcattcatgaaatgtggggttattggaaatgtggatggcaaattgattttcacagtatatgaacgttggtgttggttgatgtaaatggaggtctgtgaggaggtattgaagccaagttatatcgcttgtggtggcagcaagagctctgtattctgtttcagtataacttttggaaatagtaggttatttcttagtcttccatgagattaggcaatctccgatgaatatgcagaaaccaattatggagcatcgagtgattggacaagaagcccaatctaaatcagaaaaacctcttagatgtagagatgaacttggtgaatataggagaccctaacctggacttcctttgaggtatcgaagtaagtggttgagagcctataattgtgtacttcaagggatgggacatgaattggctgagatagttcactgcaaatggaatgtcaggccgtgataatgtcaaatacagaagtttgacaaagagcaggcaataggtagaaggatttgtcaaaggttctccttgatggtcatcatgcttggttcgaggatccatgggttttttagcaggtttgcatcttgcatagctggcatcttcgataagttagacagtatacttgcgttgcaagagaaatagtccatatttgcttctagaaatctcaaatctgaagaagtaacaaagaggtccgagggccttgagcttgaactttgggtgtaaagaagattggacttgatgaagagcagcaaggtttggtctagtgagcacgatgtcgtcaacataaacaaagaatgaaataaattaatcgttggagccacaaagtgtaatctgcctaagattgtttgaagccttcttgaattaaggcatcagatagttttttttttaccattgatgcggggattggcgaagaccatatattgatttgtggaattttcacactaggtttgaatttgtagacaaagaaggggacaatgttagtcctgctggtaattgcatgtacacctcttcaatgaggttaccatttaagaatgcattgtttatgttaatttgtaacatgtgccactgttttattatagaaacagcaagtaataatttaaacgtgaccattttggccacagtagagaaagtgtcaaagaagtcaagtcctttgtgttcagtatatccttgagctacaaggcgtgctttgtgtcttttaatggagccatcattgttgaacttaatcttataaacccaataacaacctattgctctctttcctggtggaagaggtacaacagaccatgttttgttgttgcgaagagcagtaagttccatatccatggcatccagccattgcttgtattgcatggcttgtttgtaagtttagggttccttatgtgaaataattgcaatgataaaagccttgtaagaattagctaattgagtttaagcaagaaatttatcaagtggatgaggagtagaagattgatcttgaatggcagagtagcaatcaaaatcttttaggtcactcagttgtttgatggttttcctttttcttctaggcgccactggttactccacaggtggattttgtatgctaacaggtgaagatgatggcatgttagcagctggtggagtgctaacatcattgtcttgtatagtgaaagattgtctagatcctgcatggttagtattttatgcaggataatcatgaattggagtattagttacagcataagaaggtaaatctagctctgtaaaaggatcaatgttggtggtagcttcattcaatttatggaaaggagagagatattcatgaaaaacaacattttttgagataaaaattgttttgagtttagatcataaagtttgtagcccttcaccccatgtgggtaacccaaaaatacacaggttctagctcgtggagcaaacttagttttacgtgttgtaagggtagaagcaaagacaaaatatctaaagttacgtaaagagttgtagtcaagctcctttttaaacataagttcataaggtgggtgactttctagaataggagtgggggttcaattaatgaggaatgtggaagtcatgatgcattctatccaaaaatgaaaatgtatgtgagcttgaaaacaaagagccctggccacatttaacaaatgttgacgctttctttcaacaacgacattttgttctggggtttatacacaagtaaagtcatttagaatgccatgtttttgaaaaagatctcttgaaactagttcaggtgcattatcggatctgaattttttaatcatgcagttaaattggttttgaacatatgaaagaaattgaggaataacacttagtgcatcatatttttgttttaaaagataagtccgtgtaaatattgaatgatcattactcgaagagagaaaaaatttatgtctagaatgagaagtaatgtgataggttccctaaatatcacaatgtatgagatccaaagtattataagcaagattgttattattaggaaaaggaggtttcctttgtttagtcatagggcaaatataacatggagaatctttatacaagtttgtcacattacacttcaatttactgctaagtaaatgtaagtatttattggagaggtgtccgaacctagagtgccaaaggtcagcagctatggagagaataggcaattctgtaggtgaagaatccagcatgtagagaccattcttggattcacctttgccaatcatcctcttgtggatggtgtcctgtacgatgaaatgaccattaaagaatttaacacagagagaattttgaccagtgaggcaatttactgatataatgttgtatttaaaatctggtacatatagaacatcattcagggttaagtgttgtgaaacaacaatagatccacttttatttactaataatttgtcattgttaggtagaagcagtttagtaggggtaacattacaagtaaattgaaagagtttgagatcagaaaaagtgttgcctctaaatctaagatccaagatccattaacagggaaagaagacacatttgagagaatggtacctgtgttgcctgtagaattactaagttttgatgtggtcataccagtttgttgcacaacaagaaggtttagaagttgttagtattgtgttgaggtgagttgaggaacaagtgtttagatgcactagaaggaccaacattctcattactggtttgaatttgattggctaaggcttattttcttttgttgttcttattataaccaggtggatagccgtgcattttgtaacatttctcaattgtgtgtccaagaatgttgcaatgagtgcagaaaggtatgttcctcttctgtgggaatgacttatttccattagaatctggtttgtttgattttctcttgtctccttgaaaggaaaaagccatgctttgattttgtttgacaccaaatgtggaatttttccctttgtttttcctcctgtgtgaccaaatgaaaaacacgatttacctctagtagaggatccataagaagtatactgcttctcacttctgagtaagaatcaaaaatccccatcaagaacgacatgatattacatgtagtgttcttggagccttttaacacctccacaactgcaaccattgcaaatacaaataggtcgatactgagacaattgttcccaaatcatctttagtttggtgaagtacatactaaattcctatttgtcttgttttagattcatcaaacccttccctaaattgtatatgtgcgggccattcctttgatgaaaacaaaccttaatattgttccatattgctgcagaagattcatcatacaaaatattagaggaaatctctttagaaacagaattcaagatccatgatataacaatgttattctttcaagtccagtcattatacaaaataaattcagaaggtaaaagtttaggaatagaaccgtccaagaacttgactttgttcttgctgaaatttccaattgcattgctctgctccatgacatgtagttattctgtccagtgaggagttgagagacaaggatattgcctggattatcagcatagtggaggtaatacgggtaagaaggatcttcaagggggtttctttgctgtatcatctattgaatctgactactgtgttaagatggatttgtaggttgtccagaattttcacctatgatcgcaggactagattgatcatcattagacacctttgaacgggaaaaagatcaggtaaagaaaatactgatcaaggaaacaggagaggaaagcgtagagctaagtgagacatcagctctggttcaagagttcgttggagaagaaaatggaaacacggtgaagagggagaagaagaatcaagatcaagggaaagtttctctttcctgctctgatacgatattgcggattagaaagaattttattgaataggaatcgaattaatgaattacaaagtaaaactagccatacataagcaatgatacaaattaactaaatcgacttgagaatacctaattattaactaattatttaattacaaagataaaaacaagactaaataaatcttaaccataatagtaactaacacctgataattggttagattgtataggaaactaacaacaaaaataacaaaaccataaaaccaattcttgttacatatgaaatattcccaatcagacacaaatattcataacttgattacgcacttgattgttggctagctaagagatgatcagtcttaaatctttgcaattagggatgctggaaaatagtttcccatgtgtgcagcgaaattgtgataaatccccccagtgtacaataaaatatttgtttatgtatataaaataaattagatatatatatctatacataattatatgatatatagataaatgttatttgtgtttccagaagggtgatatgtagcatttacaaagagtaaagcccttccatgaaggaaggtccagtctaggtggaaagtgggcccgagcccatttgaggcccaggaagctcatctccaaagacaaggctcatccagatctgaaagacttccagccttctcgatgacaggataaagaagccctctcgatgaacattgggatgcatccaaaaggggaatgctaagagacgcctctggaagcccatgtagggtgacgtggctgccctctgacgcctgatctcatagaattagatattttctcttatgtgagagcatagtagcgtgcacactatcaaaaatacactataagaaaaatgggctaattcggacccttaatctccgcaggcccgagaatgcccatcgagattcccttaaatattttaagaaaatcagaatggcaataacagcgggctcgagcgtttaccgccaatattggtctctcaaagatatccaatctcacctcttttcaactcaaaataaaaacaatagattggaccaatcacggcgggcccaaatgtgcccgctgagattggccacaaagtagctcattttgtgcaaaaaaaaaaaaaggccaatcttgatgagccctatatttttttggcacaaaactcccagctcgcccaaccttcccccatttatcttcgttttcttcctcaaaatttccactattcactcacttaaaaaaccggatgaaaccctaatttttcatccaaaaatttcaaaatttcatctaaaagctagattttcttcactctattccatcactaccattttacaagatcaaatgtaagtttctatgctctatttgtgcatttatattacatttttaccctaaatctctaaactttttattttatttgaaaagttaagaaaatgaagaaataattgtttatatttgaatgttatactaaagaagcttagtaattttttggagctttctttgggtaagatttctcttttttttaagccaaaaatggctatgagatttcactttgtgtgtgtgtttttatatattttgagtttaatacattgggtgctattcaaacaacactataattgcttgaaaaattattcatatattttgagatagttttatattcttttttgtccaaagacgcctgcctgacataattgtctactggagcaacgcctacgcgacacctatcccagactgcgaagtccccatccatatagaaacccttgccccacgagccagactcttactagtgggccttaggtcaagtatgttatgtgtttaccctaatagtgggcctagtttgtacagtaatcctagcggctcacaagtatacccagatctgtatccttgtctataaatatgttagggtttatgtcctaaaagtaagtatttaatggataatatattatagaa

SEQ ID NO: 295061 - DNA, 3545 bp, Cannabis indica
aattaattggatcagatcaaataaaaagatttaacaatatagtatatgggatctagattgacttaaaaatattaaataatattaaatgtggtaaaacgaacaacaaaacaaaacgagttaacggtagcgttagatgtctaaaaacaattctaaaaaaataaaatagaattaaatgtaaattaagaaaactcaagtgcttttctatttctagttagtttcattgtctttattgtattttttttttttatataatataaaataaagggaagaagaatcgattctgggtttgtttaattgtagcagatccgaagagaacgagcttgatcggagctgagatctatttcatcccatttcaatcggagaagatgaatatattcagattcgccggtgatatgacccacttggcgagcgtcctcgtcttgcttctcaagatccacactatcaaatcctgtgctggtaccaatccaattccttctttattctatatccaccaattttcgctctacttttacctaatgtgtctgtaatgcatttacgaatagttacccgtttcgatgtggaagattgaattaggttttagctctagatttgcttttactccagctgagtttctaggtttcatttttggtttagaaaaactatgaatgctgaaattagaggagggtaattgagaggagaggttcaatcttaaacataaatgtacaattttgtgaattggggttaacattggtttaaatttttcttcaggtgtttcattgaaaactcaagaactgtatgccattgtttttgctactcgttacttggatatctttacggatttcatatctctatacaatacctttatgaaattggtattcttggggagctcattttcgattgtttggtacatgaggagccataagattgtacgtaggtcttatgataaagaccaagatacatttcgccattacttcctcattgtgccatgcttactcttggccatgatcattaatgagaagttcacctttagagaggttagttctcataattggttagttctcatgttttgattcttactattgatttgtctttcttaatgttcttctgcatatgtttcaggttttgtggacattttcattgttcttagaagctgttgctattcttcctcaactcgttttgttacagagaacaagaaatattgacaacttgactgggcaatatatattccttcttgggtatgctaagatttccaatgtacttttggagaacactgctatacattgtgaagagttttggttgttctatgcttgcttaataagtactacttttgtttctttttcttgtttaccatctctgtgttgactcttgatgcagggcataccgagcattctacattttcaactggatttaccgctacttcactgagccacactatgttcactggattcgtacgttttctttctatctcttactcttttttcacacaaaatgtactgttgtgtttgtccacatgtgttctactttaatgaccacaactgttgatcaaatatttgatgttataagacttcgtttacacatttggattgtgtttgtttggaaggaatgcaaacactagggaatagggaatagggaataaggaatagaatggaataaaatttaaaattgataaaattatatattttttttcttcatcttgcattagaatggcattttcttccgtttcaaaatgaaatagttattccaccaaaatagtagaaaagtcattccaatacttttaaatgcaaccaaactaaataatagaattaaaaattgctcttttccatttcattacctccaaccaaacacaaccatagctttagaaagagaatgatttctttttgtatcccttttttacaatagtcattcccgttgctcacataatatcgactgacttcaactatcatatgatgctgaaactcaccactactaacttttgaagattaattatctgttttagacacttaaggtcatccatatcacttttcatgttattgaataagctctcagcctcattaaccaaccctttttctttgattcttctttcttgcagcttggattgcagggctcctccaaacactgctatatggagatttcttctattattatttccacaggtgaacagaatactctaatcctagactttaatgtattgggttgggttttgtattgctgaaaatatctgatatgcctttatttttatcacagctggaagaacaataaaaagcttcagttaccagcttgaacaccgtttaaccttccatcgtccggtccaatgtggcagtgcaaagcttaatatggaggatttcatccaatgcttgtggcaaaactgcattttctcttgcaccctttttgctagtgtctctcactctgttttttttttgcctgtttcacatgatttcttctcgaagtaacaactgttatatgttacttgggagtgtatatgacccaaatgtgaaactgtcccagtcatgaattttcagtacaatttataggtgcccaaatatcattttttttcaaacatatacagtgtaagtgttgtttgttttaagttttcatgataatatttttagaaaacaactatttctcaattaaccaatacttaaaaagcttattgattttggttttccccccaaaaaaaaacaagcttatttattttgaattaaaagcccacatatcattatctttcacctgctaaccaaccacaaattcaatgtttctactaatcaatacatatgcatttagactaattaaatatgcactttttgatgcaaaattactttaaagttttataatcaaaccatatctttctcaataaaaaaatgtagtcaaattaatcattcaattttcttgagatatagttaattgaaaatgagatttcatcagttttaatattgaaaaacttctttatttcatatacaggaacaataattagaatcgggtaagcaattcaagtatttggctaattgtgcttttctataattcaacacattaacaatcttttttcttttagcaacaacttatgtcacaacatgataaattatgatataaatcatacttgttaagacttgaaatcttgtcatgcttcattaaattgggtatatttacacacaaatttcaaataattttacctttagactttgagttttgatttctttataatgaacatgtcaaaactaatgcaatctaatttaagaaaatatattatgttattaattatatgcactccaaaatttatagattaattctaaagttttaatattcattacgagataataaatatttaagaagatatgagattgaatatatacctcatgtattacttttcccatgtgggagtagctcaaatctcattattttcatgttgtcggtgtagtattggaatgtagagacatttgaacggaacctcttatttgatgcattttttttatatgaaaatattgtggactcaataaattttcagtgggtaatatgaatatctttatactagggctgtacagaaattttcgtaaaccgcccaactcgaataa

SEQ ID NO: 295062 - DNA, 5739 bp, Cannabis indica
ctgaactttcatccatgttacaatttttttactaaaattagacaaaagtccttaaatttaacaatcttaatagttcagggagaatttttaacggctaaaaaagttcaaagggcatgatttattacatgttaaagttcggggaaaaattactaattagccaaaaaaaattacaaggttgaccgcaacatacatttctttgaccaaatacacctattctcatttaaactctttcctttagatgttttgatttctctatctctgcgttagtctcacttttttttttctacataagaaaagaaaacacacacattcacatcacacctttacatcccttgacggctactaccttcagttctccaccttcatcgtcttttcgatctctagctccaatttcaaagttattattattatcattattattattattattattattattattattattattatcaaattttggttttttactttttagatttgaaattaattaaattatacactttgattaagttaagaagagggatatctgaatatgttatgttgattaaaattaataaaatcgtgtttttcatttgatgggaataggtatgagaaaatgggtttcttttcatgtttttttaacaatgtctacgtggtaattagcgacggcttgttttatgattttgattgttaatgtttgattttatttggatgttgtaatgatgccaatgatttgcgttgacatggcgatggttttgtgtgttcgtctttgatgactacttgaaactattgctagtttaaattttgtactacttaaatcgatgtgtgatgatgtttagcgatacatagcgcgttatgtaaccttctttagtatatttctctaacgatgctatgagatacaatgcttgacgataattatttttaatgtgaatttcatttatttttgtaaaagcttaccgatagctaacgatatttatatatgagatcatagttggaccttcttcaagccggcagtcccatattctcattcattgtactatgcgcttaaatttacatgaccgtcgttagagtaggggcgacatcctacacgtaagacattggaaatatttagtgacataaacagagtccaaacttgcattgttatcatgcgtacaatattgtgtttgaacaattatttcggatatttttttagcattttcaattattatgaatttttcaaaaacgtgcaaattaatttaactgcatcaaatattgttgtgtaaaaaattagaattataacttccacaaatatgaaaatgtattgaacttgaaccttggggatatgataccacttaaaaaaacatattcgatatatactataaccaaactcatacatttatattataatgattgtaaatattataattactaatggcataatttttgtatatttactgcaataatttaaattgtttgcgtaattttggtccgctattatatgttgttaaatggtagctaggaatacaaaataaagtagaaaaatcacaaaatcaggataaggaataatataagatagtgtgagaaaataattacgtgcatgctccagatatttgaaaattcttcgtcaacaccttggtgttgtttgtgacttcccgtgggacactaaggagcaggattggagttttgaggttgcttttgaagaattctcggatgataaatccacttttacggtcttttctactattctaagtcataaaacattattcattttattttttaatttttttacttatcagtcacacatgtcatgatattttcacttagacaaaacttgagaaaaaaggtggatataatttgtatggtatataaatgtaaaccaataacctatctcattcatagaagaaagatatgaattcgtaaggagcatacaatacacttcaagctaattgctaaaacgcaaatgaccaataccaatacaaatagaaaaggaagcaaatgattgtttaattctgttgggagaattagaccaaaaaaataaaaatctataaagctagaagccatcgtttatgagaataggacattctctcctcaatgccctccttagtcttgtctgcctcgacataatttggcttccacagtttagccagaagggccctattgcagcatgcaattgttgattcttagcattggtctgctcaatctccatgactaaggtctctacttcctcagtggccctttctgtcagcaaagtcgcatgatacagtaatgaaagatgagaaagctatgtataatagtgagaacaaaaatggaaaagtcgaaacttacccccaccgcttgttgcttggtagcatggactaaagcaaaggcgtcaacactgctgcaagttgcccatgtctccaaggacaactgggatgcactgctagccacttgatctaaaagttctactgcgaaaggggcagtttctctccctaccttgggagccaaacgctcctctaaagcctcaatgtccattagcccaattgagactgaagtaaaaaggccctccaaagtctcaaccctcttcacatctaaaagcatactgacccttctacgcggaaccctcctttcctcctcttgccattctttcaaggcattttcaatttcccccgctctcaacatagcggtagggtcaagaagaatggtcttcatggggaatttaaagcccacaaaaggaatttttagtaggaaagtaaatagctggtgtcgggcccaatgttgatggggctggttttacgatttctactgacggtgctgctgggggtactgttcgtgggacagttggatgaatgatgacagatcaggagacacagtgtggagcatgtcatcctatcttttcctcttccctctgggaccacctccactaacgagatttgtagaacaaacttctctctctaagcccagcatttttactccaggaagtacctacaagaacatctaacgcagaataaatgagtcaacccggaataataaagtcaaaaaaaattattatcaagcatgcaacgcccgaccctcaagagtgcatgtggaagggtcagtcacccctcccggatgagctacccctcggtgcaccctcatctgagtaggttgctgcacttttctcttaacagttgtgggaaagttaggccagcctaataactggtcgagtttatgcttaacaaggctcgacccaaatcctgaattcataccagaatacacagatgctctgaaatgcaaacaaccttgctcaatccattcagataagataaatactcacaagatgcaaagacttgcacacaggtcaactttaatgatatgtttctacaaataacattctatcgaaatgaagtatgcactaaacttagcttaaactcagcatttctacacttggcatggggttgcataaaagcaatagagtgataagatacttactgggtgtttggcaaacgacctaaaagaacgttgtacgagatggctcgaatgtgccgtgttcagtcgagcacgtgatcgtagccggcctgactgtcggagttattatctagcagggggtggattgaatcaagatatgagtcacctagtgcaaagaatggaaagattttgaaaggttgaaagaaatgaaaagaggatgagcagactccggtttatgtgttgattgaagtcccttcaatgtgaagtaaatgacccagatcactttcgccaaaaagcatctgttaatttgacgaatggggagtcgaaaagactgtatcagcccaaacatttaacattcattactgcatgtctcgtgtaaagtgcgtattaaaagaagggtcgtctcaatcaacctgctgccattttgacttctcccaagaaatgtgcccctcacccacacgtactgtcagtgattgcatttaaagtgctgccaatttaccatgctgataatactcgggatcactgacctatttttaaacagcaactcgcgggatgtaaagcgatctcaatcaacaccacgtgtcaagacttagtcatgaagaaacgggggaacactacaagctcccggaccacggagcaccccgaaagcttggggctaaatattgtttacatttttgcaaggcatgacacatggattccaatagagaaagtcaaattaatcctcagccgattgaagccctttgatatcgctctatcgctgaaaggcttcctcaaaagaagcatcatccctagtaaaggggcgcacggaagctcacttatgcctacttcccaaatgcgaaaagaaagatgcctcttctggacccggaaaatcctcacaagaaaactctcttcgtttatgtccatataggcagcggaaagacttatgatggatatcgcttcccatgcggtattgcagatggcactttctgcacttgttagatcaccgaagtgacgactatgctttttctgacatagggtcaaatcttgttccccgtgccaggccatagtacagtgcatgcggaccactgtacacgcctttttcccattggcatgtccagaggttgttttaaaaggaaagacctttgggcgacacgtacccctgatctttgatggtactggtctctacctccgtgcaccccacgatggaataactatctaccaaaccaacgatcggatcctcctattgtattatctgcccttaaggcgtgttgagtaaaaaactccaagtgggtaaagggtatgcccttacccacatgtgtgcctataagtacccttatttttcatgtagaggagggtgaacaatttttacttagtgaacatcttccaaaattcatataagcttcttcttcaagaggagcgagaggagtacagagctcatactgttaacacttgtaatacttaaacactcgtcagtaaggcttatacaacgaactcatggattaggaattattaatggccaaaccacgtaaaatctatttatctattattttttgttttatattttccttacgctctaattaatcggtttctataaatctcgataaactaaataaatatacaaatttatgtataactagataaatctattattatatgtattaaataaatatatttaatttaatataaataatatatttttattatgtttttaaatttagatttgattttgtcggtttatcaatttcttcatcttttaatatattatttgaggtagttatacagacgctgaaaatgagttttgtgactgtggagatgacacaaaagagttctactgtttgtgttagttagagactatcgcaaacaactcatttatgtcgtcaacatactattattaaatttgaaggtgaagcatatgataattttgtgacattgctcaaggcaaatggcgtgcacttagcgtcaattgtatttgtatcacaattttttgacataaaagaggctttgtgatagtgcctaatagacacaaaaagttgtgtttttagtagtaagtagttgcagtagtgggcttggattcactaacattcttaaaagtgaaataagtttttcgagaaaggaaatggagacagcataagaataaatatatgatatgttcgtcaaacctagatagagaatgctagggcggcttggttcttaaacaagagaagaaaaaaaaattgtaagagagtggatgagagtttaattttggtttggagaatttgggaataagatgaatgagatttcatctcaaaaccaattggctatgggaggagtaacccattcctcttatatattctattatcattccacacattagcaatgtgagactttctaacatcc

SEQ ID NO: 295063 - DNA, 1137 bp, Cannabis indica
ttattgtttaaaaaaataaataaataaaagaaaggggtgttttaaataaaattttgaatcataatgttagaaaattggtacaacttatccttttggtacatcattgtgttggatactaatttgttgggcttgattaaaaattgacgaatttgaactcttcttctcaataatttattttatggtattcttttcttggtaaaatgtattggaaatgttatgattgtttatgaagatgcatctatacatacatatatagggtgcaactccaatggatcaaacaactattcctgacggaagtgaacaaatatttgtgatgtctgaagatgtttcggatactcagaaggaagatttggcttgggcaacatacgttttacttcgcaatacaaacaccatagctgtggtacaaatacccattatacattcatttggaacatagcttttagtgacttaaacaaagagacaaattctaatgagaagataatgagcaataagttaaatctaatcaaaacttaacgaatgttgttaattttgcagttaacatcaattcaaggtgaattgtgtgttcgtggatactggaacacaccaattggtatgtctaaaacaaaaaccaatctattagattggttcactcaacaaattgaaaaaattggcatctcggacttgaaggataccctttactttcctcagatttcaggtaaacattttatgaccttttttttttatttattattattttcattttcttataatgctgagaataataataaaaagaaaatggctgcgtgtacaccatttgcactaaattagatgaataattttgagagtacctagtaagtacatgaaatttgaaaaatctttctgtgtgaagtatcaagaccaatcggggtcttaggcatagtctagtggtttcatatctctcctcataaagaggaggttccaagttcgaatccccactcccccaatataaaaaaagaagtatcaaaaccaagccaatctaatggccttggattatcaaacatgttatggtggcgtttggtaacattttttaaatcagttttctgtttttaaaagtagaaaagtgaaaatactttttaaaaacatgttctataaaactgtttttacttttcaattttataa

SEQ ID NO: 295064 - DNA, 1406 bp, Cannabis indica
ttttttttttttttcatttgtaggtataggtagggtaagatatatagtaatataacatttatagtatatacaattgtttaaatttaggtggctatggaactttggaagagttattagaagtcatcacgtgggcccagcttggaattcacgacaaacctgtatggaataaattatacacgctatgcttcttcatatgtctccatcaaattgtaataattaattattaatgtaaatatatatataaaggtgggtttgcttaatgtggagggctactatgattacctactcactttcatagaccaagcagtagaagagggctttatttttccttcacaacgtaacatactcatctctgctcctaacgctccagaactagttaaaaaactagaggtgactactatactatactatttatttactaataatttcattatagaaaaccgttaatcaattattataagatgctacatcagtgtaaggtgtcgaatctaatcatatgtttattattttgatttgaaaaaggagtacgttccattgcatgaaggagtggtggcaaaagcgaagtgggaggttgaacaagtggagctgaatttgaatttgcagaagagtattgctcgttgatgccaaaaaaatgaaaagggagggtggtgttactgatgatcaagcaacaactgtaaaatatttcattttattttcttaccttatttaatcttcatttaatttacgtgccaaagtttagtgacggcttctatatatagtactagtcttttttttaatgtaggtgataattataaaaacctgtattaattaacttttggatgataaaagatatataacataatgccaaaccctataaatatatataataattaagtttgtttacttaatttatctagtaatttgaaagtgtaacactatcaattaagtttttttccataaatctctagaagcgattcttattttatctgattatcaaattaaagtatataattaattgtaatgaaacaatatgtagttatagagttaggaattatatttagctacataatcctcattaaagatttcaattaactagaaaaacttacacttctattttaactagactttatacacacatgataagccctttaactattgatcaccagcagcaaaaataggataaaacaacaaagaacaaccaaattaacccaagttttaataaaactaataaaagttaatgttagcccaaataaatatctaacatacaatttaaatttaaattcattacaaatatttctattctatataaagtgtgtctatataacagaattcttggtttatgagaaatttatgggtgactttttatttatattaaaaataaaatagtttattattaaaaataaattgatttatgagaaattcatggg

SEQ ID NO: 295065 - DNA, 3755 bp, Cannabis indica
taatttttatttctgcgttattcagatctgtgagcttaaaaactcataacactgtttctctctctctctctactatccgagagttttagacagagagagcttagtagaggggtggggatggtggaggcacagtcatggacgacacgtcgtatgagcaaccccagactggacaacaccaccgccattgcagaccaagccattgatataccggcgacgcctaccggagatgtacggaacgggggtcttggaatgtacggtctcggatcttacttctctccgaatgtattgacggctgtgattatagcttcttggtacttctctaacattggggttctcttactaaacaagtaccttcttagcatctatggctttagatacccaatcttcctcacaatgcttcatatgatcgcctgcgctttctatagttccatcgccattaacttccttgaggtcgttccgaggcagcacatactatcgcgtaagcagttcttaaagatcttcgctctcagcgccattttctgcttctctgtcgtttgtggtaatacttctcttcgttacattccgatatcgtttaatcaagcagttggggctacgggaccgttcttcactgctatttttgcttttgtaattacttgcaagaaggaatcggctgaggtgtatttggctcttttacccgtggtttttgggattgtgctggctagtaacagtgagccattgtttaacttatttgggttcttggtttgtgtgagttcaactgctgctcgagctttgaaatcagtggttcaaggtctgttattgtcttccgattccgagaagcttcattcgatgaatttgttactttacatggctcccatggcggccatgattttgcttccttttaccctttatattgaagggaatgtagcgagtgttgcgattgaaaaagccaaaggagatccatttatggtgttcttgttgattgggaatgccacggtagcttacctggtgaacttgaccaatttcttggtaaccaaacacaccagtgccctcactttgcaggtgctcggaaacgccaaggcggccgtggcagcttgcgtttcggtcttaatctttaggaaccccgtgacggtaatgggtatagtgggattcgcagtaaccacgttgggtgttgttctttacagcgaggctaagaagcgatctaaatcaatacagaagtaagagatttttacgaagagtttcattttattgccacagaaatggggtatggcctcagctctttcgtcattctttaattaagcactttatttttattttttttcctagttctttgattattcgtatctgattaatgatggaaggaagaaaagaaagaaagaaagaaagaaagaatgaaaatttgcaagaaaaaaaaaatatagatgcaattgaactgtataggatgtgaggaagggagaaaaggattatgcccttttaatgtcttttgatttttcaatttttgtttttaaattcttcatgaaaagggttttggatggagagaatgcgattttttctttaccttgccctgtataagttgtaatctgcagttgaaactcatacaaattgattaagatatcaatcccagtgtattttgtgggatgaaaataatttctcccaccatagctttcctttgttaagctttattctattgactttttgattcatttgatatattgtgatctcaatatcgtatatgtgtgcattagggaaggttaagaatggttaattgaagaagtgttgctcaaaattgagagtttttaattgaactgattaataaactatctgatctcttataccagtcttctataattagttttggttcattaattttttcaaaggttggagttttaagaactgtgtcatttacttgattagatcttcattgctgactctgggaacccattatagcttaagtggttctctggttcttgttgggttctgcaacttgtttggtggttaaatgaaagaataaatcttagtccccactacatgaaataacgaaattaagattatttatagtttgctatagttctcaatttcatgagtttggagcctgtcgaattattatatgcaataattgcagtactagtcaggggtagtttgcaagtaaaaacaggtaacagactcatttccagttaagtatgtatcagatgccaactcttaaagtgcttttccttgtcaaagaaacatgggtgggatcctcacttttcttttaactttttcttttcctacgtctcttttaatggagtgtggtatcaaatgaaatgctacaaagttctctgtctcagaagtcagatatgaatgtagtttacctcaattctgttgcttgactataactcgtgaaccatttgactactctgatctgacttgtttgtgattatcattactgtgcagattcaaaataagattttatatagatatttgtgtttgaactcctctgctttaatttgccatttgtcttaattgtattgattagtgatctaaaactgcaattcatatttgaattattgcttgacttgtttaggactcctgtcacatgtcatttataaaactagtcggttctagcttgtcttaaaaaaagggtcccaggctttggtttagccgaaatatctcatttctcttgttgtttagcttgctttgatgatccctttcgcttctaaaagcacagttttatctcgttaatatggtaaaactttgtttgcatggtcctaataaaacaccaaatgtcaaatgcccttttgagaaaatttgactatgatcgttttgactatctacatttgcaataaatacgcattttaatatatagtttgtgtagagaaaaatattagaagcgtgataaaacggcatctgtggatttgagtcattttcatacacttgagctgttactttctctggttgtaagtaaagaaatggctattattgcttaattaattgcttatgatacaaataaattgataaaggttgacctatgctttgttgcttgtttgttcaattagcttcatattaatgtcggacttgagttaggattcgtttgaagcataagctaaacaataagtttccttagacttcttgtttttgttttttatgtgttacttgtattatagattttcctggtctttttattttatcaccaaaaagaaaattaatatggttctaattccattcaaattttaacaattttagttgcgtcgcctgagtaacataaatgctttcgatcacacttgattttttcaatcaaaactaatttggcattttctaatgggtggatgaacttgctcggcagatttattttctattttagcagaagtttattaataaaaatgccatttataaagttcactatatcactattttcattttaaaaaaaagatagtgtgataattttgctggtgaacattatcaaatatgatcaacgtaaaaggtaagatgtataattttaagaacttttttttttactagaagtgtaattttcaaattagtccattcattcaactgcaatagaccaaaatactagattgaaatgattcgtgagggagaaatgctaaagggcacccatcccatattttttttgtttttcttttttctgtgtaatttcgtttggtaaccaatgctgaggcctaaaagactctataccaaacttttaacttggagtgaaattaaaattatatataaaaatatttataggctacggatgtgtatgcgaaaaaacatactctacattgaggtacttattttttttg

SEQ ID NO: 295066 - DNA, 1634 bp, Cannabis indica
tttgtgtaaatttttttttaaaaaaaaaaaaaacaaaccatcaattactctttccctcttagccatggtcttgcctaatttctctctcttcacccattttctttcttagtttctctctcttaaacattttgtcagttgtttctctttctcgcccctttttccattcattttctctctttggcattattattatatttgatcatcagaacctttttcttttgttcttgttcatatgtggtttcagccatttttttcggtttgcctttttcttttgtcgtcggtgagggttggtctcagttgtgcattgcggtggtgtgttgctttaaaagcaagtatttaatgtttaacctcgattttagctaacgatattctgagtcacttaagtgattaatgaacaataataattgaacaatgttgaacaataagaacacagagttgttatagaggttcggccccgtgatagtggtaatagcctacttcccttttgcttgtattacttgtgagaaaagaagcaataagtttttgacctctcttgaaaacttacaatttttacaacataagagctctcttgaataattgatttcggacccctgaatagtgaaatggttccactatttatagagaagaactacatcaattaggtttcccaaagcacataagaaataaaataggaaacttgtttactttcctaaaacaaataacactaaaagggaaactaggaaggtttctcttattttttctcggtgtgaatctatcccacgaaattaagaaagtggtcgagatttgaatgcttaaacatttatggaaagtatctctgaggatctttttatgttgaactactctgctcggaagactcagcattcctggatgatatggatctgtgcaggcaatcacgcaaaggttctaccggataatccatgttgaagatataaccttgatagttttaagtagaaaaattttctggtcggaccatagaggttaaattactcgtccagatttctcaatgttctccacatgtcaccatgctaaatgtcacgtcaccttgtgcggaattttggataatatttgcaccccaagtacacgtgggaactttttgcttgcacgtggacttatttggccattaagctggtcagatgggtgacacgtgttggtcttcgtgccatatctttgtctgatatgacttgatggaaggagtgaagatatggttgtctcttcagtatctggacatttaatgccttgtcttggaaaacggacctcgattagcacaatgacatttattgagtactgcgtgcctgatgtgtgtactccttaatatgtaattgcaatccatgtttttggggaagaaacatgtggcgtaactgaaaggtaatcaccatccaacaatgggcctaagccttcccacttgcagaagcccaagcccagacttggaacgaacccaagcccagtgttgtgaaaattatatacgcaagtatacgcagtcaaacaagtaataaagtgataagtaagatcgtctccacagggattgaaaattggaaattgatttataaaactaattactcacaaattggtttcaacaaaaaaataaaataaaataaagtgatgagaatatgtaaaaaaaaaaattaacaaacaca

SEQ ID NO: 295067 - DNA, 4116 bp, Cannabis indica
cttaattgagaagaaaagaggatttagggtttatttgttaattaaaagactttgtaaggtctaattaataaataagttaaatagcaattttatttgataattaattataattattaaataaatagatttaacatttaaaggattaaaattaaaatatggtatttatgaaagaaaaagataagttgttaaataaatggcaaaattaaaacatgtggggtccacttgtatgcccgaccacttaagggtttatttaactattattttatttttatcttttttaattccatataatttaaatcctaacactaggtgaaatcctaaatagataataataggctcttaatttgatatcctccatcaaactattctgtcagataactgaaaaaataaagagactcctattagattttgaattccttctcttctccctttagaattcgaatgcagtatagtgaaagagtacttgcccactcaattcaagttaatactcaatcatagtgtagaagattgtgaagaactccatcaccaaaagagatacaggttcagatcttggcaatactctgcgacagaaagaaacaagggttagagatctgaacagaaggagccataatattttgctaccaccaatgtaaggttttctacaactttatatgtgtttattttattattttaagaaattcatatttaggattttagattatagatcataatcaaacatacatgttagtaaatttagatcctggtaaaacaagttccaacaattacctcttgatagctcaagggttcagagctatcaacttcttctgcaacagctaatgcataaataatgaagtcaacatagccaaatttactaggagccctgctctctctcctttgtatgtttctggctaattggtagttgctaaggtcaccctggttaccctcatcttcagtcaattcttcatgttcttcttgagttgtagagtgactagatgactaatccacctcaatatgcatattgtctagttggacagcttgaacattatcaggagtgactttaacttccatagtcatttcttcttccttaaacacaacatctttactgattagacactttttctgtctaggttcaaggcaccacatcttgtagcccttaaccccatctagataacgaaggaacatgcatcttaaagcccttggttgtaactatattgtttgatatgcacataagttgtgcaaccaaacactctcaaatgttcaaacttgggtggcttccctgtccaaatctcttgaggtgtcttaaaattgttagccactaaagaacatctatttattagatagcatgatgtcataagagcttctccccgaaatggcctctccaaactagctcttaattgcaagcatttaaccctttccatgagtgtcatattcatcctcttagcaacttcattttgtcgagggttcttcaccacagttttgtgcctcatgattccttttcttgcacagaaggctttgaactcatttgaacaatactcaagtccattatcagttatgaggaccttgagtttatttcctgtttgattctccagaagttttctccaattgatgaaagtctcaagggcctagtctttgtttttcaataagtacacccacatttttctactataatcatctattatgctcataaagtagtatgcacttcccatagttggtattcgtgaggatccccatagggcagaatgcccatatgctagtctatcagttgttgtgtactcacctttaccatatctaattttgcatgccttcccaagaacacactcatgacataactcaagcttgtctttcaatttctcattgaacaagcgatagttctccaattcttcaggtcctctctagctgacatggccaagtctgagatgccaaagtctagttgaattgttaattgagttgttggttaatggtgttgcacttcctagtattgactttccatctaagatgtaaagaccattatatagctaacatttaatcaatttttatgatccttgacttatcctcataattccatcatcaattttaacagaatattcagctttatcaaacatgccaatagacaataaatttctcttaagatcaggtacatacctgacttgttgcagagattttaggttgttaaaatgatttttgatcataacaatgcctattttccctttatgtcacatgctttttattgccaagcagcactgtgccattggtatcttttgacaatgtactgaataaatctttatttggagtcatgtggaatgaacaacatgagtctagtacccattctccacctgaatcagaactagatgccacaagaacatcaacatagtcatgtccattagcaatatttgcttctccattcttcttgtttcttgtctgttagccctctattttcaacttttcttttggagttaggcaattatctctgaaatggccttcctttttgtaatagtggcattgtttaccagttgtggcccttgaatttgaatgttctcttgagtttgacttggattgatttcctttgtatccatttgagtgattctggtttcccttgtaatctctcttttgaaattttgcttgacaatgagaagtccctcaccattgctctcatttctatcttctcccttcttctgaatttattttgaattgaaagctgctttacttcaatcatggtaagaatgtctttcccatacagaattgtatcaataaagtgctcatacctctttggcaaagatttgagcaatatgattgcttgatcctcatcctcaatcttcacaccaagattgttcagattaaggatgattttgttgaaatcatctaaatgttttcttagttctctggtctcatccatctgaagtgagtatagtcttttcttgaggtgtaacttatttactaaagatttcttcatgtagattgaaaaaaatttattccagaggccaagggcctattcctcatttgagacttctcttaacacttcatcactaaggctcaagagtatgacattgtgtgcctttgattcgatctcattcttcttcttcaagtcttcgatctgatccatggcttctgtatctaatgcctttgagatcccttgatgaattagaaaggcttttattttaattctccacaagctaaaatcatttatgccattgaatttgtccatctcaagtctgattgtggtcattgctaattaactcagggggctcgagtttggttcttgatagtttaaatgtggttcttgaaggtttgaatgcggattttgaaacctacaactctagtaccatttgcagtggattaaaaccacttgatcttcatcgttaaactaaattgagtgagtaagaatacaagcaactcaaacaaacacaacttgaattaaaccaacaataacaaattaactaaaaccaaaaaaacttagtttgaatcacaaagggataaaatgaatagaatctttattgatcatcaacacccattacagcaatagttcttgaactcattaaaactcaacaatggtgtatctcaccaattacaaaagctcacctggggtacccttgatcagaaacacaaggaactcgtacaccccttcttcactcacactaaatctaaaatagaattacaattatggagaaaagaaaaagagagaattatagacaatgagagagactaatgttgatgttgatatctcttgagtgtttaactgtaatgttttatatatagggtaataatttgattagtttattcgaaagtgaaatgtaaccaacttaactaccactcttgacacatgccaataagtaggggtgagcataaaatttggaaaactgaaaaaaccgttcaaaccgacctaccgaacaccattggaatcgagactgacgaaaccgaaaattgaaaaaactgctaacggtttaaaccgccattgaacagtcggtttttttttggtaataaaccgaccgaaaaaacaaaataaaaaaccgaaactgagcgttatacatatatatattaatttattaagttttttctcatgtattatagttactaataatatataaaaataatatattatttttttattaatattaaagttaaaagaataagataattagt

SEQ ID NO: 295068 - DNA, 1441 bp, Cannabis indica
ggcccaaagcgaacaatatcatactaatgggaaaatagatagtgtcctacagtcctaacacttatcatttcattctaaaagcttaaactagcacttcgataataagttaggtaaccgataaagaaatatatattttcaggggcaatgttagctagtttagaatctagattgataacttttattagaatgggaatatataacaaaagaaatcagcaataaaatctatagtaacttttcccacacacccattctatccaaaaacaatggcattttctcttataactgtactagcaatgtagatacaatcttttccttcacaagcttaagcaatttatgataaattttctttgacatttagggctagtttagtatatcgtattaggtcgtattgtattgtattaaattaagcaatatatcatatttttatataattttatgttaaattttactttatattaaaatattatctatttatatgtctataaaagtcaaacaccagatataattttatataaaaatatgacataaaatataatttaatataatactatacaatattataccgtgtattagggcgtactaaacgaactcttaaagaagatgataaaaatgcatattataaaaggtttcctttattgctaagttcatgcaactctcttaatatgatatggtatgaaagaaagcgtactagccttttctccaattagcttcacatagcattactttggtttaaaatcttgtttaaggttaacatattctaactaaaaaaagttgttcacaaaactacatggtgatttatgaaaccctctaaaaataattataaatatataaatataaataaaataaaaagaagtatatttcacaaataaattaagtcaatcgaaatataaactaaaagaaatttggaaaaattaaagaatacaaaaataaagaagggaaaaagagaagaaaaaaaaaacctgcgtgtttgaaaaggaataaactttggaaaattgtggttataagttctgacagccccaaaagcccttgcagtggtcgccgcagaattcctgtagaagaaattccaccaaagcaaacaaaattcgcattatttctgagaacaaaattgaattttacttccaaacaaagaaaaatatgtaaaagtaactgtaaaaaatacctcagtagcgaaaatgatggaattgcagccattacagagttatcctaataccttcttctcgctagctattctcagctataacagactactttttgcgagaaatttcatttagattttagaataattagccactcaactttggatactgtttaaaatgtacggtgtattaaaaattgaggagttttatttgcatgtaaaataataaatacaccttattattaaaataaataaaaatttaaataattttaaaaattatttttaatattttttttatgttaattt

SEQ ID NO: 295069 - DNA, 3065 bp, Cannabis indica
gtacttgctctcttgtggttttttcttctatgctgaatgtttttaatggcgtgatgctttgtttcctaattatccctatgccattttattttgctgtcctattataataatacgattttgtatatctgtaattgtttataatccataacctttaactttaatattgatttgctgtgactggaaagaatattgacatgcatatgcatgtattgatgtatatagttttatgagaaattagtgttgacaaacctatctttttagatagcccctttacgtgtttatcattgctattttttttatttttcataaagaaaggtgaataaattttgttcaattgtcatagttttagactgtttccatatgaattgcaagtaccaatcaaaatttcattcctggtaaccaaacacattgctcctcttctcaatttgaactctccttttgcaggaatctttaaaagctttgcttaagatgagaaggatctcaaaggagaaagagcttgaagctttgttagcaggggaacaggatccttgctcatgttacatggaggttattttgacatatacataactgtttccctagaacttgcatttaccttaaataattgatcaatttctttatttttatttttcattaaatatactaaaatgtgtaaggggcattgtattaatgttgtggtcatatacaaacctggccaatgatgtatcttttattgcttattgtaggttcaagcaggagctgggggtaccgagagcatggactgggcagcaatggtgatgcagatgtataaattgtgggctcaacgtcgtggctataagattaccgttgtggatgaaatgcctggtgagattgcaggaatcaaggttgatcatcttaccacaacttcactgatttatttgttgccagtcataaattgaatatcttgagttcttttcgaatgcattattagttaacaagtttagaatctatcttcggttctgcttcttaatctgatcttgcagagggcaactatcaaagtagatggtgattatgctttcgggtatgcaaaagcagaagttggagtgcacaggctggtaaggatctccccatttgatagtaacaagcgtcggcatacttcatttgctgctgttgcagtaattccaattatgggtgatgcttcttcccgtgtacaaattaatgaatctgatcttcgtattgagcggtatcgttctgggggtcctggagggcaacatgctaatacaactgagagtgctgtgaggatagttcatgtccctacaggaattacagccacttgccaaaatgaaaggtataaagcatgcttattcatttcctgcaaacagtctttttctccataactcagtttcacagtacttattttaagctataagttttggtacacagatcacaacaccaaaacaaagcttcagcaatggctgtactccagtctcgattagaccagctcgagatgacacgacaggctcagatgaattctcagcatacgcaatctcttactgatataacttggggaagccagattcgtagttatgttttacatgtatgctcttttcttttgaaccatacaaattgaataaaatagtttgatttccattgacactcaatgctcaacattcaaagctaattccatctactcttatgaatgcatatgcagccataccgcatggtgaaagatctccggactaattatgaggtgtcggaccctgattctgttcttgagggagatttagatggctttatcatgagttatttatcagcttccttggataaggatttagaatgaccggtaaattcgagtttttgtcaaaggtttatcgtcgaaacctggcatgtttttagcaatggcaaccgtttcgggtgcatgctgcagagtacaactagctccaatggtgagctcaacaaggatttttttgagggacttgcctatggagcaatgttatgatgttttatatattaaagtatatataacagttttgacagaaacactagaacatgattattactgatgtaatatttctatagatgatgaaagcaataagcatgacttggttttcatctcgattctcaagtcaagtcttatagaagccatatattaacctcttgccctcttgccccttatttatttgggaaaattacattttgtacgatttttgagaaaatgagctatttatggtaaaaacattaattataaatatgtaagactgttgttaaaaatttataaatattattgtatttttgtaaataaagtttaataactcgtcaacgattgttattggtcagaaactctacgtatgaatgattgaagattagaagagaagtttaatgcaacttaaagaaaagggaaatggtaaagggtaccagttctgtctaacactctcctatgtgtcaatatcgatattggtctaactaagtatcgagtcccatataatttaatataatagcttttagaaagcattgttaaacaatcgtaatgtgacatgtcgagaaggtgctagacatgactagtgcctaatagcaatgctctaaaaaaaatcacaaagctgaaaggttgaccgttgaggaatcatagaattctcgtaaataaaattgggtggacgagagtagttgaaagggtgtgtgtaacgttggaacatgacaggatggtatgaaggcaccccaatggcgcaggtatacctggtgataatgaggggtttgtctcttgattctttttgtgttcctttagggtcttgcgttgttttcttagcatgagataaaaggacttactaaatttaaggagagtgtcgtccaacatgtttacccaacaaccaaaacccttcgagtttgctttaccctgacggcgcagggacctgcatcaccagatgttgatgtcataagggtggaaattgttgcatgtttttgtcttgcttcctttaaaacttattgtctccaactttttattaaagggccaaggaggggccttggccccccttccaaaaaaaaaattcttataaaaatatatgtacatatttaaaaattgcatactcaaaatgcatataaatacatgtatacacttg

SEQ ID NO: 295070 - DNA, 2230 bp, Cannabis indica
atcaaattggtatcagagcacaaagatatgggacctaagaaggattttagtatggatctgttgaaggagaaattggagtcgatgaactttgaactacataaagccatcacggaggatcgaattcagttggggaaggagattgctgatactcgagtacagcaagacaaggaacggacagaggtgcaaactctgcgatccgaaatgcagaagctgccggagatgatgatggcacagtgggcccgatttttgacgtcggggaaggcaccgatggaagggccgattctcagcgagaaccaccagcaaccacccactgtcgcaggcggcgacaggtcatcttcctcagccccgatgggtccccaggtacgatttcctccatcgccgactccgcaaggctcttttccgaccgatcctcaaccaccgatccactcgttctacccgcaccaacaatcctcgatggatttcagaccaccaagaatagagattcccattttttcgggggacaaccccgaaggatggatttatagggcggaaaggtattttctcatttctcggttgacggaaccactcatgctcgaaacagccatagttggcttagacggagatgcccttacgtggttccagtgggagaatcaaaggagacccattacctcgtgggctactttgaaacaattattgctgcatcggtttcgggctgtaccaattgggtcattggcggaagaatttctgtctctgaaccaaacaaccaccgtgcgcgattatcgattgcgatgggaggcatcggcgtcgagagttccaggtgttctggagcacatcttggaaggtagtttcgttaagggacttaaggatgaaatcaagggacctttgcacattttgcaacccattggattggcacaaatcatggaaacagcccaacgggtggaggagggccaacacttatttcctcctgctgggcaacagattcaacccaccaaacccaatagacctcagatacagcctctcacccatactagaaactccccacacacttttacccgatctattacagctgcacctatgaccaattccactacattcgcaccagccctggccacttccacgggaaaacccccaactatgaggcggatgtcggaatcggagtatcaagataaacgtgccaagggaatttgttttcgatgcgagaaaaaatatcatcggggtcacgtatgtgatcagaaattcctccaagtgatgttgtttgttgatgaagatgaacccccacctgatattgaatcactgccaccatcaccagcctcgaaagaaccagcgactactgaggaaacattggctacgttatccttgaactcccttgttgggatatcgtcggctcataccatgaaactcgcagggaagattgggcagctaccggttacggtcctcatagacagcagtgccactcataatttcatttctaaagaggtagtggaagtgtcgggactacctatcacacaaacaacgaggtatgggatcttgttgggtaccggtgatcgagtcaaagctgaaggtgtttgctctcaagtcgctttggaattgggagagatatgtgtgctgactgattttttgccattggagttgagcggggcagatgtgatattgggagtcaaatggctagagactttgggaaatatgcaggttaattggaggaccatggtaatgaaattcgaacgagggggctcttgggtgaccttgcaaggtgaccctagcctttgtaagtcacccattacattgaaggctatgattcatacagttgaacaagaagggtacggatactgggttcactttggggccatacaaggggacagccgagaggaggaacaacaaatccctagtgttgtggaggaagtcatccacaaatatgactcggttttccacatgcctccaggtctcccaccagaaagatctcgtgaacattgtattgtgctaaaagaaggagtaggtccaatatcggtgcgcccctatcgctatgctcagattcaaaagaatgagattgagagaatggtacgagatatgctccaagtcggcattgtaattccaagcaccagccctttttctagtcctgtatattagtcagaagaagacgtagttggcgattttgtgtggactatcgtgcgctgaatgagagctgtgcggcaaagttcccaattcctgtgatcgacgaacttttggatgagctctacggagcaaaggtgttctc

SEQ ID NO: 295071 - DNA, 6775 bp, Cannabis indica
tttctaaaaatttacatgtggtcaaatgtacgcacataaaaaaattagattaaaaaagttttttgaatatcaaaacaaatataaggtcaacgagaacgactcttttatgaggtttattatagaaattttttatactatatatacttatatataataagaaaaatagaagatgaatattacaataatatatcacataacacatatgtatgggcagctgatttttttttttttttgaaagaacatcaagttcattaagcagaaaaatagataggaatcacagggattccctccccttgatacaaaataacttgctcattagcgactctagcgctcttagccaccccatccgccagaaagtttaaactacagttaatataaaaacacttacacactaatagattttttaagacattaacaatagaaaagtaaatattagaggacttccactcaggaggcctgccttcagtagcaaaagccttaacagctaccaaggaatcagagagaatgtggacttcttttcaaccttcgtcaatagcccaattcatcgccattagaatggctcttaattcaacttcaagtacagattgagtatatgttctttgagctttaacaaaccaacttccatttgcatgatccacaccaattgcagcaattcctgctactcctttaatccaagaagcatccgtgaaaagaacatgcctgacctcctcaattcgtgaacacatctccaatctcacctcagctaaggatggatggttgggttgttgttccctggtttccccctctctacagagaaacgaactcttaatctctcgagatgctttatcgatttttatggcagctgagataggatccgcaacaatgtttctagcccagagggcatttctatgatgccaaatttcagagaaaacacacccaataaaattaagaagttccttcctatcctcaagtggcagagaagatatgagattctccacaaaattaaacatggtatcacttggaatactttcaatcttcaggggtagactacatcctagccacaccgccttagcaaaggtacaatcccgaaacaagtgaattgcacattcccctccccttccacacaggctgtaatctttatcaccaacaaaaggaagtctattctttgtgggaatagcttcattcaacaatctccataatagaacagaattttttggatgtatccccccttcccaaatccatttccaaaccagatttggaggtgcaaacctccaagattgatctaagaaataagcagatttaacagaaaattgccccgtgaggctatatttccagtaaatctgattcgagaaaggggtaggaattctaggaatctgaaggatacgattccctagctcttctacaaaaatttggagtatgatctcctcattccattcattacctagagaaacatcagctaaggttgaaatcgtgtaccttctcaaacagatctactgcattaattctgtgaactcttgatattccatccaaggtatccacggttgcatacaaacgttgatggaggcccctgaagcagctataaacattgagccccttaacagtatatctctagtctccaggatggccttccattgatgagagttgctactttttgaacttacacaccagaaactttcaaatttacagtatttgttcagcaaacactttgtccagggtctctccttattcgaagcaagaaaccatgccagctttgtcatcagagctttgttcatgtcctcacaccttctcagaccaagtccccctgatgctttcggtgtgcagatatgatcccaagctttgagagctaagaatctgtctgtctcaacattaccgagccaccaatactttctcattaaagcatccaattggcagcaactagataggggaatcttagttgtgtacatagcatagatcggcatcgatgaagcaactgattttaaaagagttaatcttccggcataagaaagtaatttcatcttccaaccctccagtttcttagtcatactctctttcagtcttgcataatctttttttctccttcttttgaaaataaaaggattgcccaaatgtttcacatctcctcgaacctgctcaatcttaaggatacttagaagccgatttttcctctcacaactcaaattcttggagaagagcgccccggatttggatttactacaagattggccaaaccacatctcataggttgataagcacttcaagagagcacttgcatcattttcattggctcgagcaaagaggatggtgtcatctgcgaacattagatgagaaatcggggggctgaatgagagatcctgatgccatgaaccgaaccttggttttctgccttgattaatagtttggataacacctcttgacagagaaggaacataaatggggataggggatctccttgccttaaacccctttggggaaaaaacttttttagaggggatccatttaagagtaccgagtaggatacgcttgaaacacaggccatcaatagtcgtctacttctttcgttgaatccgttagcactaagaaccttcttaataaagctccactccattttgtcataggccttatgcatgtctagcttaatagccataagacctcctttgcccctcttgtgttgaattttatggatgatttcctgcgtgagaatggaatattcagcaatccacctaccagggataaaggcagactggagaggagagaccaaatcttccatgagcggccttagtctattggataggatcttcgcgattaccttgtaggagaaattacagagacttattgggcggaaccggtccatactcgaagggtactccactttagggataagacatataaaggtgttgttgagtccgggatcaatgtaaccacactgaaaaccttccttaacagaatcacaaagacaagagcccacaatgttccaatatttcctaaaaaaacaacctgagaacccatctggtcccgaggccttcaagggatgcaaactgaaaaacaactgtccttatctcctcgttagaaggaattttcacaagatcttcattcaattgagaggagatacgctttacaaacagatcttcgaaatcattatcaacatttggccgagaagaagaaaaaagatccaagaagtaggaattgatgacccttgctatacttttcttgtccttccaaatcttcccatctttatccttaatcgcccagatattgtttctccttcttttaatgacagtggctgtgtggaaatattttgtattgcgatcacctagagcaagccaaatcttcctggatttctgcctccacatgctttcttgtttcaaccaggcatccatcaattgagattgaattctaaactcttcttccttgagtacatccgagataggttgttgctgtatccattccaatcttcgctccagattcttgatatcagctgtatttacatttttcaaattccttctccattcttgcaaggcctttcttgtactgcctacattctgcaatcgagaattagttgcaccacgacttgtagaacaccacgacttcatgacttccattctacaggaatcctcccacgtccaagcttcaaagaagcgaaaaggaatatagcctcttgatacaaataaatgagtatctagtaagatcggggcatggtccgaaatagaaataggcaaattctgtatccctgagccagaatattctgtcacccaattagcagagcacaacgctctatctaacctttctctgataagaccccctttgaatcttttgtttttccatgtatacttgcttccagtaaaacgtaaatccacacatcctgtattttcaaggaagtttctcagccatcttgtttcagcagaagtgactttgttgcctcctaccttctcttcttgatttccaatacaataaagatcacctatcaatacccagggagtttggcaatgattgacctccctttccaaactgctccaaaaaacatctttaacttgagtgtagggagtgccgtacacagcatacaacttccattgaatctgaatttgacaatcctaaactgttgcctcaaaaaaaccatcagccgcatagttaactaccagctttatactacgattccaaaataaacacgagcctcctgcaaggccatttgcactaaaacaaattgcttctgaaaatcccaagttacgagccaaaacctccatcttatctttccttactttcgtctccattaaaaaaatacaatccggcttgtattttttaacccaaaccattaaggcttggggtgtcgggtctctcgcgaggccccgacaattccacgataggcacttcatggggcggttggggggcttggtaagggccgcctcctcgcccgagtaaaaattttgtgaactttccacttgtacctcaacaaggttaagggtatcaataagatttctgttggttccatcatgagtagatgtcgttgcctcctgaattgtccctttcttagcaggagtttgtcttgatcgagaccctttccttctacgtttttcattcttcagggaagaggaggtagtgccagagcccatcttaaaaggagtgtccaaagtggaggagaattcaggaagtttaggcacctcataggagaactccatggtattttcagccatgtgttgaacataaggaacaagagtaaggctggctttcctcttcttcttttggggacatgggtgaatcaagttggtcacatcctctgggtcatgaaacaaagttgggattggttcaaatttgtcaactggtggagggcccattaattcctcagccagcccaatttcctcaacataagtgggccaagggaagtgggtgggctcaggatgtttgtggggctgtcttgaaatacataattcagcatggggtttctctatcattttctcatatgtgggcccaatatgggccatgatagtggtgaggatcccattatccttagggttaggagggggtcttgaggaaaaaaattttaatatgtcattttcagataaggtacaagaattaccttgattatgtatacgttgcaccctaggagaagctgaccgagcttttctttccctcaggttacttcttgaggggagagaaccaggaggcagatgatttcttttaaccatcggacatgaaggatgtttatccacaattttcaaattttttcccaaagtgactcttggggagttatcattgaccctgataactttccttaaaggtttgctagcagggaccgactgcaaagtaggtacactgccattatcgatgatcagttgctttcctttatctttggtttttaaccatactccgatggtcttctcactggcaccggagttcggccgccttcttctctgtaatactgaagctggtttctagtgttgaagcaactaaacactgttgattcagccttcatccatggaccataagctgggaccgcatctccttcaggtgggaaagctaaggctgtcgatcgaaaacatgccttcttatcatgtccaagataaccacaattgtagcataacttagggagtttgaagtacctgaattgaatccactcctttcttcccctcttaatatccagaaaaaaaatcggaggaaagttggtaagaggtgtcaatctctatttgaaacttcagaaatcctcttcgaacaactgtccttgtgtctgcttgatcactccgaatgaatttccctgcctttgatgccaccgtacgggagttaactccgttgaggtaaggggtgggcaaacctgaggcaatggcccagaacatagctttcctcatatccacattgtaccagtcaccatcctccggccactctcgaaggatcaagagttttccattaatgatccaatgtcgattacgtagaacctcagcgcagcctctggtttgtcgaagaaaatgccccagactcctggcttcattgtcttgaacttccaattccccctgagtttccaaatctgagtaagaatggcttttagtttagatttagagacccctttgccatcaaagaagctggcaagaacccctgagctaacaatctcagcagtgagttcgaaatcaggttctaagtccagggtcatggactgtaaaaagttatttcgtagggcttcaaaatcctcttttgggtcaacattgaattcattgttttgggtctctatttccccctccccgttgactgtagcattagattccttgctattgtcaaaaggttggggtagttgagaagtaatattcgtattaatttcaggatctcctgtagccacagattccgaattcctttgttcacgtgatacacttgctttgtcccccataactcgcactagagaataatgactaaccgattgattagaagccttaaaagaccaaaagaaagaagaaggaagtatagaacaaaaacaccactaaggttttctttgaaaaaagctaaaagtaagacatttcgtcaagttattaacccaacactctcaaaaccgagagaaaagtattgtttgttgaccgcaaaatgatgttgcggtactgtagcagtgggttcatgtattttattaaatttttgtaatatttgataagtgtaaaaatcacttggtgcaagtaagtgtacccggttataattttggggaattaccacatataatatatattttttttcaaatttacggtttgggtttctaaagtggttgcagcgctagttgcaataggggtttctatacattttttgttgccatttaggttgtagcgctagttgc

SEQ ID NO: 295072 - DNA, 5253 bp, Cannabis indica
tttagtcatttttattcttgaaacagtagagtaaagatatgttcaagagacttttctctcaaattcttcaaagaatttctggctttttgtctgcaaatcttgactcctcttgaaattttctaagataaccatagaaatccttagtttacaatttagaatcttgattatacttaaccacagcatctgattctaactgcactttcattttaacctcacgatatccatttttcacatatccattaggggtttagtgagaatgagattctaattcaaagttttgaacttctgggttgaaaattttgtttctaagttaaatttctatttttaattcctcaatcagacctggtcgatacattcaacctgttttttatttgttaccccgaccacttctcattttcttgtctcctatcttttgtagatgaacccttgtgaattttggggaggcaaccacattatcgacaaggatctactttaacttctatacgatgatcatcctcgtctctgtaccagtccatatttgtctagtgacaatatttctaactttagctttgaagactgggaaataagtagtggacacacaccttccctagaacccgaggtagaacatcatttctatcttgaccagatccaaggtgagggatacgactattttgtccgggaacataggaaggggtaaagacgctatctttcgtccaactagacgtacatagtccgtcaagacgtagtcgacactctgcttgagggctacccgaatcctactgcggcgggcaaacctcttgccacatttgctatgactattgctaggcacacaaataaaactccgtccaaatgtagaatgatggcacggaccaagcagacagtgtagaaatcttcattgtccgacccatacattacccaccttgccaccttgcctagggcagaataggcccaacccgctactgaagagagggatattgtttgggacgtttaagttaaaggggtagaggaccacgacgaggtccgtcctgctactcctcctgatgctaaaggagatgaggaagagggagtagatcgggtgttgccattttagtggctacaatgaagaaaaaaagcctgtatctaaggatgtggtgttctagaggctggcgaagactatgctgttgaggaatacaccgaggctatccctctgaggaggcaaagtgccctaggagatcaatggatttctccaccatccgtggtgaccatgacgaagatgaaagattttctagagcgtggttaccttgagaatgtcgaatgcttccttccctcccttaactagagaaaggttactgcgcttagtcaggagttcataccaggaagggtgcgatgttacccttgctcccataattaaaaaaagattacggactactatcacataagtccgacctaattcacccctaagggcctcaagtacttgtccaccttgttcatcctctacgcctcacaaggatggggtgagtcgtccccgcatgataataattggctttttgatatgaagtgaagtcccaagtagaacaggtcggggtacttctattttctcaaatcgagaagaaatggttaacagacaccatggccactgaggtgaccaaaatagggggttttgtggatgagcactattttgtcaagggagtggacaccgcccatagtagttttcaataggtgtcgtcctactaccgccctccgttcacacttgagcttaggaaaagggtgtagaagattcttcaacttcctcctactgcacggaatatctctatcttggccaccgaggccaattttgttgagtaccaactttattcggccgattttgtaccaaaggctgtgaagacagcaaaggagacggtgcccagacaagagactccaagcatgaagaggaaaagcatgctcctccaatcagccaaatacctgttgagaaatctatcaagattagagaagaacataaaagagttgctcggccacctaccccagtggcaggaaagagaaaagccgtcttggtggagtaggaacaggaggattcctcagatggtgagcctccttctccgcttgttcgagagaatgctcctgcttacgtgaaaggtattttcactcacatttaaattttatgtgtatgagcttatatcatacttgtctttaacccccttattttgtccgcatgcttctatatctcagaaggtgttccaagctttgaagaagaggtcgtgtgaaagctctcgccagatacctccagctaaacagtcgaaggtggacgagatattgcccaaggagaagtgcttgattgagtcacccattcatgtcactaaggaggtggcattggagttggagccattaacatagaagacctccaagttgaaaggtgccaagggaggaagcacggatgggtctggtccgcccaagcctttaaatacttctatcattcttaaccctgagaccaagaagggcaaggagatgcttcaacattactaggacaagttactccctgaggtaaatgattagttagtcggatgagatgagatatccgtggaactactaatggacagactcctaaaggaggcaacttgagtaagtatttttcccttggtttttatcttatccttttatctgtgcaggttttaaccttttcttgtgcagctcaaccatggaggcatttcttagttattgtgtggcccaataaggaaaatcttgaggtagccaaccccacagctccaacggaccaaaacactgagcccctaaccaccaatgaccaagttaatctgtataaacaaccagggacttcgaccgtgtgaaaccttcttttattttttttaatcggcccatgggcctttttttaatacaatatggccgacaaagcagcctttaaacgtggtaatacttcattttattttaaaacaacttgctgaccgggcagcctttaatctcaagtttatgtcgtgcttttgtcatcttttcaaaatgaatattttccattgtttaagtaattacacatacaaactgctatgtttttccttgagcttgttatttacctatgctttgtacgagtatagttgcccctaaatgaccgagcagacttatgactgttagtcacttgcatttcacaagttcagttttcgtttgttcgacttctggcttcgagcaaaccctttgtacacatttgaatggtaaattcataacttgctataaaaaatgattgacacaattagaatgatagttaagatctttgttcatttatttgtcagaataattttgttaccgcagtaacttacatatattgaattatgaaagatattacatgatctaacaaatctttagctaattaaaacataaaacaattgcatttttcaagctgtactttaaagatggtcatctgactgagtgctagttattttatccaaaccattgagcgggatctgcccagtaggccatctacttaagcgtaaatgttcttgaattgtgtacttaaagggtgtcatcaaaccttgtacacttactggtcatatttcctaaaatgttcaacgctccaatatattggtactagaacgagctcaatgtttttgacataccatcccagcttgtatgatccagagtttgtgaattcaaacacttggtatggtctttccccattaggccaagcacaccagtcgtgctgacttttgtgttcatgaatactcttgtaaggaccatagctcccacaaagaattttcttaccaccacttgcttgttgaagtactaagccatgttttgttgatgagccactaactttaggtttgctgaggatcttttttcttcaatcttgtcaagtgattctaccaggagggcatgattagtttcttaatcgtaggttaatctcctttgggacagagcttctaattgcatgggcagcatggcttcataaccaaaggccatagcaaatggtgtttgctcggttgctattttctcagttgttcggtatgaccacaattcttccgatagttcctccaaccacttccttttagcctcttcaagccatttcttcatggtgtctttgagtgtcttgttgactgcctcgaccaaaccatttgttttagggtgtgccactgcggagaaactttttatgatttcatgtgtcacacagaaatctaaaaacatctggctatcaaactgtttgccattttccgaaacaatcttgtacagaagttcgaaccgacatattatatttttcaacacaaagtccaacaattttttagatgtgattattgcttaacgctcgccatctgtccactttgtaaaataatccaaatgagaccactgcatattgtaatccgcccttgcccttgggcaattgtctaatcggatctattccccatatggaaaaaggctaaggacattacatttttattagctcattaggcagtgcatggggatctttaaaaatctctggcatttgtaacatttcttcacataggcctttgaatcttctatctttgtcggctagaaatattcttgcctttgtattttctttgatagactttgtttcgctacgtggttaccacaaaatccatcatataccttggataggagtcgtgcagcctcttcttttgttacacatctaagtaatggcatggagaaacctcttctatacatcacaccttgaactatgatataccgtgtagcttttttcatcatcttctgagctttgttcctatcatttggaagttcttcggtgttgaggtacaagcttctataggtgtcatccaatttggtgttatgtctatcattttgacttaatctgcacaattgatgctgggttcttctaagaattagacgagactaagttggccttatgtgttacagtgctgcatgtgagccgtactagggcatcagtagttgcattttcttctcttagaatctgcgtgagggtgtaacccttaaattgtgtgagaaagtcttgtatattgcttagataggtcatcattttctctcctctggctgcgtactctcccgaaatatgattcactaccaactccaaatcactacagacctcaatgtacttaacatgtactgctcgagaaatttttagtccagctatgagtatttcatactttactttgttgttgggggccttgaaaatttgattgctctgtgtaggtgatgcactcaagtgtaacgagggaaattcctgcaccatagagttggtatgtagttgatctgtttacatgcaatctctaggtagatctgtctgttggaagttattttaccaggatc

SEQ ID NO: 295073 - DNA, 1744 bp, Cannabis indica
attctttataactagagtgtttcaaggaattggtgatttccatcttacgtgaaaatggtaatcaaaataaaacccttaaatcagcattagtatttttttggtaatcactttgttcactcatattacttccatgtaaatctgaagagaactttgttttcacttgacagatccttaaactctccctttaataatttagcacctatttatattggttttatattagtgatgctatgtgggcgtgtgtggtgtgtatcattattttcattgttgatatggcaacactttaggacgaaacatattcttaaagtgttcttggttggtgcaatgtggttttagattatgtatttggcactcgtaaatttggtgggaatgctcagtctattacaaaagaccgatgggtccatcacacgtcttttttgtgggattacgatgtcagcaacatggcctacctaaaacacccgaaacgggttccagaatatcgactggtatgtcattttaattaatcttttgtaatttgattgaagtctcatccactttgtttcccaatttaagtatactttccaagattcggtgatactatattgttcaatattcagttgacagatgaatttattaaggttgtgtgttttggccaagatatcatatttgacaatctttcaaatgttttagctttactggattaccttgcatttagcgattttttttggtttgtttgactaatgctgttaacaggtgtgaaagttttataagattgtttaagcaatgtatggtggtttcaggcaagagagcacatggaatttatatgccgaatgaaggattatatgccaagatcattgtttatagacaaaacagtagaggcgcttgaaactgatttcaccgtgagatccattgagccaaatggtttgcaggctttattgaatacaaacttttgtccctcaactaggctcttgaccaagaaagagttggacgttgctgcttttgcttctcaaattgagagctctcctctctcactctaataaacttcttgaatcggagagtttgttagttgtcaattggtgcttaattcaagtgaaacgcatttatttttaacatttttgtttcaaaagaaatacatcgattgtacttgcaataattaagtagatggctaaagaagatattagctttactttttggtcactggtcaatttgatcggaaagacttaacattcatgttgagtttcatattcatgttttgtttttgttaaatatttattgtttacaatatgagaaggaatgactaattgtatatcttcctcagattttgatcggcatttcatattatttttagtagttttttttttggatgaaaaagactaaagacgcttctcgaagaagttgatctaaagccactaagactagctcaccctagtctcaatggtgaggatggttggaaaatggagggctgtatgtcacgggccgcctatttgggcaccccaagtaggtggaacgtgcagcacttgctggcacaccgagctagcaagtcagcctaaacgcgcctgcaggcaaacaagttcaaaggttaggcacgatacatgtctcgcacatgttgagtgcaaacaagaagcatgagcaagcaaatacaaagcgtccccaaggaccaatctcacacaacccacaagcaaacatatagacaaatggcacgcaatggcccaacaaaggcaacaaacaggcatcacaaagaccatatagaagcatacacaagaag

SEQ ID NO: 295074 - DNA, 2013 bp, Cannabis indica
aaaaaaaaaaataaaaaaaaaaaaaacaaataataattaacagatacaatacagagagataatcaaatcactaattcttaattaaacagtctccaaatttacctacaaatgagcttttcattatgggctcaaatttgggcttgggcctcataatctaagtagaaaaatactgagttcaggcccaccattaccatcagggttcatcatgtaaaaagcctccgagtcacgactccccacgactcgttcaaacctcgctctcatataaagcaactcgccctctgactcagtactcttcttcttcgtatcatcatcctccaccaccggaataactccggcaccgaccgaaacgctccgtacagtgctaagcacgtgcgaatccgaatccccacacgtgcgactcacagcgtacccgcacctccttccattacagtacatagtccacgtgggttcttgaaaaagcttccgaccaccgccgttcgcggccgccgccgggattttctccgattcgagtgcgattcgtactaaccccgatgccatctccttaaccagcgaggcagtagacatcgcaagctcgagtaacaaaacgggttcggatctcgggtcgagttgtacggcgaagctgacgtggccgcggcgattaccgaaaagtgtgccggttactttccggcctaatgatggggttacagagaggtgagatgggatcgttagccatttacaggttgggaatatggcgggaaaagagagaatattgagaagtgatcggaaaattgaagagagcttaatgtgagtcttggtaaaattatgatgggttaccggagaatgatgacgatgatgatgatgagttcggcttctagttaaaagcttatcgaaagctccgtaattttccggcgaaagagccgtcgtggatgatgaacggaagtgggtcgccgttgccggaatgatttttcttgaacctctggcattactggtacttgcacttctcggaagagtcatgaactcttggtgtgtcatcatctatacaaatatgatttggttactagtaacttagtactaagaatttgtagtaacttgaatttgggattttgttattgaatgttagtataagggagagagggtatttggtttttggtttttttgtattggaatagtgttataaaggattttttggttttggttttgagtttgatatgatatatttagttttgtggtttggtttgggagagagagagagaggattgagagtgggatttgatgggagaataggaggggagcaattaaaattggccgacaaagatgatgatagtgttcaaaggtggccaatataaagggagtctatggaggcttgtggttatgatgatcacaactccatagactttttttattattctaatttatacatgagaaatggaacctaattatatatttcaatttaataactttatatataaaatattattatggttcattagtggtacttagtattatttaaaagcgtttttagttagtgataatctctaaattattaaattaaattatatagatttcgatacttagttacactaaaatatatcttttagcatttttaaggtggtgctacattatcatagtgttagtgcctaataataatattcttcctatattttagaaatattatttttgttcttgtctaccacttaaataaattataatgcaaattttattatatgatgtctatggtgtaatcgaatcagaaattttgtgtattttaaaaaaagaaattattatgtaaaaaataaaatttaaatatattctgttatgtgtttttattattttttagggatattggcggctaaaatatctgaactttacgttttgtaacacttaaccacaaaaattaaaattttggtggcaaaacttactgaacttccattccgttttgctgtgtagccctccgtccaaaaatcacagttaagtgtcacagtggactgtccacgtgtacacacttgtacacgtagcaaatttttaatgatccac

SEQ ID NO: 295075 - DNA, 3791 bp, Cannabis indica
aatcttccaatatttcttcatcccaactcatttttcaacttgtaacagttaaaaacagaacaatgacgaagagctttatgagaagaagtcacatacggattgtcttttgaaggaagccacggttgattaagaactggaatggaagtgcccgatccgatcctccatcgagctcccatttttacaatttgtgcttaaccataaatatattcgtgtgttgtttccaaatagtgttatcgtgtcatgtcgtatattgttatagttattggtacttagcatcctctttagtaatatattaagaaaataacttttaaaaaataccgttaaccaatcgtaaagtgctacctataaaattacggtaccaattgtgtaatagctctgctcaaacccaaaaggcccaacttatcactattgtaattatatcaataccttggggacaatatggtcaacctcaatttcccaaggttttgtaatgacttactgaaaaaaaaaaaaaaaagaacacagtaaggtttttcttcggtttctcgtgtatccatggcgattcttggcaatgagaataaccactaagaccgtctaagacaaacataaaaacctaacagacacaattgttgtcgcaacgaaatgttgaagcttctctactcctcttcgtgccttcagaaccgactctacaccctacttcccacaagtattccaacaccctcacatcactcgacggcgccgtttcttcctgctttgacctctctcactggtttcgctgggcgaagtcgtaatcttcattctcgtgcatttttttgctcggacgcgaatgattgttcggagccagtggccgaggtaaagccttcctccgcaattttgtctaagaactccagacccgaaggttatctaacggttggttgaatttagagtttcggtttttggctcaatagccctgtatttggatttagtgaactctgtagctttatgtaatgtgattgcagttggttcagtcaagataatttgaatttacttggcttttcttatgcaggaacagggattggagacgaatgatgaaatgacactatctggttagttagtttagaatctcattgatagaatttactagaattttattaaatcatgctgggtttctttcctttctcaattcataagcagttgcaaatgagtttttcgtttttttacaaatctagatatgcaatttcagaattcagattttgtaacttcttgtttatttcttaataaaatcttgaaagttgttatctgatttcaacaatgtgatttcatgatcgtccatcttgaaggaagaaaaacacgatatgagataagataagatattggcaacgagtgatgttatacaataatctgaaaatatcattcagtgtcaatattatgttagtctccaatgtgttgataccaggttagatatggagtatttatagacattgttataactatttctttactttcctattatgctgcagcaaagcttaaggaaaggcttgaaccaaacaaggaaaatttcccacctcatgttttgcaagttacagaggaagatcctataaaaccacagttgttagaggcatcttcaagtgaattcagcatttcattagtttcagagctcatagcaaatcaacactggtctaagctcaaaacccatctcgaagacatgaatccgatcaagtttcttcatcatttgtttgaatcaaatgttgatccagagctcattatgaggtacttcaattggtcccagaaagagcttaatgtttcatatccacttgaattgacttgtagactcttacattcactagcacgtgcccaaaaatactcaaggattagagctttcttagataggtttgtaaagaaaaataaggaacactcaaacttcacaatatttcactcgttatcactgtatgacaattattttcatcacatgaatacaatcattgttgatattttggtatgggcatattctgtaaatttgaagacccaattggccattgaggcttttcagagagctggtgattatgggtacaagttatctttctttacatgtaatcccttgttgtctgctttggttaaagagaataaaattgggtatgtggagtacctgtacaaggagatgattaagagaaagattaaggttaatttgtatacttttaacattgtgatcaaagggttgtctaaagttgggaaactgaacaaggctagagatctcatgaatgatatgaaggcctttggaattttgccaaatgtgattacatataatacaataatgcatggatattgcaagatgggaaagtcaggaatgatgtataaagctgatgctgttttgaaggaaatgattgctaataaattagcccttgcccaattacctacaatatattgattgatggattctgtaaagatgagaatgtattggctgcattgaaagtgtttgaagaaatgaaaaggcagggtctgaaacctgatgatattacctacaatacactgatcaacggactatgtacagaagggaagcttgaagaggcttgtgctttgagggatgaaatggttggcttcagcttgaagccgaatgtcattacctacaatgcatttatcaatggattttgcaagaagaaaatggtgaaggaagctgttgagttatttgacgatatcataagtcagggtttatcgcccgatgttataactttcaacactttgattgatacatactgtagaaatgggatgatggacaaagcatttctcttactcagtacaatgttggaaaaaggaatattccctaatgtttcaacttataactccttaattgcttgtttttgtagacaagggaacatggaaaaagcaagacagcttttagatgatatgcagaagaaggatctaaaagctgattttataacatatagcatactaatggatgggctttgtaagaaaggggagacaggaaaggctagaagaatgatgaatgacatgttgaagtcaggtttgaatttaactcatttgatatacaatatactgatagagggctactgcagagaaggtaacatgggggctgcactgaatgtgagattgcagatggaaaaagacggtaagcgggcaaacatagtaacttataatttgttgattaagggatattgtgagaagggcatgcttgaagatgcaaataggttacttaatgagatgttggagaaaggtttagtcccaaaccgaattacttatgatgttgtaagagaggaaatgttggaaaagggtttctgtcctgatatagcaggacatctcagctatgtctcctctggcagctgaagattggaaaatggtagcttagtttcttcacctaaagtgaccatctttgtttgataatctctcagaaaatgaaagagatgcacaagattggcttatttcataattccatgtgatgaaatgggtaaaattcaagtaggaaggttagtcaacaatgacaaccatattgggaagataacagaagtggatgagcttcacccattaagcgacgaggaagaagcttggattgtatataattttgcaaagggtttggttagtaagccgccaaaggatagtaatgtattatttaatacataacaaatagtttgtattaacttgtattataatatttacaaaggattcgaactagaaacctgggatccaactcggactcggaccctgactcgggcttaggacccaaacctggatctagacctggacctggatccaattcagactcgggacctgacacgtagtcggtgttggggtcgagtgtattgaaaatatattataatttt

SEQ ID NO: 295076 - DNA, 5322 bp, Cannabis indica
ttgtgcacaacattccagttagaattaacacttaaaaggaaatgaccattcgatccgttaggaaagtcacgattccataattgcaaatcatgttcccagccatccacattattagattcccaaaatagaaattgtaagaatcatcttctctgtgaaactttaacgagtgaatcaaagaaactaataacatgaacagtcgttcatgacaactcaggattttaagtcgatctactattgatcattgttataatatgaattaggtctttatgataaacgacatgttaataaaaataactttattcatatcggtctttgtcatatataatatctattatataaaacacctttgatttgatgtcatactacatccataatctgaaccgaaattacttgcatcaaagaacgggcattcgtgaaccgtactagctagcaaccatcgattaaagattccataactttaatatgttgactgttttattcatagttaagcggtcttagttctctatacagctacaagccacaacctcatatatgaattaagaattttcaaatatttaattcaataataaatattaataatttaacattcatacatatattaaatgttcaactctttgtttaataatcaaaaaatatctttacaagtttttcagagcataaaccctatcaaaaaataacttccaactcattattcctatcataaacaagtacacaaatcaatacaaataatatgtataatgtgaatattaagcagaataatttcaataaaaaattgttcaaacaaaaatcttttctatgacccacttcaatggagacgaaaatgctgcaaagaataaacataaaacccaccatcgaacattcaacgtacttttgcagagaagacctattccaagttgaacaagcattatttgtaaagctccagtagttgtcaaagtaataaggaaccaatagttattactaatgacaacttttaagacttccatcttttctatgttcatgatgttgaataggttgaagatctgacagaaaacaaaagtgttaaagattattgtttgcaggacatctttatccatcatcataagcaagcccacccattgaaagatcaacaaaagtgaaatttggtagccgacctgaattactatgtttttccacatcaattttgttattagtgactgatttcgatgaaatggcttgcaattagcaacaattaagtactcttgttggtctttgaactccatcatcatcattaaaccgcccaaaagagacataattaagttcacccaaatcatatcaagggatgtcaatggagaatctcctaaaactattgttgaaatcaaggttattgttaacccagataccccggtagtgagctgaagttggaagaacttttgaatgttatggtaaatgcatttactattctttcgtatctcatgtgttgcagatagtttctcaaatgagatgtcataaaaaggccttgacatctctgtgcatctattttctaagatgatcccaacatctgcctttttcatagccggaatatcctttgctgtcaaacccccacaaaatgcaactacatgaccattcttttgtgacttctcaactatataaagcttttcctttgaatgaaaatctcccattacaatggcctctatggtatgtttttccttatctggctcatccatttcttgaaaactttcgccttcaacttcaatgtaatcattttgtccaccgaaaatatctaggttacaagcaatggctctcactttagatagctcatcttctgacactagtttcacaattaacccattatctgttctaagagtttccactagtaacttgatatcttccttgcaagagtatttcaaacccaacattgccaataaggttaagtcttcttttttaagattttcatcttcagtctctccaaaagcaaatgcaataggtctaagtccattctcctccatatttttcactacttccccaaaattatctttgtgagattcctccattgaacacactttcccatcactatcataaaactgtgtacacatgcccaagatcgttgaagcaggcccgttccaatgaagctgcataatctgatcttcttgattgcttgttctactcctcattagaatcccacaacttttcttgctagagatcgatcttctgtacttcacaacttcaaattccttaccaaaaaattcctcatttcctccccatcttgacttcaccccagaaatgagcaagttatcatcgaaactaagtgaaatcttgggcaagttaaccaaaacatttatcccctggtataacttgccatgattagctgcgatttggcttgtttcaaaagctggttctttgctaatatccttgccaccaacccaacattccttaacatccatttgcttacacatcaagtcacctgttgcatcaatgtataagactgtgacgagtccaatggttccacaaacggagagattctgaggattcaccttatttgaatgaaacttctgctttctccattggtgtaaacaaatgccaattactaaaggcattccatgttgaatccctataacaaacaccacaagagtattcactaagatggacagccttccttgtggttttgaaacaagcctctccaataatttaaacatataagctatgctgagatgccctttcaactccgacaattcattgtaattactgtcatgtttcttcaagagcagtcgaattaacgccacaaacgcaatcaatacagacatgaaaagaccaaacttttctatgtaaccgtagggtacactcaacaaatcttcaaaaagtgtcgtttgtccatgaccaatataattattatcacagctcaacaaggttggtatgatctcaccataaatagttttatcaccaatggacgtaacaatcatggtgccattgccttccacaactcttgaaccagctaatagaaaaggatttttgtccatatcaacatcaaacttcttgaacacatgaaccaacttcaacttttcaccagatatgaacacaccatctccaggaacttgatcaccttcagtcaagtagactttgtctcgaaccttgacatcagaaacgaccatccttgatttcattccattaggcctctcaactgtcaccataagcatgctcttatctttgatcatcttttttgtcaattctctttggccaatgaagttcctaactgaagaggaagcaataataacaaaaatggcaacaaggacggccgtaccatcatgccaaccactttttggtccttgctgcatgctttcaatggcgaatagaaatccagctgaaagaaccaaaaggaaaattgtacaatcattgcatgattgcaataagtaatacaaaaatcccttttctttactactaataattggcgccttccatttttcctcatcggtacttttttcctgttcataaacacagattattataatgatataagtggacatattaacttttccttataccaagtaaaagtctagctagctatctacctcgtgagtgtcttgagatgtggccactagtgacaaaacccaatctaggccacctcttctttttaaaccaactaagttctgctccttcactatctgaacaagactctcccagtcccagtaccaatcaggcttcatgatcatgtcaatcacatgatggtcgtctctttgaatatcagaacagatctggatctgatcatcatcatcatcatcaggtaattgctccgaggctaccaccgccgcatcaccatgagaaatgaaaacgctgatacttagaaccacataacgaaaccacacgctatttttctcgccaaacatggcggtagtagtagtagtagctgcagcagcatcgaccactaagccggcggcggtgagagtatcagtgccatcggcctcattgtcgccactagtttgtgggaacatcttgaccacaaagaaaaacaaacaaaaacagtaacttgttgacttgacttaaacaatactaacaggtaaggaaaaaaaatcaaaacagtaactagaaacttaattttggtaagtaataagtagaagaagaagaagaaaaaaaaaatgggcgctctactctttaataagttcaacttgtttggtgctagagatggagaaaaataggagtttatataagttctattacgcgtttttgtggaaataataatgaaatgtaaaagaaggaggagttgagtcgtagaatacgaaatgtgtaataagaacccaaaaagtagttaagtccttaattaattatattctgatgatcaaactttatctattgaaagataaagcacaaaataataatcatccatcagtaagaagacaaattacactaggtagctagctagcatgtaaagtggagtccgtagttttttttctctttttttaatgatataaatgaaaaggcttggaaagtaacctaattatttggtgggtgtatctccgatttgctcctttgtttttttgagtaattattaggtttttttatttttttgaattaatttttaagaagttaaattcaattaatatatttttgtaaaaaatacaattatataggtcaactggtcaatgcaaaacgcggtaatgtatagttcaataatattgtgaaaagagcataccaaatcttgacaaactttgcaccacaaactttatcgatctatttcattttattagatttcacttctatttattatatacaaaaattaatcccaattgtattagttaattatggtagcgtttgttaacaaaataggataaaaatttattatgtaactatttttgtttttatttttaaaaataaaaaaatatataaaactgtgtctgtaaattttattttattttttattttaattagagataatactattttggagtctgtattttgtaaaagttaccaattggaccttctacttttttaaataataaaatggaccatgtatttttaaaatagtacaaataggactatgagctcaattttcgacaatttgttttcataatacctctagatcgggttataattaaattttattttgacaaaaaatcagtttatgatcctattaccattttgaaaaatacagggtccattttgtcatttaatgaaatagagggaccaatcgacagtttttgcaaaatgcggagttcaaaatagtatttacccatttttatttaagtgaggaaaaagaaattgagatgagagaaagtgagtgaggtccgaggccgggagcggggtccacgttcggggtccaacatgggttggatctgagtccaggtccaagttcggggtccgggtctgggtctaagt

SEQ ID NO: 295077 - DNA, 2476 bp, Cannabis indica
acagaattgtatcatatgtattttttgtaataatcattgattttggtatagttttaatgaattatgatatattttttttaataaattctgtaatgaattatgatatttaaatttagaaatatattaatttcatttattttaattaatattatattttttttataaaaattaatgctattatatatatttaatatttaaaattatatattaaaaaaattaaattcaattcaaataatacttttgccaacagttataaacagtcatttaatgtgactttttccgacagttgtaaaccgtaatttaaattgacttttcccaatagttataaaccgtcttttaaagttctgtatttttattaaagttataaaccgttgagaaaagccaattttgtagtggtgcaaattgattctctctcttggcatgcacttaggttttctatataaggtttgtgagtgttgctgctataggtctgctttttctccatggcttgccaaacctaatgtgggtctagtcgtgtccatggttcgggggtcaccgtttgaagattggttttgggagaggatcgaggtcattcatctttggttttggggggttcaatttcgtaattggggggatcaggatcgaccggtcctagtgtgggggtggttccatggggagggtgttgatgtgagctgaagggatctgtcgacgtgggtgtgttttcttttgcctggaaattggtttggcttgtggctggtgtggggtttgttgtcattttcgtaagattggtttggtagtgacaagggtaggtgaaggttagatatccgtcgagattcaaggtggagatttaggttgagagtttcggtctcctttgagcccgtttatggtcgatttctgatggctcgtggaggtgcccctgggtctgtggtgttagtggtgatctgatcctgatgatttaccttttaataatgaaattaccattaaaaagatgtgttatctattaatatctattttagatttcattttttaggctctaatctaggcatgtcaaaaagatctatttagttggatcgggttagagtctgatctgacggatcatttttgatccgaaatatccagatacttattggatctcggatcaaatctgttccacacgtctaattttttcggatcgaatctgatctgattaggattcaatatatataaaaacttaattcaagactcaaacccaaaaccgagattcaagactcgaacccggggcgggacctagacttgaacccgaggatgaacctagacctgcacccggggctagacctagacacagaccaagacctgggacccaaactcgagacttggacctaaacctgacactcggggcctagaccagaatctaggacccagacttgaacccaggaccaagacctagacctggacccaagacccaaacctggacctagactcgaacccggacctagaccaggactgggaccttgaacctcagaccccacacccgggacctaaagctgagactgagacccagacttagacttaggactcaggacccaaacccagatacaaacacaaatcgggaccaaaattaggatctaagaccatacccgagatcaagacctgagcctatgactcggacccagactcaggacatagacctgagactcgggacccagacccaaacttgggctcaaacctagacccgaagtcgagacccatgaccaagacccatacccggagtcgagacctagggccgggacacagacctagacttaggatcaagacccagaccgagacccatacccaaacctagacctagactcgagacctggacccaaacctggaccaaaacctgcacctggacctaggactgaggatacgagacctggacacaaacttagatccagaccgagactcagaccaaacctaggacccaaaccgaacctaagacccgaacctagacttaggacctgggacttggacccagacttgaactcaagacctgggcttagactcggcccaggctcggaccagactaaggtccagattcgaacctatgacctaggggtgtacgtcggtcggtttggtctggttatggcatatttttatcaacccaatataatatcgagttgcatatatttagttgcgacccacccaattaaaaattagaaaaggttcaacccgcccaatgacaaaatcgatctttactttttataattattgttattgttagtttctagtattaaataattaaatttttaaaaaaatagaatatattatttatattttaagctaaaaaataatatagtgttaattaatcttaagaactttaatattagataaatataattgagttaacataaaataattgaataaaataataaaaaagtaataatatggtgtagattttaaatttttactttaatatctaaatacaataaaaattattaactataaagtctaaaaattaagttaaacactaaaatgt

SEQ ID NO: 295078 - DNA, 7526 bp, Cannabis indica
gagaattttattctttactatcacttggctgaagaaaacagacaggctatatagagttcacagaggtttgaaaaatctatagattagcacaaacaatccctaaagttagcaaaaaacaaaaaatccctaaaatcaggaaatataaacagaaattgaatcttgtgagatattgtatacaattaaaccaaatctcttattgaaataagataatacctatcatatcttgtatacaatatctcacgagattcaatatctcttattgtatacaaggcttttccacacacaattaaaccaaaaaatccctaaaattaggaaatataaacaatatttactctctagctgtctgtttgaaaattacaaattattgaaaatttcacaaccttggtcattatagtgccatatcatatcttctttatcttttagactgttcacaagtcattgctgccttatgttgcactttgtgcctgaaaaatgcagaaaagttggactaattcatgactagggttttaatatctaggcttttcattgatgtatattggaaatggggttatagtaggaagggtagttggttgggttgtcgttggatctgtgattatataggtacttctatgaagactttgtgtaggtgtgttgtagtggtaattctttaggacatctggttggagaaattctatatttcaatattttcaagtgtctaaattttattgtaatcttgttttatgctatatgatgaatttggagtacatgtattgcaaagatacaataactttttgttatttctcttccacttcccccttttcatttttcatattgcgttttgttctcactataacgaggtaatatatgttattatatgtattctattaatggaacttgtgatacatgtagggagactctgctatactatgtaactagtggggatgacgtacaagttttgggttctttgtgcgtgttggctacgttgttgcagacaaaaggtataattgtagtatgggacatcttataattatggttattagggatttttgatcatcaagttatttcaaatcttatctttcatgattgttatttcaaaacttgattattgcatgtcttatacatattacaattagttatgcgctaatcatttctgtaaacattgcttcatgtaattattctctcattattcttgattaatgcagaactagatgaatcaatgctagatgctcttggaattcttccacaacgcaaacaacataaacgactcctgttggtatgtcatgacttatgaaacatcctttactatgtcttaatgattaagattaacaaagaaaaagttggttgggacttatatgctataaattcgtagcacaatctttgccacgacaattattttgcgttagaaggtagaaatagggtagggcataaagaaaagagagggggttgggggttggtgggggaatctgctattgaaataaggaaaatcctgaacatccttttcatagaagacaccagtttccccatacttgatcctctttaaggcaacttctcattcccttttacattattagatttttctatatatagagaaacttgttatgtcttttcgttttcattgtcttaatggctattgaagtgttttgaattttgagtgaaccacataatcccactgattatggtggtgaaaaccttcataaccccactgattatggtggtgaaaaacttcataacccaccgattatggtggtgaaaaactccataaccccactagttatggacaaagtaggaatagaattggagcttcagaactagacataagtatgttatattaactttgtccaagtatggtggcacaattagaattgctaagaggatgaggtttttactttgtttccatctttaggtagaaacagtttcaattcttccagattgtgcgatatggcttaatatatttaagtcaatgagtgacctgggtattacagtgcttttaaagagaaattattattttttttggaaaaagagaaagggaccacttgtcttagactggccctacaaaagtttaatcacaatcaaaacattgcctacaacaaccaacaaaaaacaaacagtatatttgataccactacatgatagatttacattctctacttaaatctaagaatgacaaaccatcaaaatgtttggttttaaagacccaaatagctgtccagaacttaactttttaccacatatccgacttagaactctcagccccttcaaagattctagcgttcctttccagccacacaacccaaattgttgccaatatcgctgttctccataattttgttcttcttctgctgcccattaatttgctaactatcgtttgtggtacaaatcttggcataacctagatcagctcaaattcctccagcaaattaatccataatcaatgaataaagctgcactagaagaataaatgtcccaaatcttccccacttcctttgcagcatacacatcagccaagagaaatgtagagataagatctcctttttgtaacttatcatggacgttcactttgcctagcgacacaagccagcctaatactttaactttcgatggtacgcagcttttccataaaatctttgtccaaaacaaacccctatgagttgggtttgaggtaaatccgctaaaagccgatttacatgaaaacacccatgatggatccggcttccaaattcgactatcatccataatattgagcgcttttacatgctccagtttctgcagtagctaaataaggcttggaacttctcgctctaatagattccttctaaatttgaaattccaactctctacccacccacccacccaccaaccccttgtcaactgctaccttctttatactctcattcttcactttagaaatcactgctagatcaggaaagtcacttccaaattttgaagagaaattatgataagggttttatttggaaaggggagtcgggaagacaataatgaagatgttgacgtggaatgtaaggggcaatgggtttgtggaaaagagggccattaaagcaacaatatgcaagattatttcagatttgattgtccttcaagaagtaaaaatgagtgtagataagagatttgtaggtagtatttggagatcttgttttagagcagggactttgcatccatcttttgggagatcgagaggatgtattgtaaggagaagaattacaatttgtgattctctcattggaaaattttctatgttagtactcatccaagctgacgggaaggatttgtggtggtttttgagggtgcatgacccaagagaaaacagtggatggttagatttttgggacgagttttctggtctgaggtccttttgtggtgagaagtggtgtttggggagggattttaatgtggttagaagggtgcaagagaaacttgaactccaataaaatattctgctaattctttgatctaatatcaatacaaggaagtttatttatttttattttttcttaaaaagaattgtgatgttaaaccaaatatcaaagtgttgttttagtcatagacctttttagttgttatttcagtgatgaagttgattgtatctaatatctataggatggacatatattgtgttattttcatattttcaggaagctttggtgggtgaaggccctagtgaagagcagctgttctctttggaaagtaattcaatgagagaaaacattggtagtgagctagatcggtatctactaaagctcaaggtatagcttattttctggcctcttttggacaagttcttacaaaaccggaaatgtgatctttgtttttctttaatttttagtttataatattgcttgctatatgagaaggttattttgaagaccgtagacgttgtagtgaagaataggtttaatcaagagtttgtgaagatttttttttagtagtcattgatgtgctgttgagcactgtcttattatacgttctcctgctcttttctatgtctaacaggagaagtatggagtcgagtgttctttccgggatgttgcaagtcctcatgtacacaggtttcaggtattgtatatgtttaatgaggagttctgctcaatctgattgcttatctcacactttatattctaactttcccttttattattaaatctttccttttattattaaatcttaagaaggattgaaacccaaaatgtcaaagacagagagtccaggaaaacaattaaacggaaataagtaagcagcactatattaacacccaaaggtttataagtatcccattttattatttttattttgtaaaaatatagggtagttggcagtgaaacctcccttttgttttaatttctatatatttaaccccatgatcttttttctttggcttcacttttatttgtaaatttgaaccgctagttaaattctactgttaactgccaattgagattgccactgggtatacctgtaaaaacatgccacgtaaatacaggtgtgcacaatgacaatttagtaggtatttaacattgggatatacctggcgcctcaaatttacaaagagaaataaagttaaggggtattgccaccaagaaaaaaaatcagggtgttaagtgtataaaattaaaacataaaggggtttcgctccaaattaccctaaaatatataattttaattatactttgttctattttttatatgttctcaccttctaaacagtacatatataaaataaaaaatattttaattactaaaatcagggtgttatatgttctcacccaattatttaaaagtgaacagtagcttatgctctctcctctctcctcattttgagaagtgtgcccatgcatacgaggggtttccttggcccttctggccatggaaggcaccaaaaccccactggttttgggaagaaacaaggtcattatcccactggttttggctggaaaaatccttctgatccttctgtggatcagaatttccaaaaatattggagtttcagaactaaacacaaagcgtttatgttaacattaacgcccgatggagggtcagtccgcatctgcgaacgaacaaggctggctggatatgaagttgctgtaactattgatgcagtagattggatcatagacactctgcaggagctttttcaaaaaacagggactcaaagaattactctcaaacgcttttttaggaacaacactatttgttgtttcctggaatgctttgcaaatactaagggatcttttttgaaaatctcagtgttaagaaacaacaagttaaagatgataattgtaccagaagaagaatatgagaagggttggtcagaattaaaagaatgtctcagcgggattgtaaagagaaaggtgactagatttattgagcgaagcagccaaacgaaagttcatcaaagggaagggggggactcgactcatcgttcctgggccaatgtcgtgaagcaaggggtaagaccagtgatgaaagctcaatacaacagagggaaatctcaagctgtagaagtgaaacgggacagaggaagaattgaatggaaagagctatatccagaaattaatctcggattcaaaccaaagaatctctatccattgaagagatttacacaacctaaattctatgaatatatgagatctaaggcagtgcctagagactggagcctggcaattatcctcacgaggaataacactcacgcggattgggttactatattttacaatctctctagagaattagagaggaagctggtggttagccaaatgtttgatgatagatgtatcatatggggaaaggatgagaaggacaaaatggaacttttgaagattcaaagcatgaaagtccctggggctcaatcattagtcaccttttcagcttggagcttggaaaaccagatggataatgtgaaggtagaatgtaggggatcctggataggggtccatggcttgcctttgaacctttggaacatgaaaaccttcaggaaaattgggaaagctgcggaggcttattggatgtggacaaggttactgccgaggctagtatgttggctcacttgagattacaattgcagggagatgaattcgggttcattcctgaaaccgtaacaatgtgtcacgataacatgagttttgaactgagattttttaagcttaacgatttaagctatagattccatggcagttttaatacttgctggtatcaagactttgaccacaagaaggtgttcggcgacggggtagcgaatgaagggttagataaagaaggtgcagatcagaaagaggttgaggaaggacatttttgggagtcgactacggtgggagtctcagcctcggcgccggagaagatggacatctctggaactcaggagacggcagcggaagtcgtacagtctcgggctctgcgtccaaaaaaagctttattgtccttggttgatggtgaggcggtcgagaatgagtctcgtcaattcaatatcaattttcgagaaggtatggctgtaacttctcgcgtacgtgagcagggaaaagtggtgagtatccatactgtctttaaccgcctcttgagaagtttgagggtgccacgtgtttgcagaaatcccaggttaaatattttcctcaattatgataatagctgtcaaataggggataagtgtagattaaaggtgggcttgggtgagtcgggccaaattgctagggccccagaaaaggtgggcctggactttgttgggcccgttagaggagcatcgggctgggaggcttttcctagttttgggccggtcaaacacatccaattaaaagatttttggtattaccgtaggggcctttttaagattaccttggaccaatttagtatccaagattcttttattaaaaggccaaagggattggtgatgagtgattctatggggcctagaagggagctgagtatggtggcgaagaagatggatccagaacaaataatacaagagttccttcatagtaggcttcgatctattagtcctaaaggccgagagaagttcaggaaggcaatcattcaattttgggaagactttgctgtgcttaaaagaaaagtaacagagtcggtactccattataagggggagatggaattagagaaggaaagtagacctatgtttgcccgtgtctattgcagaaaaaggaaatcatttggtcatgagcgtatgaaccatttcaatgaagaaaattattctcctgagctcgaggaggatgatgaggatccgaaggagttcgagtttcgagatttgagctcggatgatgaggagtctgaaggggaaggagaggattcaataccagaagaaggagaagaaactgatgatattatatgcaacattaatgagttgtggagggtggaggctgaagttttttcgaggcagggactagaggagatgagactagttgatgggagtgatgataagctagatgaactagaaaaggaagaagcgagggaagcagatgagatcatgattgaggcaacttcttggtcaaatattgttgaatccatggctgagatgggtatgaaattac

SEQ ID NO: 295079 - DNA, 2576 bp, Cannabis indica
aaaagtattttttggactcataaaaaaggtttcttcccctcatcatcccttctacttttatacggcttaggctcacggttacaatgtttgatacgagtagagaaactaccgaagctatcttttccccactactgtagcacactgccacattcttcaattttctcctcaataccatgccccaacattctatcccaacagtcatgaataacctcctcacaaccttgatgatttgttcaccaattttcaaacttaaagtgatggtcttgaacaatagaagtacccaattgaacctccaatagcagaggacaatgatccgaaggagagacttctaaattaataagcttgttcgaagggaagatggtcagcaaatcatgactcaccaaagctctatccaatctagcttcaatccaattaggtgagtctcttctcttcttctaagtgaaagggtgcccgtgcaactccatatctcccagcccacaaaactaaaccacctcctgaaaaccttcgatcagccatgacgggtacggttgtccccctatcttttccgattgattaagaacattgtcaaagtctcccatgagacaccaaggcagagtttatcgactaagaagtgttcttagaagatccgaagtcttctttctaaggcttctattaggctctccaaacacccatgtgagtctaaactctctttgcccttctaacttaaccttgcaattaatatgattctcagaaaaaggaatccacagtaacctcttcttgatttttccataacatagcgaaacctccacttcttccttcggcttccactacaacgcacccatcaaagcccaaagctctactcaagggatccactttcagctttttacacaatgtttcgcataaaaaagaaatattggcccgtttattagtaaccaaattgtttaggaactgaacattccgtgtcagcccaagcccagagcagttccaacacaagagtttcataatgattggcgagccccattgccaaggcctgccaaagatgtgttttttgaaatattgctcattaatttttgcagataaacaattaaaatcaatgaacgaagtcttacaagcagtatggtctcaactagtatggggaccatgaacttatgcaaccgagcttccaataagcagatctagaatttaccaagtaaattccctaacttattaattccttattacatccaccatagaacttccaattacactcttagtcatatagaatgctctatatgctccacgatatacataaactataaagatttaaccatcgttctaatcccaataatcaaagatcctctatagattatttacaccaagcagggataaatataccgtttcaccccctcaatatattttatccttaaaatacttagcttcctataaatgatatttcagtgagctaatataatcactgaaataagagcttttccatttatctctattaagccaagctcgaaggaaatcatcgtttcacttctatgtccaaatagaagctattatctatgtttagcgctcctactaaagtgaactatcatgttcccaaaatttacgtatcaccctgaacaaaaagtaggcttaactaacaaagtatagaacacaaataacactcctgagattgaccctaagcatatcaggattaagatctcttgatgtaagataaactggtgatattgacttagaaagagaaaacagtaagattatatatctttaccaagatcaatatcggtcccagtccaatgtatactccatacatctgaaactagcatactttgccaaagttctggaaagaacataacacttatccaaggtttaagtatactttatcgctgattatcacataagtgtaaatccagtgcactgatgaatcagggacattatcttttgaaacatataatcacaattaaattccactatgttgacatcagtgtaattgttaataactgtatgttctggacttaacagattttttacacattaaacgataaacatgaaaactacatgcaaatattaatgacttctaatctttcattgagaacaaatcagattagattgaaatgggttctatttagggcataaaatcccacagtctacccttggaggcaatggcctggaacttggatccaacggggtactcgtatcagtttcgccagctgtagttgccaggcttgtggtgacaggattcaccacatctacagtactcatcaggatcccagttataattagaatctgagtgcctagatctgcaatctaggggtctttagggagacccgaagatgcagatgatgcaacaatagttattcttctgttcaccatggcatttgatcagattactatatccacgctctcataaaaagttgacctcaaaaagtgatcaactgacagcgaggttgtatggatcagatgctagccatgtgtttgcacaattaagaatgaaaagtaataaacaacaaatttgatatagatgtttggccctcttatgacagaaggtaatcacctactccccatttagttttatcaataccgagggtaatactatctagatgaatatagatggg

SEQ ID NO: 295080 - DNA, 4307 bp, Cannabis indica
ttttttgttttgtttttgcttatgttaaaattggaataaataaatgagttccatcttaaattaattgatcatggaaggagtagattattcctcttatatattctattattttttttcacattaggaatgcagactctctaagagtacatcaccgtatgaaacacaatcaacatgctagtgaaaaaataacatctcataccaggaattaaaataatcttcatcgacaaaaacaaaagtggtgttcctactaattaaatcatatattttctaactaagccatcaaaaaactttaaatctgaacgatttcatattattattattattattattattatttgtgtgtgttgaaaaacactggttttctttaggtgaaagattaaacatctttttccattttgctcaagagtcacatataccatgttttgaacaatgacacgtttcattttatttattctttttaaattcatttccaccaataaaatttagttttgtaacggtcaacggaagaaagaccacagttttacaaaattacaaaccaacgaagattatagtaatagtgacactactttcttttcaattagggcttcatcatttttctcccttgaacaatgcttcaatcccagtacgaaatcattgttttgatttgcaccttggtaagctttatcagaactggaattggcggaagaacaagtacttatattcgctccgaatggccatcttccgatatgccgcttcacaacgatgtttttgctgtcccaaaaggccataatgctcctcaacaagtaccaatcttgaaccctataacaattcttctctctatttcggaattgaatttgctatttgaagtttaccaacatgattttttttcctttttttattggtgttaggttcatattactcaaggggattatgatggaaaggctgtaataatctcatgggttactccaaatggagtaggttcaagccaagtactttatggtacattggaccagaaaaatggttttagtgctcagggaacggtcaccaactataccttttataactattcttctggattcattcaccattgcctaatcgatggccttgaggtaagatgaccgtttattgctatgtatttactgggcattcactatttcttggagtttagatatctaggatgattttcttgctttctttttctttagtatggcaccaaatactattacaagatcggagaggataaggctgctcgtgaattttggtttgtaactcctccaaagattgatcctgatgctcccttcacttttgggattattggtgaggatcttaatctagtttctttcaacagatgaactgataggaagtttagttagttagggaaaatgtgttctcaaaagtttctgatttcaattgtttttgggaaattttttaggtgatttgggtcaaacatataattctttttccactctcgagcattacatgcagagtgggggacaaactgtcttatttcttggtgatctctcttatgctgatagatatgaacataacaacattggtattagatgggattcgtggggacgctttattgagaggagtgctgcatatcagccatggatttggtcagcagggaatcatgaaatagagtacatgccacacattgtaagtaaagctttctatgacttttgcatcttaccaatcatgtgatgcaatcttgttctaatgcatatttgaggttaagaatttcaaccctgcgtattatgcagttccatggtttttgttctagtacattatttgcaggcctctggtaatggatgatagttttgacacaagttttctttcataatttgtgtattgtggatgcttttaattattaatgtaaactaacctttataacttaaatttctgcttaaatattattttgatgtaattatttcattttttgtttagttactcactagtatcttgaactcagggggaagattttccatttaaatcatatttacacagatttcatacaccttatatggcctctaatagtagcaatcctctctggtacgctgtgcgacgcgcatctgctcacatcattgtcctatctagttattcttcatttggtaattttttatatactacatctggtttaagcatttgtttaattccaatgtttacatgtcattgttccataattctctccttttgttcccctgtagcacccttcttgtgtattttactcttaatttctgcaaattaattgttttcagtcaaattattctagatttgtactcctaaatttgctgtaaaaatatcttttcatcagtgaagtactcacctcaatggatgtggctgcgagaagagctaaagagggtgaatagaagcgaaacaccttggcttattgttgtcatgcatgtgcccctctacaatagtgaccaggtccattatatggaaggtgaaggcatgcgggctgtctttgaaagctggtttgtccagtcaaaagcggatttcatctttgctggccatgttcatgcatatgaaagatcggtatggagattagccttcttgtgtctcttttttttccttttttatctctcttcaatattaaattattcatctgtccacaaaggtggtcactagtcagagtttaattgtttggacatgctttgtatttcatttttacacctgaacaattcttcataatcctgtcatttatgtcccggttccaaaattgtacttgcttatgtactagatactttccgtagtgtcttgcagagtcaacaatgttattctaaccttatcacatgatcacatacatcctgtcaaatcgattgaccttttacttatttcctgttcttgtgtatttcccttaaattttgcttcagtagctttatcttatagtgaaatactgttaatttgtagtatcgaatctcaaacatttattacaatgtatcaactggtgatcgttaccctgtaccggacaagtcagctccagtgtatttaactgttggtgatggtggaaatcaggagggtcttgctggaaggtagtgctaaatgctaattgtactgcataaaatgttttcaagcagttttatttctatatgaatggaaatgatatgtctgccaacgtaatctttctattctgttacttgtaattcatcacaggttttgggatccacaaccagaatattctgcatttcgtgaagccagttatggtcattctacattagagattaagaatagaacccatgcattctaccattggaaccgaaatgatgatgggaaaaaggtaccaactgatgatgtgatattccacaatcagtactggtaagtgtgctaactaaatcatgtttcttctttcatacttgcacaatgtaaaactactttgatccctggtttcattgatatgaaccgattcccccttagcagtgaattcaataaaccagaataataggaaagcaaaggaaataataagtgaacaactcagtagatgaaaataggtgaaacttgtatactatatctgctatggcagctagagaattacagtaaaaataggaccctaggcattcgagaggctaggctctccatgatgcaatttgagaatactcaattcattgcataaccctccaatagtccaattcttcttagtatcctatatatagtactccctcccgaacactacccttaatacaaaagcccatatatctttttatttgctatgctctctcatcctattaatcatgggttctaacattcatcactcaaatcgtttttaacctaccttctgattcttgagtattggggagtactgaaatgtatttctacaatgactaataagaattactgtttcatgggtcataaaacgttaaaattttggcttttaaatcagggcaagcaacttgaggaggaggcgactgaagaagaatcattccaaggttgaaggggagtgaattgcatgtgtggatgatattacttgcacatttatcagatcagggcatatgctttctagctattcttttaaaatcttgaggattttttttagttgaattgcaattttggcatgaatcaaccatgaatgtggtgtggacgtaaaaagagatcaacaatttaagttgatggataattttccaatgcctggctccgtatagttgtacagcttgtgaaaggtgtccctgtttgttagtattgtacctattgattgtactgtactaaattgtaaatctgaaataattgaaaagcaaaaaatgtatggtagttgccattttacttgaattttgaactcttgttggatctctataatgaaagtttttggaatagtttaggtgtcgtttggtaacact

SEQ ID NO: 295081 - DNA, 4070 bp, Cannabis indica
ttttattcgtttttccagtttttataaaaattttttatttctccatatatttctaaaccacttacaaaaaagccatatttataaaataaaccctatttattattatattatttttaatattttattattaaattttaattaatataatattttccattaatttatgttattattattaaattttaaatttacctttatattattattatgattttatatttttttaataaattattaaatgagtattaaataatatattaaattttgtatgaaaatttataattataaaatataatagtaaaaattaatgtaagaaagtcacaattaaaatatagttaaatttttacatgtagcaaatgatattagaagattaaaatctataaaaatagatgtcaatttgtgggccacacgtaatcccatatcagaaaatttatgtggttacatggtggataaaccttttaaatgaatctaaactttggatgttgaaactattgtttacgtaaaagagccaaccaaattaaaagaagggaaaggaaaaatatctggtgctcaattttttcatagtagatagactatgccacgtggcttcctatcattcgccagatggaaatacaattcccatccagatagagataatatgcgatgtgattcagttggaagcggccaaagccaacatggagtatcaagtatggtaatgcaaagaaaactgaatttggagggaaagaggaagacgaagaagagtcatccctcctcaaacttagaataagatacccttcttccttttccaactaatggcttctactctcacttcccattcctttcttttaaccactgcacccaactcaaggggactgaccctcaagacaaggaggctcaaagtttttgccaaagggtcaggacccttctctacttttaggctcggtaaaaatgcagccgctgaagctgattcttcgtccgaggaaggtgaaaccaattctagtcccttccgttttgactttgggaaaatgcctgatgtcaagtctttgatccctattgtgagtaacccttcttcggggttgtcgtttgggaaccccaggcgtaaggatgctgggactgtgttcgttgctggcgccaccgggcaggctggtattcgaatagcgcagacccttttgcgtgaagggtttactgtaagggctggcgtttcagaaattggcgcagctcaagggttggctcgtcttgcttcgaagtacaaggtcattactctcactcaatgattttggtataatcatattttaaaatatagatagtgctgtttatagttgttctggccagtaacattcaagtcttaatctactgaatacgtaatcaaacataatggttatacagttgtagattagattagaataggattagattaaaaaatcaaacaattaatttttatttccttcattatgtcttcgaatttcttttcattatgaatattatacatgaacgaaaacatgtaaattgtgatgtcattgaattatatgaagaatttaaatttaggaatacataattcttttgttactgatgattaagtataggattagtcgatgttttgttctgattttatcatttatttgcgcttatgattgtagcaatgtttattagaagagtaaatcaattactagttgctggctgtttaacatatttatgttgggtaacaatggaatcaacaatgcagatcatatcaaatgaagaatcaaaacgactgaatgccgtggaatccacattccaagatgctgaatccattgccaaagcaattggaaacgccagcaaagttgtggtaacaataggtcctacagagaatggccccagtcaagaagtcacggcaatggacgctttaaaagttgtccaagctgccgagctggctggtgttggccacgtggcaatagtctatgacgggaacacaagtcctggatcaacatacaacgtactggatggcatcacttcgttctttaacaacatattctctcaatcacagccattgagtgtacaagaatttctgcagaaaatcattgaaacggacatcagctatacatttataaagacgagtttgacagaggacttttcaccagagagtgcctataatgttgttgtgtcagctgaaggaagcgttggtgcaaacgactacaaagtaatgtaatgtatgcagtaatgtgtagactaaaaaaatcatcattcaaaagatttggttgtaaatatttgttttttggggtggacatcaaattttgactatctatacaatcaggtagccaagtctcaaattgcatcactggtggccaatgtattctcaaacacggctgtagcagagaataaggtagctacttttctttctacccaagttttgttcatattaatgaatgtgtgctataattgtctattgatttctttcaactgttataggttgtagaagtatttactgatccatcagcaccctccacacctataggtgatcttttcaggtaatctttctcaccttgtctaactaaaaatttcatattacttagatactaattgagcagatgttatttcgttctgttttggcatttagttccattccagaggatggaagaagaaaaatctatgcagaaagcatggcaaaggcaaaagcagaagaagaggccataatagcagctgagaaagctcgggaagctgctgtggccgcgaagcaacttgaggatgaggtaaaaaagctgtcgaagaaaggacaggctgcgagtttaggtgaagatggtgaagagaaaacagaagctgctggaacttcattggataacctatttagcaaagcaaaagatgtgagttctggattatcctgggacaaactcagctcacagcttgcagcaaccgttcaaaaggcacaagagacaccaaaagtgcagattgcaacagtgaggggacaggccaaggctcggaatctgccatcccttaaagcccttgtcaaacagaacagtcctgcttcaaaaccaaaggtggagccaaagtcaagtcccaaagggaagcagaaagaaacaaagtcaccggaagtgaggaaggtatttggtggcctgtttaagcaagaaaccatatacgttgatgatgactgaagagccttagttactactgatatatatattattggtataattttaagtagttcggcgaagatgggttgtattttgtataattgtactagtccaagtcttttttttctttcttacttttgtgaaaaaaataagcaccaattgatttctatattataattgtaacttgatgttgaagtcttaacaattttattagtatcatgtttggatttatttattgcaatatttaaaagagaaactataataaataacctaaaattattaaattataagattatggtagtaaatgttttcattttaaaatttgtagtaaaatgactttttagattatttattatttatattctcttttgctacataaaataataggtaaattgcggtataaatatctaatgttttagattttatacagttaaatacttaatgtttatttttggaggtaaaaatacctaatgttacaattctcttacaccgttactaccaattccattaacttatcataaatatagacacgtggagggttcaaatgcattatatttatttattttattttaaaatttaatattcttgatatcaaaaactaaatactacttattaaaaaaaagatgcaatactaaattactatagctgagtgaaccagtgtagtatatggaacatgattatcgaattgaagtgccaatatcatgtgaaaattgttatgagaactgtttttttttggaacagtagcatttaatttctaatattaagaatattaagttttataataaaataaaataaatgtaatgcaactgaaccctttacgggtctatatttatgagttaacggaaatagcagtaacactgtaagagaattgtaacattaggtatttttgcatccgaaaataaacattaggtatttaagtgtataaaatttgaaacattaggtatttatgctgcaatttaccctaaaaaaattaataatttatttttt

SEQ ID NO: 295082 - DNA, 1793 bp, Cannabis indica
aaaaaaaaataaaaaaaaggaaatattccaattttacattaacgtagaagttgcatgcacgatcggttcatcaatcggtgaatcgatccaagagtgaatcgtaaaatcgaaaaccatgagaagaattcaagggaaaaaaagaaaataaccttaggtctggatctgaagcttttgatcggaagcttcgagaatggcggtggagcaagtgagaaagtgccgaaacgattgaaagaatggaaataaaaatcggaaaagaattcgaattagaaaagggaatatatatgtgtgtgtacgtataggtgtataggaagaaattgaaaaaggaaaaggagagcggaaagaagaaaagaaaaagaaaagaaaagggcgggatttgcttgtgcatcaaacacggtgaataataccgagggagatgtacgagtacgtgttgagaacgtgtgatgaagttacgaaaatacccttaagatatcgttagattagagagagattctaatctagtttggacattatcgatccgcccatagtggagattctccccattctcattttcttgtggagattccattaacgacattctcatcccagtaaaactaaaaactaaaaattcttacttttaacactattctaattaatttctaccaatattttactgttggctgcttccagattaatgtaatccattttgacaccaaaccggaattagttattttattattattattatttttgaaagaacaatttcatagaactagagaaaggaagagggaatcaaaagggaaaatccctccccaatcacaatcacggaaggctaagtcaccattacaaccaactctggtcttataggctaggctaagtcatcaaccaaagagataaactctctttttacaaacctgaaattacaaccaacaaaaaaaacaaaagacttaaattaataatatccgtaaacagaccaagtagctaccaattagggggacattttctgttaagagcactgattgcaatctggcaatcagaaaaaaatgtcaatatcattaagggcagaaaatctcatcccttttccgatttcagccactacttctggcagctgtaactccaaaggccccatccttatcagagccatccaccatacagtatttccccaacacaaaggagctagaaacttcaagtcgatgaaggcccggaggatcaagagtaacctcgaagaacttgtggaaccactcccaaaccgcttcaaacacctgatttgcctctttctcaactttcccaaacaaacaacctcttgtttctgtatttccaaatttcatccaaaaccagagcagagctaattaagcaagtcctagacttttcacaagggtatccaaaatatttcgaaacacatcttgaagagagtgttggggattattttatcaaatctagatttattatgttgtttagcatcctaaatatgaatttctaaaataatggaatttaagcacatataaagttcaagaaaccttacattggttgcagcagaaaccttatattggttgcagcagaattaaatgattccttccgctcagatctctaactcttgtatcctttctgtagcagagtatcatcaagatctgagtccggttctccttaagttgaatggatttttcacagtcttacacactatgattgagtatcaacttgctatgcgtgggcatgtactcaatcactaaagctcgaattttgatcgtgaagaacactaagaatccatcactagttagatttttggctcttgtggctgcccctataaggatccatcacta

SEQ ID NO: 295083 - DNA, 5092 bp, Cannabis indica
agaaaaagaaaatactttggtatatgtttttgaactggttgtcgacaaagaggttgtaattagcactaatcttatcttgaaacttatgaatggttatcaaagttgaactaggtttcctgcaagaaactgcagaagtatgattgattgacataatatgctcatttatgtagtatcaatatttgcttgataatatgagttaggggtttttatttcaaatgttaaaactttattgtctagttttccggagcatctctttctcatgttcacacatggattgacttagcatgctctcaggatagacgataaattttaatagatttgcttgattagttaggttcatataaactttttcgtactatgctttactgatgaggtggtattaaatttgctattctcccttttcctggactgcagagttgatggtttcatctcgaggtgttcattgaccaacactgatacacagtgcaaccatgttgctaccgaagatgaaacttcagaagaattgtcagttgttgaacctgattgttcggttccaatcattaatcttaattctgaaatccttgaggctgagcctctgagtttactaactgaagacacttatgtggattgtctgctaacaacacttccagtgcgtttttctgcttgtccattaaccttttcctctaatattgttttgctatcattgcatcattgtgttacttatgctttctgtttacttctcaggttttatcagaggaggaacaacatgcccttgctgcaactcccgcccatccaatgggattatacggtaagaatttcaactaaaaggcccaactgaagctcgtcatgaattaatttaagataatttcattgcattacctttttttaaataagttgatttgagtcttattctatgctaactttataggatgtttacatttggagtcatttttgacaaagaattatgtatttttcagctttatacgctagctgtttgtctggaaattttgtggaacaactttggaattttgcttggccttctgcaattgcaatgatacatccgagccttctgccggtggcagtcatgggtttcttcaccaaggtctactatttataataatgtgaagttgctcatataagaaagggggaagaagaatatactgtctaacaggttttctccatgttttaacagcttgcaataatcattggaggccctttagttgggaagtttctggattattttccgagagtacctgcatataattgcttaaatgttgtccaggtaactatatcaatgagtcttagcttcatgctatacgatttatcactgccctcatactaggctaacactttcttccctatcaggcagctgcccaattgttatctgcaacaatgattatttatgcccattctgttcctttttcttctggatcatctctgcttcatcagccttggtttgttgcactaatactagctggggctgttgagaggctatctggtgtagctttgggggttgcaatggaacgtgattgggttgtgcaggtagtgcctctgagttatccttatttcttttaagatataatatttgtgtttgttctcttgcaaatgagtttgcctttaacttgaactcttatgtggacagttagccggagtcaatagacctattgcgcttgcacaagcaaatgcaatccttagtcgaattgatctttctgtgaggtatgactgtttttttcctttaggtatggatgtttagatttgtttaaatattgatagctactttatctttctcttcgtcgacctaaagtttgcatgcatttttcaatgaagtaagagattataactgatatgctgtttaagcttgtatatttctatgtttgctgttacctaagattgtatcgttctcaactgatatgatagctatcactgttctatacgagtactttattcttttttgaaaattgtttcataagaatttcagttcatggacttacacagtggttgttgcagatagctggagcatcattgtttggcattcttctttctaagtatggtcctgtaacctgcttaaaatttgctgctggtttaatggtttggtcattaccatttacggtaattgattcccttgtcactctctctctcttctttttttttcttttttctttttgtgtgtgtggcttcttctttctttctgaatgtctatttttctatgcagttggaaaatgagttaatttctattttatcaataaaattatattttacagataatcctcacatggctgtcaaacaagctctctgctggggttcttgaccgcccaaaatgttcaccaacttgttccagaacattcactgatgaagctgattctaatactgagagtattggtaaaacttttcaaatcctctctctctctctcgctctctgtgtatatatatatatccacacctatatttataggtgctattcttttattaactggattcctggattctcagtggataaaggtgtgcaagctatcaagctagggtggaaggaatacatgcagcagcctgttcttcctgcaagccttgcctatgtgctcctatatttcaatattgttctcactccaggaagcatgatgacagcatttttaacacagcacggtattttttcttttctttttccataacatgcaactatattgaatgaccttggttcctcttcatatatcaggccccaatttgttttgggaattctactttgggttatacattaagcttacatcatctttctatatgagcaaatataatatacaatacatggagaagcttcgaactggagatgtaatctaacatttatctattacatgccagtacaagcttatgatttcaaatgacaaagtggattttatagagtattgttacattgtgcatgtgatacagccacttatgatctgtggttatttattacttaatgcttttaccctggggctcaacaagggaatttatatgtttcttctcttttctaaatacttccttcttgaattaacatcaataaatgattctatatagcaattcagtcttgagccttagcttttttatttgtacatatgtatcttttgactctagtttttaactgaatttatattctttgacaggtcttaatccatccatcatagggagctttagtggactatgtgcggttatgggtgttgcagctacatttgtgtctgcaatcctgatcaagcgacttggcattttaaaggttctctatgttttcttctttctactttactatggttttggattgtgttttcagttttcataaaattatcctaatcgccaggcaggagcgcttggattgatatttcaagcttcacttctcaccatagcagttgctgtttattggagcggatctctttctcagcatagtcctctgctcttcttcttgtgcatgattgtaagattgtttctggctttcttgtttttggtaacccaattattgataaagttttcactagtgtgtactcttaacaaatgaatgtaaagttccatataatagtgaccatcatactagtaactacataggattttgagggatgaggttagataattattctgatgggataataatatatagtttaattatgttacaatgggttataacttcagttattcttgtgtaaacttgccataacaaatgtttactttaaagttgcaaatcgtagtggcatgtgctttaataaaagggtacttgtagttgtgaaaggactccctctctatagtgaaaacaacttaattagatttactcatattgtgtttttcaattctattattgtgtcaactagttcttgttgctgtatgtagcacattgatttagagctttttgtcaattttttttttttttttgctttaggtattgtcaagagtggggcacatgtcatatgatgtggttgctgcacagattctacaaactgggataccatcttcgaaagccaatcttattgggacaacagaggttgctgttgctagtttggcagagtctacaatgttaggggttgcaattattgccaatgatgtctcacatttcagatatctcgcaatgctgtcacttctatccgttgtgggctcagcttttatgtactgcagatggatgcataatccaacacaagaacaaaggactcttttctcatttgaccctttgttttaaccattcatgtaagtcgaattattatttcatttacactaattaaattacatcacacgtgggtaatttctttcttttataatcacttgatcataatcttgtatcaactgcagtttttggtcattgttgttggatatacactacaacatataatagagctatctataccttttaaaagggccacccccacataaggtatactttctttctgaatccctttgtaactttctttcttcgtttttttatacggtagattggctgtaaattatgtcacacgctacacaatctttatataggactacttgtatgtacaaacatgttagaaaatttgtaaagcttaaattaattcaatatcccatttgttcagcaaaccaagctttctttgaactttacttacctgcacatttcttcaatgaagttttttattagaatgaaaaagaaagatccatatttcttaagcttttcttttctccttgtgctaatgttactgcactataatatgaaaatgatatttcacttgaaaaacgaagtatggcatctggatttttttgctgtccagatcaaaatttgaggtcttgcttcgttctgaacagaaatttattcagctgaaatctatggacatcatttttaatttattcatttatatgtgtgagaaaatgaatggttggcaacttggcatgataactttcgaagttccgaatcctaaacataatagaaaaaaacttccatacgactatatgcattttaattataggagatgtcacacaaatttactgaaaattttagatgatttgaggtgcacccttataaaaaaaatgaaagtaacacatgttcaataggctatttcaattctattctctgagggctcgtttggaacgtcgtattaggtcgtactgtattgtattatattgaattgtattttatgcaatattt

SEQ ID NO: 295084 - DNA, 1998 bp, Cannabis indica
agagttaccagcacgacttccacctccatagttattagaattgtgtccccttccaccttagaaaccaccaggttttgttgtagcaacattagcattgggagagatgtagtttgcaggagcgtttttggtagtactggacaaagcactaaggcgttcaactttgctgtcacagcttaggagatgtcttgtaatcttgcaagttgttgaggcttgcttcaacttgaacactattggtagatattcgatatcaagaccagatagactattggaaaccagctgtttttctaggtacagatcgcctgcaagagccaacacctccacccattgcctcttcatcgaagataatcagccatagacatagatccttttcttgaggtttgaatcttcgtgcgatactcgtccatcttgacccaagaatgcgcaccaaagagtgtcttcgaagcctgcaataaagtagaagaggaatcgcaccccataacttaattagcaatactttcggtcatagatccgtataaccatccaagaagaaggtggtcatggacagtccatgcttcaaactcaagattcacgatgacagtattttcaccagcgtcttcatctaggggaaggaactccatcggcttgaccttggttccattgagatagtcgtctagacgatgcccacgtatgattgcagacacaatgtataattattcctatctagcttcaaggcaaatggcttggttagggtactggccacatgaggtccagggataacaacaaatggagcttagggctgagcaacaacgctggctgcactgcagccagttgagtctccttgtccaccaccgtgagtcgaggtttgttcaccaatgaagcaagatcaccaccagtgtcaagctctcagaccaagtttgaaaaaacagaggaagagtagagaatgaaaagaatactcagcacaccaaaaaattttggggcaggccacactttataaatgaaaaggttacagagatattctagaatatttagaggtataataacctcatcatttacaacggtataaaggaataaatcataacagaatgatatgcaatcattgtacaggggggaccaacatagtgacaattgtgacacctatacacatcaagaaaaataagagtaaacactaattaaccttcttaattcatttcttaacaggctgccctctccatctatggaagtgccccttcctctcactttctcactctttctcgtctaactccctcccttgcctgattgagatccagtcatgcatgcagcaaacgacagccaatgacaaccactagtggcaagccgaggtaactctctctctctctccctctcaacctctttttctctttgattttattcttttcaagtaggtgagcggtggtagtgtagtttgaggataccgcttcggctgtctcttttcaagatttgtatgttttttttttctcgttttctctctctcacacatttcatatctgtggtttgtaatcaatttttattttcttgcatctacagaagatctcagattgttttgtgtaaaatattttggacttaatttttatatttatttatattttttttatgaaaattgagtttatttattagatatgatattaaattttctcatatatattttggtaaagatagtaaatatatttttgttcagaccagattagatatatttactattagtttcaattagtaaaaacaaacaaaaatatttcaaatgctctaaacaatgatgttttatactattagcaattgtttttaagagacacaagatttttgtaccgatggttaggaaccgacgctaatgaaagtgaattattttttgtcgatgggtcttaggaatcgatggtaatattatagctgactattttaaataattgcctaaacctttttttgagtagtgaaatattatgtagattgttaagtatatataagacataaattaaatataattttttaatatactaaaaatagaagagtaat

SEQ ID NO: 295085 - DNA, 6718 bp, Cannabis indica
aaatgcatagcgtcagaattaaaatcaataatataatcacaacatgtaaccataatttcttctagctttattccttataaaccatacttttcttctacctatattttgaaggtaagtctttattgatattttgctataatttttttagtctaatttttatgattggtacgttgtagttatttatgattatttataaatttttaaatttttttttgaataatttacaattttaaaattaaagtttaaatttttattacgactatttaatcctataggtgtagtaaataatgatttgaactttatttttagtattgtaaattatttaaatttttttaaaatttataagtaattttaaataaatacaacatataacatcataaaaaataattatattaaaaaattattctgaatattaaaacaaataagaaaatttatgaaaacacccattttgaggggtgtactacaaattttctttattctttatagttttggtttggtaaataggatttatattttaaaagttatataaggatatttataaaaattatatcctcaaaacattacttaatgataaaaatgttgacaggagaaaattaataggtaacaacagaattatgcattatttttatttccattctccctgccaaaattagtgtttaccagttttggtaagcgacaattataacctgcatccgagactatatttctcatcattttaaatcgttggatggaaaatcacggaatgatcaacggttgttattgtcgatatataccgttacacatggtggggttgtctactacgtgatacaaatctcaagtatggcaaaaacttaagcacgtgctggatatgtacgcacgttatatctaccttttttaagcgatttaccgacatttggcgccaaatttgtacgatcgagccaagagggcaaaacctttcgaagaccaccagtgttgaaacgccatttacagaaaaaatatcacgaggggattctgactttaggggtattgtagtaatttcgtgggggaaaatacgtcatgacaaatgaggacaataattttcagcaaaatcacgaaagagccactgaagcttaagacaaactatacaaattgtccagttttgtcttttctcctccttatctgttaagtggtatttttgtaattcagagaaaatttgtcgcaatgaaagctggaggagagataagagaggtaaataaaaaaaaaacacaaaatcacttttcttcctataattcaacgaatttaaaatcccaaaacactggccacttcaaatgcaaaaatacgagggcgtagttgtcaaattacaggatcccttgtttatcttttattaaaaatgctcattgctcacaaataagtaatccccgtatacaataatttaaaacattttttgctaaacgacaagcaccgcctagtccgactacctccgacaattgtcgtaaacccgcttctgctgacacgtggacggatagattttaataaatagccaggagattaaacttgggctcaggtacacctctgctctggttcctaaccatggttaaataaaaacaacacaccatgttaaacccaacccagcgccgctttaactatttttaagcatttctactcctctctttttatattattattatattatgatagaatagaatagaattcatatattttaactttgttcaaatcttcctttctctctctactctttcgctcttcttcttcttctgccagctatgaagccgccgccttagtcgacactgttattctccggccacaaccacgaccattgttgagaacgagaaattcctagttcaatcttctcaactgttttcgttatatatagctttctcgaggaaagaactataaaaatttcgtaccactgtactagactgtgagttggacttcgtctatactatacaagaacaaagcttatgattatcggtccataagctttgaatcgaaagactaagttattatctttcttgagctagaagattgaaagaaaaaactccaagcaaactcaatgggagagttagggaattccacaccaatggaggtttccacagtttctgctggagaagctagtatgtcttcccctggtttccaaacgtcgcctgttcctcttgaagtagttattccgaagaagaagcgcaacctccctggaatgcctggtaaggctattgtaagaacaaaaagtagcgcttacagaataataataatcataattttcttttgtcaaataaataaaataacaataattttttttctcttaatttaatttatttatatattcaattaatttggggtaatttagatccggatgcggaagtgattgctttatcgccgaatactctaatggctacgaatcgtttcgtttgtgagatctgcaacaaaggatttcagcgtgatcagaatcttcaacttcaccgccgaggccacaacttgccatggaaactacggcaacgaacgacgaaagagatacggaaacgagtttacgtatgtccagaggcttcgtgcgttcaccacaatcctgccagagctctcggtgatctcactggaataaagaagcacttttgtagaaaacatggtgagaagaagtggaagtgtgagcggtgctcgaagaaatatgccgtacaatctgattggaaagcgcacatgaaaacgtgtggtaccagggagtataaatgcgattgcggaactttattttcaaggtctttcttttttcgttcgtttacggtttttttttttctttttctgagaaaggtttccgtttctgttaccattttccgagaaacctgtttgtttctttgttttgtagtttttaaataaaaaataattttcttaggtggctactaaatatgtttgactaatctggcagaagggatagcttcataacgcatagggctttctgcgatgcgttagcggaggaaagcgctaggtctcaagccctagaaattagctcagaggctgggaattccaatgtaaagacagcggtggcttcaccgcctccgccgcctctgaccccgtcggtctctgtggtttctccagctttgtcgattcagagttcaggtaatagggtctataattaatgctctattatttcatgttgctatttaaattctacatttcctttattacgtaggtcagactagctaaggtgattttgaaaatttagttgctgcttgggttgttgtgatgcaatatgacaattgtaacacttttttttatattattatttgtatttgactctggttgtcttctgatacaagaattctttaatattttatatgctagtttggtgtttatggctgtttgtaattatattaaagtgtcttctgaattatgtcgttacatgctcttactattatgaggaataagcagtgatagtagttcatcatatttaggtgtttgacagtaggagatggataaataaataaaatatttttaaatttatagagtatttcactattttaatagccctgcttattcacgggctgtgaactggttgcacggttgataaagaagctcaaggatcgagggggtactatggcttaacattttaaaaaagaaaaaaaaaagattgatgggaaaggacgccataattgcttgtcctttttacttatatggggcttgcaagttttaagctgatatttcgttttttaattaggacttgaaaagttccaaggggaatcctttctcgcctgcgccctttttcctttccttttagttgatttccctttgtattttatctttcagttttcccccatatctccttttcgtgtcctttttcagtttttccgtattaaatttttctttttctttattggtatattctgttaacttgtttttggtatcccagaattgcctgataacggaataggactttctccacccacaccggcgaccacaactatcttgaccactacttctgtcaccacttgctccagtaataatgtcagtagcagtagtactgtatttgccagcgtatttgctccttcaagcgttgctcaagtgcctcacccaccccgtaccttagctaattcctcattttccaatctattggctggccgatcacattgctccactactcttccaacagtgtccgatatggagcccacatctctctctctctctacgtcactttacttgtccagcaacggcggctcctccctatatcaaacacaagaccaggccgagcaccgcaacttcagcccatcaccactgcagcctccagcaatgtctgcaacggcattgcttcaaaaagcagcccaaatgggtgcttcggcttcaaattcctcgctgttgtgcagttttggcttgacaacatcaacatcttcagcctccgttaaagacagtcttggcacgcagtggaacagtactcaaatcaagccggaaagtggttcgtcgactttggcagctgggcttgggcttgggcttcagcctggtggaaattctggcttgacagatctagtcatgggcccatcgttgacgttcgcgagtccgcccatgacgcgtgatcttcttggtctgagcataggtggaggcagtggtgttggtggtgggggtggtgttggggcttcttccagtgggctttctgctttgctcaattccttgggtggcagcaacggttttgatattacagcaccgtcatcttatggtggagggcgtggtggtcggagctcatctggagacaagtgggaaggtcagcaggagagaaagcctaatggacctgcttttctctagttagtgacttactgccttatttgactggtagttttagtgagagagtactcgtttctacaggttcttttttgctcgacatttcggagaagaggattgtggagttggtgtcttagatatatctttagtatttggtaatttaagtttagtgtatttactttgcaatgaccttgtgctgtttttaagcttttagtttttagtttttagtgtttgggagatatgtatgggagaagtggtgtacaggattccctaatgccaaatgaaagcacaaaaaggactaacgatattagtatattacttcaggaatatgaaagcttttattattattatcttttaatttttacgggtctcttgtgtcaactaatgagtaataataaatccattactttgcatatggcaatatgtatataaacttaaggtttgaagaaaagaagaaacggtcaacatcagagatattgtacaatttgaaatgctgaacggggagggactttggagagctgatgctgtgtgtagtgtagactccatttattgcccattttgaacatctcattgtgacggtgatctatgttgtggttggggtccaagggtgatatttaaccagatttagaatggtcagaacgccagtggtatttaattttgtgagttggcagaaagctatttttgcactgattaccaacttaacgggcccatccattttatggtgagggtgaggtgaccctccagcctggtgggttgggttgggtttgctttgcttcccgctacccagaccgtcgtttcctctcttcaaaaccacattgattttatctcaacttaaataacccacgaattcttgataaataatatcttttcacaccaccaaatcgaccatgttatgaaatgatgagagacaaacccagtcctgtcaaaatataatataatacagtaaaaacattttaatcatcactcactaaaagtgtcatcatttgtttatccctaacacaggatattcttatcatttgtttgttgctaaaaaatctagcaacaacaatatcgtcgttagaagctatttatacgaaaagatcgcttttagtgacgatatacctttgtgtaaaatatcttttgtatttatgatttaattttcaatatttttgttcacaattgataacgatgacatttttcttcatattatttgtactagtaaacaatactacgcatgcattgcgcaataatataattgatacgaaaaataatagtatatcatttttcacacttaaaattgagtgaatagttattaaaaaaattaaaaatttattgcaattattatttttattcaagatacccttataagaaattaaaatataagttttcttatacaatggttaggcaataagccagagtcctttgcttctccatgtttctagtagttgtaatttagatttcttatcactttgtcaataataataataataataataatattaaaagtaataataaaatgaaattcttcgtagctattaaaataataatttatctaaactattatcaatggtttttagcccaattttaagataatttttgttttgataaatcctattttaagattcaatttacacaaaaatattatggtatgtcttttgaatttgtttcttttgaataggttgctattagtttttttttttcgaaaaaggtaattggaatcacttaaaaaatgacgatgaagatatcaacaattagcgcatgatcttcttcaaattaagatagcccattgtatcattgaatgacatactttcccaaatcatgggctactgtattaatatcgcgaccaatataggaaaaatttgcttctaaaaatttagataataaaattataagagaaatgctaattacaacttcttagtcaacctccacatccgaaatcacatgctgaaatattttttttcaattttttttttcatagcggtattcgttatagttacagtatcatccttgt

SEQ ID NO: 295086 - DNA, 5747 bp, Cannabis indica
aaaatattaaataatatttggaatttaactaacaaagacactttttctgtttctctttcatctttctcagtagtcttcacagcacagtacaggtccaacacagtcttatactttctcttttactttctttctcttttctggcacacaacacatcacaccccagcagcagttgcagcattgcagtagctgcagcactgctatgctgcaccctctcacactcccaaaatataattaaattatgagaaataatcatattattattgtactacatctcactcactcattcactcaatcgaattgaatttccttatttaatttttctttcggccctttgtaaaaccccaatccgacccactcaaacaaaatttcatttttacttgttggtttctttttaaaaagcttcccttgattgatttgataccaaaaagccattttctttcatcttggtctaataaattaaaaaaaaaaacatctctctctctcccatgtacatactatgactttattatatgaaaaaaaaagaggagatgttaacttcaactccctctaaaatgcaggcatgactcttttctctctctctctctctactgttgcagtctcttgtactgttctttctttgttttgtatttattttcttctctactaacctggtcctccgcaataagcgcttaaccaaaggcttcttctttataaagcagaagatacttctctctctggattggctactactgggagtgtgttaagtgtttgaagtagaacaataagaagaggaagtagtaactaagtaacttagaaagtaccattgtgttcagttagggttttttttcgattggattcgatatggcgggtccgggtccgggtctgattctgatcgatctcaacactaccgaggaggatgaaacgccgtcgtctggttcaacggcttctacgtcctctgcttctgcatatataacaaatacaacggcttcggcttcttcatcgccttcttcatcttcttcttcctcagtgtgcttggagctatggcacgcctgcgctggcccactcatttcactccccaagaaagggaccgtcgtagtttacttccctcagggccacttggaacagctctctgactttccggcgtctctctgtgatttcccaccccacctcttctgccgcgtttcggacgtcaagctccatgtaagatcatctctttcatggttttacattcttggtacccgggaattttttatatggaaaacgggttatgaagtttgggattttctttcctgttttgatgattttgcgtttttttttttgggtcaggccgaggaaggcactgatgaggtctacgcacaggtgtctctttttcctgaaagcgaggtgagttttattctaaagtgtaggtagagctgataatgagaaaattgttgtttcttacttgttcatagcatatgtataagacttttcgaattggtttcttttcacttgttcacagtgctttttcaatgtgattattcatgactattgagctgaatttggttcttttgtttttattattatcaatttgagcaaaaactgcaagatggggaatttgatgctgatggcgatgaggaagatattgaagcagtcgttaagtccacaacgccccacatgttctgtaagacccttacggcttcagataccagtacacatggaggattctctgttcctcgtcgagctgctgaggattgctttcctccactggtaagggttgtttttcaatggataccatacacaaatctatagcgttttcgtgtttgaattggtttgcattctatttttaagtcaatttctgttgtaggattataatcaacaaaggccttcacaagagctagttgcaaaggatctccatggcctggaatggaggtttcgccatatctatagaggtgcttgtcttatatttagattgtaccgaacatatttatatccaaatggaccttatttttattatactacaagggaatagcagttttagtagatctttcattctaagtggaacttataacaaatctgtgtttttcttgaagcagggcaaccgcgaaggcacttgctcacaacgggatggagtgcttttgttaacaagaagaagcttgtttccggtgatgctgtgctctttcttaggtactgaacctttgtcacttggaagcaacttttattctctcctttgttggttctcatgtacaatatgtaataggggtgatgacggagaactgagattaggaattcgaagggctgctcaggtcaaaggttgcggtagttttccaactatgcttagtcaacaactgaattatagctctatgaaagatgtagttagtgctatgtctacgaggagtgctttcaacctctactataatccaaggtactaagctactcttattcttgaaagctttaatggagtgtattactatgcctactttgtatcttaccttatattcgaagttttcattaaacatggaatgataggcaaacatatatcgtttctcctctgtttttcttcctttcctttatggatattctcatatgaagttgtagttgccttgccttattctccattgcttaaaatattcctttgacgattcttctttctttcacaatatcacttgtacttgtatctctttttgtacataatttaatgtcttaattaatttattacatatcttgctgtaacctaatgtttgttttgctttttcccttcataactttgttccccaatgatcttctccttggcccattgtgcactcttgcaaggataaatctagaaagtagctcacatatgatgcttaagattgcaagtaatgtttttcatttcttccatttaaggcagaaaatgtttttgcagatagatttcttaaatttctttttccatgttttgttcaattttacttcttttttatttttttttattttaattaatattagtagtcttggtttgccatgtatattttaattcttccttctacaagttaatgtgttgcactggagtccctgttacttttaactttatgatgattaagtgacaaagaatgccctatattgtccgttgtagggcaagctcgtcagcatttatcatacctgtccgtaaattcttgagaagccttgatcatccattttctgttggcatgaggtttaagatgcgttttgaaacagaagatgcagcagagcgaaggtttgacctttccataaactttaagtagataaaaagcaatatggcacaaatattgaccagctatgtcgtttggcagatacacgggactagtaactgggattggggatatggatcctgttagatggcctggctcaaagtggagatgcctagctgtacgtacttcctattgatttgtttactcatcttcaacgttttgatttatagaaattgttcaaatttacacacaagatccatttaaaactcttacatactggtatataagaccttttacttgatattttacagtatgcactgttacgcttgtgcctaatagacactaccttgcagtatatgtatttatatgtctgataataaacataaaacatgcttgtaatacattcctggcttttctgatgagattttcatgtcattaaaagagactgaattttacttggtgtttcgtacaattttgcaggttaggtgggatgatattgactcgaataggcatggcagagtttctccatgggaaattgagccatctggttctgtttctagttccactggcatgatggcaccaggtctgaagagaaccaggattggattgtcttcggggaaagcagaatttccagttccaagtatggttttattagccaaatcttaattgatttaattaaacaaaaaacttccgatcatatttgctttcgatgcttatttattggacttctaattttctgacagatggaattggtgcatcagacttcggggagccattgaggttccaaaggtcttgcaaggtcaagaaattttgggttttgatactcctttcgatggcgtgggtgctcaatgtcaacatccatctgagaggaggggctttcctagtttaaacagttctgggattgctgtaatgggtaataatagtgttagacacatgcgtgtgaattctgacaatattacccctgctcgcatgggctttggtgaatcattccgattccataaggtcttgcaaggtcaagaaatacatccaacctcaccatgtggaagagccccagctactcatgaggaaagtgagtacagtggctttgaattcatggatcgtgttcaggtgccaagctctagaagtgcatggtcaaacgttatgcagaataatacaacacttggtcgcacatctgccaaatctatacaagtatcttcaccctcttccgttttaatgtttcagcaagcaatcaatccactttcaactttcaatgccattcaaaatagtcataatcaggaggagcagagagctacaaagcgaagcttgtgcactgctgaatctactaatgttggaaagctaatgccattcccgttgtctgatcgtggcttcaatggtgaatatcatgggggaacaaagtctgtgtatcactcttctgatcggaatcctcatggaatttcatgccctcttacaactcttcctgactttaggagcagtcaagatgtagtttcatcatgcaaaagtagctgtagactttttggtttctcattgactgaggaaaaacatcttccaagtgagaaaggctctccagtttcctcttcgttgaatcctggagttcctttgtttcctgatgttggagggcagtttcatacaaaacctcctttgatgactaaagcagtccgaagcaattgtaccaaagtaagcgacctctacactgtcaaagatatgcttttcgatattgcgttgtagtagaaatctactgcatgataacgaactacagctttacaagtgacagagtgttaaagagaggaccatttgaacatctaatttgcatgttccaagtgtattatataggaatggattttgactagtctagagaaaggttggagtattgtttggaaggatggcaaggatgatacacagggctcatcagacaaagatatatggcagtaagtccgaatctctatctcaactatcaaagttgttttgtgtgcacatttgaaatcataaccgacctcatttaacaagattaacattggtgccaatagctatatttttgtttcaaggcttgttaatccatgttaaataatattttttagtgttgttcatattagagccttattctttttgattcagtctctcataattgtttgaattcttttgcaggacttaggtggtgcaatccagaattatgatatgattaaaagatgttaccttgggtacctgacgctgtctgtagtttgatcagattgtgtgtgtgtgcacttaaattaatttaggtttgaaacaaaaaattgtaattatactccaagtaacctgacagtaactttttttttctttcttttaagacttaagctatgataagaattagctcttatgtaatatcaggtccctagtgattgtccttgtttgcaagagggtctgttttcaacttatctcaatgccattcattcttttgaaattattattggcaattgaacttgccctcaacgccttcttttttttaccaaattttaaaagtttgagctattgttgccttcttgttatttaggaaaccaaaataattgaattgagttgcattgtgagaataagaaagaaaaagaaaaaagt

SEQ ID NO: 295087 - DNA, 2368 bp, Cannabis indica
ttgtagtaataatttttctggataaaattataaaaatctcacaccgcgaaaaattaccattcttataaaaatattacatggatgccaaatccaaaagttgaagggcttttctattaatgttattttagttggtgaggttctaccatatcatttgccttatgtttttgtcccatatttgagggaccttatgattcaatataacaagttcagcttgttgtactttcacttctctctgacctctatacactatactataaattatttatatacataaatgcaaccatcattgccaaatagtgtaaccacgcagaattttcacagtcaatcacaaagaattttattgtaagtttaactactttacttacaattagttgatcagcttactcgaaccatattactacagtcagcattgaaactctaaaggagaatgggagttggtttatgatgggaatttatttgtggtttcatctagaaattatcataaaattgtattcaagagatgattagcctgatcaagctcttgaaactagctaactaggaagatagcaactgatagatttagagcccttttttgagacagtacaagtctcctcaatgcaattctttgcaaattcattcaacaaaaacccaaaattattacaatagatagtacttataatgtttgttaaatgaaaagtaaacacatcttaacagaattgggttgctctcccagctcacgcctcaacgcctctccaccatcacaaagtcgttgagccacttgggtctcatgcacactcgttttccacgcgttggagcttcatgaacaatttcagctgccccgttctctttctcttccatgttgatcccaattgaagctgctgcttctaaattgggattttgggctaccatgtctaaccactctaatttatccttttgtccatatttgtctcgatcaaatgttattaggccttggtcttaggctttactaacattactcctctcacatcatacagtttcgagaaggttgcaaattcttcccatatgttaaagaccattgaaccaacacttaacgaaccggtttggagttggttattgtagtttgagcagccaagattgctaggggtaccattagaggtttgttagcgacgctaaactctggcagcaagtaagttgtggggggttgtttccatagtggattgaagccaagaatcatttccttcatgttatctaggtaaagcatccgtgactttattttccttgtctgtcttatatttaatggtgaactgaaatccaataatttttggaggaattgatgttggtctagtgtttgaatcacatgagtgagaagctctttcaaactcttatggtcaatgtgtattacaaaatgacgaccgagaggaggtataaatgccatttagtaatggcttcaacaatagctctcaattcatgcatgcaggcagaagttcttgaaaattgtggactcaatttttgactaaaaaaagcaattggatggtcgaatttcataaggactcctccaatacctacattgggagcgtcggttttaataataaattctttagaaaagtccggtaaagcaagtatttgtgcgtgagtcatgacagacttgagtgtctcaaaggcaaaggaagcttgaggattccaattaaaattttccttctttaacaaatctgtcaaaggggctgcaatggaagcatagtgaggaacaaatcgcctataatatcctatgaggccaaggaatcctctaattgatattgtggggttgaggccaattaaccatagctgctattttttgtgttggaagcatttcattatgttgagaattatggagttccatctcaaaactaattggcaatgagtggaagcccaatcttcttatatatggctcacttctctaccatttattccatgtgggacaatgtccacaatacattatacttttaccggcataaatttgtgctggtaaaaccttttccccataccgaaaatccaggcgaaaattttcccacctacttttcttggcgcatatttacgtctagaaaaccccatctaccccgctaaagattttttgcatgcaggaattcttctgctaatttatgcgccaaaagatagttacatttaacttttttatcgatgcatttcgtgaactgcgtcgataaaggtgtcttttgccagcataaatttacgccgataaaatttttagctaaatgcttttgtgcttcgttgctccttctcttgccggtatctttgaccagtgcatttggcctaatatgctggtaaaagttgtgattcttgtagtgatgtgagctgtccaatatgagtatagtgtctataaatactcatattagtagctaagtgcatgtttgacatc

SEQ ID NO: 295088 - DNA, 1192 bp, Cannabis indica
aaaccctaatcacattcctcgattcttttatagctctgtcctcttcgatcttcgccaccgctctgctgctcaaccgccaaggtttggggttttgacggcgactaatggtggtgaaaataggttagttattagtgctagttgtaatcgcagcgacgtagaaataatcagtgatggttgtggaacttcttcgaagaattcaaaagtggatgagttcagagcagaggatgaggagaagaagttggttgatcatcaaagcatatggaaccaaatgaaggagattgtgatggtcttctactaaaactggttcctcgaatgtctcttgaagcttactcggatgtagactgggccagctgcattgatcatcgaagatatacgggaggatatgctattctccttgctataatctcatttcctagtctgctaattgctaggtcctcaactgaatttgaatttcgggcattggcaaatacagctgctgagattaaatggtttcggtctctatacttactaaaatgcaagtacatttagttgatgtccctattatttgggttgataatcaacaacttctttagctgttaattctatattttcatgctcgatgtgaacacatagagatcaatcaatattttatttgtgatcaactgctcaataaagaacttgatgtgcgatatgttcccatgattgatcaagttgttgacattttcaccaaaagtcttctcaaggatcgatttaattatcttaaaaccaaactcaaagtagtgtcgtttgagggggaatgataaccaagttagttagttagttggttttagtctcattgtctgtattggttagtttcttggtatagtttctgcactaaacgaaatctgtttttataatagaattcttactttgtattttgtccattcttttgtgctatagataaagggtttggatcttattattgaggtaagaatttcaagcattccttgtgtgtttcttctctctattctcctctgcttcttcttcttcagaagtccctacaaatttgtaacaaacaaatttagacaaacttatatatatctatttaacttacatagataaagataataaagcacttatatatatttctagaatatttgatatttaccataagtttaacgggtccacattgttagaatttattttaccaagatcttagatctactcacaagta

SEQ ID NO: 295089 - DNA, 2701 bp, Cannabis indica
aacaaggctaactaaaccagcagtcatgaccttctttctaaatctgctagttttaaacatgtttatccatttggagactcagcctgcatcagtaacagcagagctccagccaagccatcttgcaatttcagctatgcattccttagtcgtgctgcattcaaaaaacaagtggccatttgtttccacaccactgttacacatcaaacatgttggactgtcaatgatgccaaatctgtgcaacctttctcttgttcttaatcttccttgaagtgccaaccacaatataaaaatgtgtttagggatattgaatcttccccatacttgtgcacaccagtatttcttatcttgagtaggacataagagtctatatcctgctgcaatttggtacttctcttgtgcaaactgttgtgtattaatcatggggcaaatctggtttttgagagctaccaattgcctccaataccagctcccatttgttgggatagggtagctccaccattccatattctttatgtatacagaatgtatccacttgacccacaaattttcttccttctttgcaagagcccaaacatatttaatcattgcagcttccactcttttactcttctaaatccaatacccccatctgcttttgtttggcaaatggtgtcccaagatacagctcttgctccttggaacatgtgttggcctttccattaaaaggccctgcatattgcttcaatctctttaatgactttctgaggcagtatcatgacttggctctagtaggcatatatggctagcaaaatagaattaatcaacactacccttcctgcaaaggataagtgccttgtgctccatgttctcactcttgcagtcattttcttagcaagtatagcacaatctttagtagaaatcctctttgaacagagaggaattcttaggtatgtgaatggtagactttgttgggaaaaaccagaagctaccaagattcttgtgatgtcttgttgtggcatgttgctgcaataaattgcagacttggaagcattggggaaaagccctgaagtgtgtgaaaacagcttcaaaccttgcagcatgtataagacactattgtaatcaccattacagaataacggaacatcatcagtaaagctaagatgattgagttgaagctccttacatctgtcatggtactgaaaatcagctttgttaccaactttcctcataattcttgtcaaatattccatccccagtacaaatattaaaggagacatggggtctccttgccttaatcccctctttgaggcaaagaaaccatgcatctctccattaaacattagggagaatttgggagttgtaatacatcttaatacaagtcgtgtgaactgagcaaggaacttgaaagcttctagcatttcctcaataaatcgtcattcaattgtgtcatatgctttctgtaggtccaacttgatcatacagttagctttcttagttttccttcaataatgcttaatgatatcttggcatatcataatgttgtgtccaatataccttccttggacaaatcccccttgattctgtgcagtcaagctaggtaatacattccttagcctatagcatattagctttgtagctactttgtaaactacattgcaacatgctataggtctaaagtccttcactgtgctaggacatttaattttatggaaaaatgttataacagtggaattgatctccttgagtatcttccctgtttccagaaatgagatcactgcttcacatacctcattctctaccatttctcaattatcctggaaaaaatagcttgagtagccatcagcccttggagctttaatgcctggaatttcaaaaatagctttcttcacttcttcccctggtatatcttgccattaaagtcttagcctgtagtgcatttagagtaggtcccagcttcataacaaatgtcttgacctgtttcctatctttcattgtagaccccaacaattttgtatagtaggctaggaaagcatcaacaattttggttggatcattgactcttgtgccatcagactattctatagataataccctgttttgtcttctccttctttttatgctagcatgaaatatggttgagttgtcagctccatgtttaacccaatagagtttttccttttgctggagcattgactgataatcctcttgtttctgtaataacagctttcttgcttcatgttcctttctgtgcaggtctgcatttaggggatctttcctaatttcattttgacactcctctaattcacctttaactcaaattatgtctgcctaaaggtctgaatacccttctttattaaaaagaagattttttttattctttctctttcctctttttctttcattagcagtttaacaccaccaccaccaccattatcactactacaaccactattgcaccactacacccaccattatcaaaccctaaccagatcctaaaacatttagggaacaaaagtaactagattaaagcaaactaaagatgtttgagaacccgcgagcctctaacccctttgttgcaatctccttcttattcctgattgctcatctttgtccaaaatccctagccgcctcaatcctaacctaattaaattccactattaacggagcaggtctaataggtctaaccttctatggcgtcgacttcctgttggaaattatttta

SEQ ID NO: 295090 - DNA, 7161 bp, Cannabis indica
aaaaattagaaaaaaattacagttttacaaacattgagtttatgccacttatgaacttgaaactttagctacttatactgctatttacccttatacttgtccaacttaattatgctatatagatcacggacaagtatattgtggaacaactacttaatgacatataagtagtatttttctcaattcaagaagaatcatcatgtttgttggtgtctcttttgcaaacaagttgcttttttttagaatacttttgtaatgtatatattaaagcaactaacaacacctttgaatgccatttgcagatataccaaatggcattcaaagaagaataagcttgattgatttagaaaaagaagaagaaagctggtaatttatcaaaatatgggatctttggaacaaattggtggagaggattcaatggaagcaattctctatgttaatggacttcgaagacttttgcctgacgggctggctcacctcacccttcttgagtacctcagaggtatggaatcttgttgtgggataggcttctttttgacaatttccatttactttttttgtatttttgtgtattgaaaaggtttttgatcattattgttactttcttttgtggtttttgtgataaagatattggtttgactggaacaaagcttggctgtggtgaaggtggttgtggagcttgtactgttatggtttcctattatgatgagaagttgaagaaatgtgtgtaagtcttcctctttttctccacacacacacatgttgtaatggaaaatatactttataattcattaaacagataattaatgagatatctaaaaatgaacaagataaggtgtcaagtaaacttgatagtcaaagcattgtcaaaagaatgaacaaagtaatattaagaagatgtgtttttgccaaatgcccgagtggggtaattcgtgtcatgtcttgtgttaactgtttgttcgtgttttgatatgcctatgaagatgcgaagtaatgattttgttgtgtctttgtgctacatgtatcacgatataacacgataatatgaattgtcatttcttactttcctatcccaagtcataatataaactgccaaatgtatgatcaaaaaaccaataggcactatgctatcaatgcttgcttggctcctttgtactcagtcgaagggatgcatgttatcacagtggaaggagtaggaaaccgcaaaactggcctgcaccccattcaagtaacattaccttcttctgtactattttctttatattatgctctcatttctcactatttgttttttcttgtggtagagtcatattcttattctatggtttgttcgacaggaatcattagcacggtctcatggctcacagtgtgggttttgtacacctgggtttattatgtctatgtatgcattgctaagatcaagtaaaacagctcctaccgaggagctgattgaagaatgccttgcgggaaacttgtgtagatgcacaggttacaggccaatagttgatgcatttcgagtctttgctaaaacggatgacaagctatatacagatatatcttcttctcgaagtcctgaagaacatgagttcatttgcccttctactggaaagccttgctcatgtagatcaaaagttgaaagcaatgacaaatgtgcagccggacaagggactgcttttgctgagaggtatgaacctatatcgtttactgaaatagatggaagcacttatagtgacaaagaattaatttttcctcctgaacttttgttgaggaaatcaaagtctttgagtttgagcggatttggtgggcttaagtggtttcgacccttgaaacttcaacaattgctggatttgaaagcattgtttccagatgctaagattttggtaggtaataccgaagtgggaattgagatgagattgaaaagaattcagtataagatattgatttgtgttacacatgtacctgaactcaatacattgaatgaaacagacagtggtatagagataggtgcagcagtaagactatctgaactaatgaaatttttcagaaaggtcgtggcacagcgtgctgcacatgaaaccacatcttgcaaggcctttattgaacaattaaaatggtttgctgggacacagataaaaaaatgttgcatctgttggtgggaacatatgcactgcaagtccaatatctgacttgaaccctttgtggatggtggctagagcagagtttcgaattattgactgcaaaggaatcatcagaacaactcctgcagaaagcttttttttgggttatcgtaaggtggatttagaaatgaatgaaattttgttgtcagtgttcttaccatggactagaccttttgagtttgttaaagagtttaagcaggctcatcgaagagaggatgatattgcaattgtaaatgctggatttcgtgtttatttcaaggtacaaaggtgaaaatcggattgtttcagatgcatctattgcttatggtggagtggctcctctctctctttctgcaagaacaacaaaagaatatctcatgggaaagagttggaaccaagagctacttcaggatgctttaaagagttcttacaaaaggatgtttaatcaaggatgatgcccctggtaggcataggtggagtttaggaaaatcactaactcttagcttctttttcaaatttttcttatgggtttctcatcaaatggatgcaacacaatgtgttcccaagagctttccattatctcatctatctgctgttgaatcatctccccggccaaccgttataggaagtcaagactatgagatcataaaacatggaacagctgtgggatctcctgagattcatatgtcagctagactccaggtatgtatttcaatggtaaaagttgcattgttttctatttctttccagtgaaattttagttgaagattgtagaaacattatgtttcgtttttcttcttctcgctattaagctccacaatgattttcatatatgaactttaaccaggttactggtgaggctgaatatgctgatgacacaccattacctcctaatggtttgcatgctgctttagtactaagcaaaaaacctcatgctcggatactttcaatagacgattcagaagcaaaatcttcacctgggtttgtaggaatttactttgcaaacaatgttccaggtgataatcagatcggaccagttattcctgatgaggaattatttgcttcagaatttgtcacttgtgttggtcaggtatcaattgatatgaattcttcaatttcttcttagatggaaaaccaaccaaaagtaatgttctatatttccttgattgccagaaatgtttcaacaaacacaattggcatacctacatgaaatactatgcaagcattttctgatattcatactctagcctcactgatgctaataagaggctttgtttatttaaatacagcctataggagttgttgttgctgatacgcatgaaaatgcaaagttagcggcaagaaaggttcatgttgagtatgcagagcttccagcaattttatcgattcaagatgccatcaatgctaaaagtttccatcctaatacagagaagtggatgaagaaaggggatgttgatctatgtttccaatcagggaaatgcgataaggttatagagggggatgttcatgttggaggacaggaacacttttacttggagccgaatagtagtgtagtttggacaatagatggcggtaatgaagttcatatggtttcatcaacacaagtatgtgatatcccatttattaactgatatgattagcaatctgaatcaacttgtatgtaaattgagctagttttccttaggctcagttgaaattgaatattcagattgtaattatcaattatcactgtgcaggccccacaaaagcatcagaaatatgtttcccatgttcttggcattccaatgtcaaaagtagtttgtaaaacaaagcgtatcggtggtggttttggtgggaaggagacaagatctgctttcattgctgctgcagctgcaatccctgcatatctattgaatcgtccagttaaaataacactagatcgcgatatagacatgatggtatctgggcaacggcatagctttcttgggaaatacaaggttcattcatgttctcactatcgattcataattcatttattttcatcttgttcaaagcatggtctttctatgaatattttgcttattatggtttgcttttacatttccttgagctgtttacttcttatctattggaatgattgtggaaatttactttggtggctcaggttggattcacaactgatgggaaagtgctggctttggatcttcaaatctataataatgctggaaactcattagacttgtctcttgccgtgcttgagcgtgctatgtttcactctgataatgtttatgagataccaaatgtaaggattatgggaagagtgtgtttcactaatatcactagtaacactgcctttagaggatttggtggtcctcagggaatgattataaccgagaattggattcaaagaatcgctgcagagctcaaaagaagtccagaggaaattagagtaagttatgtagtagtttcagactagagtttctttgcctaggaaattcgttagcactacaatctctgttgtggttttcctgcatcattgattttctaacttcaatatttttctaggaaattaattttcaaggcgaaggatcagttttacattacggccaaaagattgaacacagtactttgtcccaggtctggaatgagctcaagttatcttgtctcttttcagaagctcgcaaagaagttgatcaatttaatagtcaaaatcggtggaagaagcgtggtatctccatgatacctacaaaatttggcatatcttttactttaaagcttatgaatcaggtagggttgagtgtcattatcattctaaaggttcaagtagatgtagttgatcattaattttgttttccttaatgggtaaaggcaggtgctcttgttcatgtttacaccgatggaacggttttagttacacatgggggtgttgaaatgggacaaggtttacacactaaaattgctcaggttgctgcctctgccttcaatatccctctcagttctgtctttatatcagaaacaagtactgataaggtaatgggcaatacattgcattgtttaaatgttttgcattttccttgaaacttgttgtgatcaataacttgatcaagaattagatgtgaactaaaacttaaacacatgtagaactgaacatacgaggttcgaacagagtgattgtagtatcacctgcctactcctcggtcagaacagccctagtggctttagattgttattgagctagaaagaatcgattacaagctgttgtacacaaatgtgttctcggacacaatctctcaatgaagctttgcttcaattacaacactctttcgctcttcttttctctctgaatgaactagctcactctacttgtaatgatctctttaaaaactagtaccaaatgatatagaaagagttggctataaccgacagttagttaaaacagttagaaactgtttaaaaagagaaacaacctcacttgatgaccaaacacaacaaaactgatttcagtatatttctttgataagctgtgatattgttgtgttaatgtgttttgtgtttgctctctaataaggttcccaattcatcgcccacggctgcttctgcaagttcagatatctatggagctgcagttttggatgcctgtgagcaaattaaggcgcgtatggagcccatagcttcacagaacaatttcagctcttttgccgaggtactattattgccttgtatttctttttcgcagattagtcgaagaatattcacactttgtgtttgtctactttgtggtttgttataattttcagcttgccaatgcgtgctatgtggctagaatagacctatctgctcatggattttacattacaccagacatcgactttgactgggtgactggtaaagggaacccattccggtacttcacatatggggcagcattctcagaggttgaaattgacacattgactggggattttcacactagagtgacaaacattattttggaccttggatattctctcaacccagccattgatgttgggcaggtatgtatctgcctttcccttagcaactagagatggaaattggacagttaatgtacggagaatacaatccccgaccccattcccgctacttatttatgcccccatccccgcctcatccccatctaataactaacagattcagagtaaggaaataaccaccagttatggggaatctatcgggtatccattaaaataacatggaaaaaatatataataatttaaaataattgaaaaaacttttaaatttaaaaattaaaggaaattatatatatatatatatcgaatatggtacggatagtattatctccaatcccgccctatcctcgcttcggtattgaaatcaccccaccaccgacccattaaccgccaagccgctcctttaggggcggggctctgcagttatccatccccgcagtataaatttccatctctattaacaacatattatatcatcattttcatatcctactattttgacacttgcaagcaaatctagaattagattaagctaacataaaggaatgatatacttgaaaacgcagattgaaggagctttcatgcaaggtttgggttgggtggcattagaagaactgaaatggggagatccagctcataagtggatactcccaggtcacctatacacatgtggccctgggagttacaaaattccttctctaaatgatgttccattcaaattcaatgtttcactcttgaaggtatgctctctctctctcttaatgaaacacaaaattataacaagacggagaatactttgtgttgaataaaagaaagactagttaggatttttgtctcccaaattttgatataaaccaatcatgcttctgaactattgagattgttggatttaaaaacttttgttcaattttagtaaggaaagtctaacatggataaaattcagggtatgatttggtacatgtcaaattcgaatagcatgatttggtagatatcaaagtctggagagcatgatttaa

SEQ ID NO: 295091 - DNA, 4078 bp, Cannabis indica
gagagagaggagagagagagaagtaaaaaaagttggtgtgaggtctacgtcttgagcattagctggctactacttcaccaccattgtccatttgcatttgggttagaaagagaaaattaatgtgtttgaaagctatataggaaaagaaaagagtgtgtatgtgtttattgtagttgtaatagtagtatataacttttttcttttggattaattgttaattttaattattattgaaataatcattgatcgatcactatgagtaaataagtgaacaaagagtattactctcaactttctattataatttattagaattcttgatattttttttaaaaaatattttaatgtatattttcaaatataaaaattaatttttatagtgatgtttgttatgcttataatattattcttgtaaattttttaaaaattttaaataatttacagtgtcaaaaatacgtttgaattttttttaaatgctagtggtaaattggaatataaaaaattctattttcagtatatgatttcaagtgtgataattgattaaaaaattataataaaaaattgtaattagggctcctataagttaattagaaacattttcacttaaaatgacactaagcatattttatatttataatgtgtgtgtgggggggttctcttagcacctaagctattagtggtgatcttctacttatggttctttcattcttggaatagtacaatacaagtagtagtggaatattgtaactttttacatattgtctctctataggatcatattaatctttatttgtatgtatctatctatccccttttcttttcatcataaagctaaaagaaaagaaaataaagaacttgattcaattttttttgttatatacgaataatataagattccaatattgagaagatttcatttggtacaaaatcatagtataccatttatgaagtggtatatgagtgtattattaaatatgcttatacatgatctaacttaaattctctttacaatgtcgtacgtacgtatatttaacttataataaagtttattttgtgttctttttttttttcttttcaaataataattacatatatttaaatgtgtgtatctttttctctttgttggtgtaaatgacacgagtaatagctaaattttctaaattgttctttttggtaaaagctatacaaaaatcctatctttttatatacaaaacctttacattttcttttcaaaaagtactactaacaattgggtaataattttctgaggacactctctggctagttttatctaagtatagtagaacaaattatagggttggcaaaagggtccccacctcttatttaaaaaaaggtctacatgatctttaatttaattatgaaagtgaaaaattcaaataaaaataataaatacgtatttaagtagcgtttagttgaaggtaataaaatagaatattaatgaaaaaaaaaaattattctatttttttgtttggttgcatattaaattattggaatgtcattcaatgtagaatgatctttccaccattttagtagaatgactatttcatttttaaaataaaaggaaagataatatatttttaaaatagaaggaaagattatttcattctattcatattcctattctcattctcattctcatttctctttttatattttcatttctctcaaccaaacaccaccttccttctttaatactttatttgtataccattagattttatataatgacaaaaaataaaaacatattgaatgttgacctaagttattcactcatgatagatatttaatcaaaattgttttgcattttgatgaaatttttacatccaattagactggtcgaaattaatgcagttgcaaaattattataggatagtttttgtagtaattttgaccaatctcattttgtcacttggatcgagatgtaagttctaatcgagatatatctgatatcaatactatattaactagttaatatagttatgaaagattataacatcattggctatcatcaataacaactaataaaagtatatctatcatcaataacaagttttggcatcactatcaatcatagagttacaatttgtttttcactctcttgcatccattctatctgaatttacttatggtggacaatgtcccatatggaataaatagtagagaattgagccatatataagaacatggactactccactcattgccaattggttttgagatagaaccccatgattctcaacatggtatccacacctactcagatagtgatcatgtccactctgatacggttcaagattgatgagcaaaaaatagtcatcatcttgagggagaatattgtggacaatgtcccacatagaataaatagcagagaattgagctatatataagaacatgcgctatttcactcattaccaattggttttgagatatatggaattccataattttcaacaatgacaaatatttttttattcacaaggtcggctcttgaaaaaaatagcccaagactacatttaataaaaaattttaaaaattgagcccttttatatgtattattttgttgtaatgtaattttttttaaattatataaatcatatatatatgttaagccctgaatttaagtaggctctaaacacagacttaaccccgccgaaaaccaatcttgcatatatgggtgatactcagtaaactcttcctagtgaaattagaaaaaataaaataaaagagtcaaaacaaaatgaataaaagagcatagatattcaaaaaggactcagataataatgcaaagtactagacaatgtatagtgggtcagtctcctagtctcctaagttcaataatacaaatggcccattgttttgccctaatgatcttcggctaaaccctactattatttctggttgattaaaaaaaaggttaaatattagattcagtttagtggttaacttttaagttaattggtgtgctataagttttttttaatcaaattttatatactaaaaaaatgcagaaactaattttgcgtacgtcatgaaataaattataaaatgtttggctttatttgagtatattacatatacaaatattcaaattgctcacgactatatggttggtgtaaaagtatatatacaaatacatattacttttaaagtagtgagtgactcatcatcttaatgtggtgacaaagtacttaaatatatatattaatatatttttataataaatcataaataattgcacaataattttaaaagatagttgtggacattttacttttttaattaccagtattcttaattgagctgatctaataatataattctttataaaaaataaaacctatctactactactaataataataataataataataataataataataatgtgcttggaataaaccaagcaaactttggatagtacttttaattaatgtgatcatcgtattaggcaggtttgcttaattaattaagattattattattttaaaaaattgaataaatgtttttctatgtctaaatatattcttgtgttttaggtaagcttttgtaagtggtcaagagttattgtatatatatgaatttagctacactgatttcgcttattattaattacttcattattttatattattttagataagaactatataaataaaagataatatcacctaaaaaaagaactatgatgatattagtcactcacgcttttttataatatgattcataatttactttgatgtgatattattttaatcgtgtaacgttttctcaaaaaaaaaaaaaaaaatgtaatcgtaaacagggcaatcttatttttagcatatgatcatgaatagtatcgaataaacatatattgcacattctatacttaataaattaattatataaattccagagcttataggatttttttttttttatcattttacaaaaaaacaattgtctttttataattttttgaaactaagatgatgtttggtttaaggtaatgaaatagaatggaatgtaattatgaaacaatttttattttattcattttaaagtattagaatgt

SEQ ID NO: 295092 - DNA, 4475 bp, Cannabis indica
aagtaaaagtttaattttaacgtacttaactacactccttgtgggatcgacctcactcctggtgagtttactacttataacgatacgtacacttgcgtgtgcaaaaatatcgcaacatccaacaaaatctttcctctcaaaaaatgataggcctgaagtaccatatgcataaattaatctagaaactattacaaaataaaggcttcataatctgttttttctcacaagttacaagttaaaaaaatgttttgtaaacacaagtaacttgatggcctttcgctctggcatcatttgctttaaaggaactgagggaaaatgatgatatagtatatatatataaatacagtttggttaagcatacaaaaattaataataacaatactataagatatgggcattaatggggtttaagagaacctgtataatacatctatggtattcactattcacacgattatatatatagaaatatatatgtgaagcagaagtgatttatagtcatcggactacattacccaataagctatttgttgaaggtgaactctgttcactaaaccatggatcttgcacagaaacaggagagctttccttctcctcttcttcttccattgactccaagttatcatctattttttgtggaagaaacaatctctgactcccaacaccgccacctttctttgatgtcacgctaccaagtgattcgctcccgtgtaaggcgatgaacaagaggacacaactgatgaagcaaatgtgttttcctccattgtggcccatccgcttctcctgatttgttcgagttcttcggctacttccatcattgaaggtctcatgtcactatgaaacgcgagacatctgaatgcaagctcggctaccttgtttacagaataaagtgtccatgcatctctatttggttcaaggaatggatctattatatcatccacacacccttttccaatcctatcaacagcaagtgcagccaagttcacatcagtctgaggtctagtaaagtcaaccactttcattgctgttattatctcaaccaaaactaccccaaaactgtacacatcacttttatctgagagatgaaagttttgatggtactgaggatccacatagcctggagttccttgtggggctgttgatatgtgtgatgtttctattaagccaagtctagaaagcccaaaatctgctacctttgacttgaagttgaaatctaatagtatgttgctagatttgatatccctgtgataaattggtggattcatggcagagtggagataagctatagccttagcagtttcagaagcaatggtaagccttatagtccatggaagccctttacccctttctctttgtagatgctgagatagagttccattaggcataaactcatacacaaggatctgctcgccttgctctatgcagcaacctaagaggcgcaccagattcgggtgactaacagatgaaagtagtttgatctcattcataacttgctcaatgctgttattgtctctatgtttgatcttttttatagcaaccaactcatcattgaagagttttccttcataaaccataccaaaggcaccggttccaagtcttcgactttctgagaagccattggtggccttttcgatttctttgtaggggtataaagcaacactggaattgccagtttcacatagaaggcgctttgcactcatccggtttttcaaacaagtagaacgccttcggacaacgtggcagaggaaagttaggatgaccatcaaaacagctccaaatattatccctaataaaagcaatgtagcacgtgttaataagaaagccatggacttcctcaacatctcagctatggctactatcaatcaaacattgtactttaaccacatcaattgcttgttacacttacagatgaccattttggcccttcaaacacatagcaataccgaacataaattaaaatttgatacacaagcaatacattgatataattatcaatttaattggaagattagactcaataattagaaattttacctgcaataagaacacccactttactaaattttccacatttgctagacatgtactttcgagggctgcatgctgaaactgaaatatgacaatgaaacagtaattagtaaacctaatggaaactgaagttgctgacatattctgagagttacatagttcaataatcttgaaaacaaacaccaacatatttttataattggaaaatccaccaacacccacatcttcaagctgacattgtattccaaaatcacaatttctctttccattgacttggttaaaatgaagttcaaacttagctagcttaggcatgtgcaaagcctaattactctataaacaaatgggagatttcccaaatgttctaacatttgacttttgcagatatctgcttggaagatacattacattataagaccaatatttaaaacaatttccaactcctgaagtagttggtttttctttaaagtccaaagctccagagggtctataaagaaagactaatataaaatagctgttccttcaatcataactaaaatagctaaatcatagtactactactttcccctaaacatccagctttcaaacacaagagcaaacttctcaacaagcacagtaccctggcattattacacccaagtcaaacaccaaaccgccccaaaagtctcacccatgtccttttatcaattatgaggaaaagtagagcctaaacacacgtaatctaacaataaccttatttatgcacacttgcacagttcttctaggtattgtaattaccacctacaaaaagaggtagcctttgcaaattgggcattgacaaaagtagtagtagaaaaataattatgcaatatcttgtgtccacatatttttagttggccaaaaacttgaaactaatgatgccccatatctggtgtctacctagtcatcgttcccattctaaggtgaagatccagtcaaagaatcaataatgataagagggcacttaggtacaaaaaaaaagttaaaccattatcacaaacaaatcctacaaaaagaaaaccatgaaaatcttaatccatatccaccattggtatataataatatgaccctctaacgaatcattcattgccatgaaacccaccaaagtaaacaaccaagaaatttcaatcaatcaggtgtcgttttctaattggcaaaagacataataatagccccaccaaaccgtatacttttccttccccagtttccatcgtcaaaggcaattaggccatccaccaaatattaaaaattaaattaaattaaaaaaaaaggctaatttagatttctatctaaggactttgacatctgtaaaattgtgtactgaactttttaaacagttaaaaattctcaagaacaatggagatggttagattgaaagactacagtatttggtacatgtcaaatttctaccattttgttacatcatgtgaaatttcaggacaaaaagttctaattaccttaaataaatatgaactttaaccaaaaaaaaaaaaacagcgagttgacttacctttccggcaacgggagccggcgagaaacccatctccgtgaaacccttcattacaaaagcaccggacccctgttttaccttcgggaagagtaacatgcatagaatttgcgtttcgatcacatgacatatttgaggacccattgagccaccaacccaattccagcctctgaaactggaacgagttgactgagtcaagggcgatcgaagcaaacaatagcttacacgaagttcccttcacggcgttgaagttcataatatcagtatcagaattcttagagaaacagctgagagaatcgttcttgttaggaatcttacagtcctgtacatcgacgacccgattctcaacgaagctcatgggtatgacacagccattaacacgagagctagtacagtcttggagcaagagactgttattccaagtcaaaccgtagtgtgaaccaaaaaggggtttgattgattcaatcgaacggttacatttcgctgggagattgatgaagatgcttgttgatgtgatgttattgactaaaaattctccgattctcttttcgccattgtcactacaattcaattggattttgcaaccttgtgagaacccaaacgggtacggtacagaatcacctttgcaaaacctttggcaatcgtttgagccatggctatgatcagcttcgcttgaagaaataactacgagaagaactattatgatgagaagaacgaaaattgttggtggggtattcattcttgggaaaaaatcttgcaaagctgaaaggggttcaggttcaggatcatcacctttctgccacaaaattcaaaaaacccacaatattaatcaaactgaaaacaaaatttctctgaggattttatacaaacagtttctgggttttgggttttgggttttggcagctaagaaaaattaaaaaaaaaa

SEQ ID NO: 295093 - DNA, 5237 bp, Cannabis indica
tttcaaaaataacaaatacttatactaaaaaggatactttgataattttaaataactaacttactctctaactttactcctaataacaagtgacagaatggagagttattatcctctccattctttttaaactctctctccatccatcttagagagatcatttgcgccttagttcaagttagctaggaggttaacttcaatgtgtttgaatgcaagtggcgtagactagaactattaattaaagtcgtttataacttgatccaacaaggtgatagacattggaggatattcccaaaaccattgcctagcaacctcgcctagggtggttggaaaaacttgcactaggcaaggttgggtactttgacaatctgctcaatctagatctcaaaattattgatatgctttgagggatcaccacaactatcataagtggccatcaaaggcattttgaatccatcaagcaacaagacttgctaaacctctatagaaaatggacaggcacacctcaagtttaatattggcgcattctttccctcacatatttcccttacaactcttcctagtactatttcgcctactaagggattcacgtcagcgttggatttttcaccatctaagttctctatagccttaggggtgcaatattgccttcacgcttgcccatttgagtgtctagctagcccttgaggtcaggttggatagcagtgatttagttttgaagattgactgattagttagtgattcacctcttaagtggtatccatcattttgggaatttcgtcatgtcagttgtttagatggtcttggagatctggctcgtttctaggaagagctctatttcataggttgctaaacacacctctcttatttacaattttagcttccacttttgttcgaggtgacttttcatgtagggacctaatcatcgatctttctccctttgggcgaggttagggattggcctgcttttcttggttcccaagtgctagggggccatggttcaccttggaccaatttgcacaacttgttgcttgggcttggggactaagggaaccttgcgaccttggcaagatttagttaatcacatctttcctaaacattattattgtgacaatgatggagcgatgaccaactaaagagaataaataagttataagagagcaaaacatattcagcgtaagtcctatcaattattaaaggaataatacacagagtggatgtaatcatagagaagatcgaatcagcaaacaacaatgtgactcttatacacgggtacgccattttgggtgcttcctagactaatgactgaccctacagaccaaccatagtgtttccagcgtgctttgtccccactcgcatgctttctataacatcctgaaattatcccaggtcaagtacacttaactatggagttcttttgtgatgggctaccaaaaaacaagatgcaccttgtttatagagatagtaccaatcaatctatttaagtcctctttaactatgtagtcccatacctacacagcctcagaatcaccacacttgaccttcataaggctatgtgggattgcacaacttacccagtattctcccttacagatcacgggactactgactgtcacaatcactctccttacgggttcgatcaattatatgatattatttaagaatacctgaatttaagactctatttatgtgttcgaagtattttagtaattttgacttgaaaggggtgaaatggtaattttgttatatatattatgctaatggactgcattattatgtagtatgtttcatttattgtgttacaggtgaatttcgacaagttagcgtggtatggtcacaatcaggtattttagttcgaattagattcggggtccaaaatatgtattatgtgattacggcagtaacatgagatatatggatgattatatgagaatatgtgtgatgtgaaaggataaaagtacccttacttgttatttatgttgatttttagctttaagggcaaattggtcctttgactaaaacttagtaaaagagatatatgttttgtttctgataattaaaagagaagttctattttctattttgaaaccctcctcaccaacgttctctttctcttcaaattttgcaattttgatcttggaggaggaaattgaagttaacttgttgggtttttggtgtttgagcttggggaaagcatttgaggtagttaaattatctagtatttgcttttcattctaaattttcatatttgttttggaagcttggatgatatggtatttttggtgttcttgacatgaatttaaggtgataaatttatggatgataggctagaaggtgtatgttgtttgagttttaagtcttttctatttgtgtatttgttgtgagaaatgaactttaattttgagctgaattggatttcttaaagcttagattatatgaattatgatataattgagcttgattatttatgtgttttaagcatgttgtaattgtcgtgtagagtgcttataacactattttggcatgaaaattcgattatacgacttatgtaaagttttgttcgaattggtgtattttcggggttctaaaaataaggatttttaggtttttcaaacccaggcaccgcaaccctcttgaaggtgaaaacagagcagttgctcactacctacccagaagcgtcgcggcagccccgcgatgctatttcgcaaattttttctcgaatttttttcgtgaacttgttttgaccataacttttgactccgaactctattttggacgttctttatatcgttggaaagctcgtgaagatctctattacttggtccaattttagagtcttaattgtgaataattatgttatgagattagggattaattattttttaaacttgagattatgattaggattaccgatacttgctcaaaattacttgtggattggaattctatactcactttggaattccggtaagaaagagaaccttgcacacaaaatatagtgcggtggcgcacttggatgttatggaaattgcttagttagaaatgtaagttagggttattaccctaaagtttctttatttatgcatgtaattgttgaattaattaagtatgtgaaaagggttatgcgactaaggcataactaatgaattatatgttaatgtgagtaaggcataactaatgaattatatgttaagggttatgcgatcaaggcgtaactaggttagactcagtgatcaaaattgaaaaaaaaaaccttgataagaccttatgtgataaatagacgtgtaagtgtaacatgtagtgtctatacaatataaacttaggatgtggtggcatcatcaaaagtgtagtggtgtgttatattagtgcggtggcatcatcaaaagtgtagtggtgtgttatattagtgtggtggcacaattatctacgcaatgacgtattatattaatgtcgtggcacgattatctacacaatgacgtattaagtgagatatctatgatatatgttatatttggtttgattatgctttcttgctgggccttggttcacgggtgctcaattgtgcaggcaagagtaaagcagtgtcagcccaaccatgagttcgaagattttgatggtgaattgtacatgtttcggctaagctagaccacgaggtttggatcttatatgagagattgtatgaaaatctaattttctccacttaggtcggcctatatgtaacaacttgtaatatttttaaaaaaaattttacgggatcccgaatatgtaattacattattttattttaaattaaaggttattattattattattattattattattattattattattattattattattacaagttgttttgttatttaagttaattatttttaattacttgacttattagatctcgattaatgggattaacgcaatataattacaacacgtggcgttcctttaattaaagcgttacaacgcgacatgcctaacatgttttagggcaagtggaattttttgttttggtatatgcatctttaaaacgtattttggtaaaatatttattgaatatttaatagcaaaaaatttctctatttatttaattaaatatatatatatatatatatgagattgtatacgtaattaaatttaattgaatataacaataatagttgtctataatcattaataataatgatacatttattgaactgtaattaaaattaaaataaattaaacaagaaataactgagaataaaatatgaaagaaatcttgaacttgtattatattgtttactaaaaaaaccttggagagtaatcaaaatgattttttaaattttagttgtttaactttatatttttgttttgtgatgaagcctatatttttctgtatcatattgtgctagacctaaaaatacataaactatatatcggatggtgtacttttctgttgttttctcatgtctcgatctttgtaagttttttgagaatgttgttacctcgcttattcatcgttcggagaattgtttggccgattctttagctcaatggactagagaatcgagggttaaaaacacttgtttagtaagggatgtaactcctttgtggttactatgttgttctaattttctttttcataaaattcctacttataaaaaaaaatgtaaatatattttgtatggtatttgtgtttcttggactcgtgtggttcaagccctaggcatcagtggcggaaccagacaaaaatctgaggaggggccaaataggaaggtcaagcgaattgtatttttacctatttctttttagaaaatattaataaaattaggctatttaaaaattttataaccttgaactattacaatgatcgtatcgtatcccttgaaattttttctgctaaaacatgtcaatgtagttgatgtgttattgtcaacgccacatatttaatttaaaattttaaaaaatattttcttattaactataaattataggatacatactattttggaccctctactttgtaaaagttatcaattagaccctttgttttgttaaatgacaaaatggaccctatattttccaaaatggtaaaaataggatcctaaactcaatttttaacagtttattttttaacataactaactttaagataatttctaacacgaacagatacagaaaatgtaactagatttgtcataacatctttagatcaaattattattaagttttattttgtacaaaaattaatt

SEQ ID NO: 295094 - DNA, 3191 bp, Cannabis indica
ccagtactttgtttcaaatttggcccaacagctgtggctttgacttctttgggtgccacatggatattagtccccccagtatccatttgattattaactgcctccccctacgatttttgtaactccttctcccacacttctcataaccgttttctcctcctcctcagctgaactcagaccaccatgactggccggaccaccatgtacaccattttcattccctgggcttcgttccagtcccccatgtcctccctcattaatatgaggaatggagttcactactccagccgatacaaacccattggggcagggatcatcatctttcagccatgatccatacttcagcaccaaatttccaacagcatcagtttccctcaacatcccactagtacaatccttttgttcatgtccccgaattccacaattgaaataaagcataggtaaatgttcaaatttaaactgaatccaatgctttttccctccacatggaataaatctccccacaaagatactcgcatttagcggaaacccgatcctcattcgcacataaccatttaagaacatgcgattctcgtctccccaacggatctccaccacttcccctgccattttgcctattcgagtcacatttttcttcgtaaaaagtttaatcggcagtcctttcactttgcccaacacaacaccttatcgagccgtgcatccccccaattacccgaaaatggccatttctccaggatcaaaagccctccattgaaaagccaaggctgcttccccaacacactcttcgcatcctcaacactcttaaacgtaacccggaccagtttctcttccctgtcatcatcattcattttgacagtccactcttcaatgcccttccacattctattgaagatagtagtaaacaaattctccctgatgttcctatgagaaattaacttcccaaccaaagattttgctccgaaggctatcgctgcatcctcattctcttcccattcttcctcatgatcaacaccaagcttactagtcatattcactaactcatccacatcaacaggcctttcacctgtcaccatcaggccaaccaagattagaaacttgaacataccaatcagtccgtactcgactatcgttcaacagagaggatcactcagagaccatattagcctaattggaatactgtagctatcatatatattatgattaacgtgtatttaattttgaaattcaaacctaaatagccattgatcagttctcatttttctcccttaaatccaaataatctcaaactcaaacttaaattgcgattggctagtcctcattcttctccctaaacccaaataacaaataaatataaactgaatagagattcttccaagaaaaattctatcacagaaaaacttttcaaatgccattctcatatcttgcaatgtgatttgagttttataattcagatctcagcaaacaagtgaggagtttgggaacacttttaaaacacgtagatgactttcactcaattttgaaactcagaatggttgttgcacatgtcgagaagcagatgctcctctctcattatcgatcttggcttaggccatgtttcgctcagataaagtactcacatttgtctgtggtatgcttctcatctcaattaaatctcattaagtgtgaaattatctttatttaattttttattcatcatgatatgcttacttatcaaacactaaaaaagggaagaacaaaaattgatgatagtgtgtgatggtataacttactgttgaaatttgaacactatctcacaagccaagaatggctccaaaaacaaccaagaataatactttaatcacagaacatagaacagttaggcaaagacttgttcttaaggagatgaagcgactatttatagttaagaggttagaggtctttgacactgttcacattttcggacgtattcaatgcaatctttcttcattgttggccaaaagtacccttgacgaagaatcttttttgaaaggcttattttagaagagtggtctttgcagaaacatctgtgaactttgtggataatggctctaattttgattccagctatgcacctcatatatggtacatacaacccctacagtaaagctttccatccaagatgacatatctaggagcctagtactgaatctttgttgtagcggctctgccagccatcagctttttacaattcaggaactagaagttggacctatctagaagtttgagtgatcaattatggcttttacccctaatgcttcaatacttaaagtttgtagatggtcgacaagcaccacttcgtatttcacaattttcggatatattgctaactttgacagcatatcagtgaatgaattttgctctcttgggacttggcgaatgttgtagcttttgaagctttgcaacagttctcttaaccgtgtcacataagcagccattttctcaccattagcttagtattctctgaatatctgatttaccactagttgagagtcactatacactctaatactttggcccccttcttctttagccaactgtcagtcaacatagctttgtgttctgcttcgttgttggagacaagaaactcaaaacggatagcactttggagttgatgtccctgaggagatattatgataattcctgctccatctcttttttttttgtttgatgctccatcaacatagaccttccagactggaagttttgggactagctcgttcgagtgatcgttcattccagaacattctaccacaatgtcagctaaagcctgccacttgatcaaaacttgaggctgatactagacatcaaactggctaagttccatggcccatttcagtagtctttcggatgactctgacttttgcaacacttggcagagaaggtaatttgttaataccttgatgacaggggcttgaaagtagggtctcaaattttgtgaagcaattaggaagtaaaaggatatttttctatcatggggtaattggaattcgcgcccatcaatcttttcctgatctaatataccggtagttggactcatccttcttcttgcactagtgtggaacttatagcatgatcagacactgccaaatacaggtataacggcactccctcaactgacttagataaaattggagccttggtcaaatatgttggattatgttttaccaagatct

SEQ ID NO: 295095 - DNA, 3383 bp, Cannabis indica
gttctagtaattccgaaagttaaagtaattgattttggtatgatttttgatgaattaaagttagaaagataaattaatgaacactaaatttacaagttttctttgcattggaaatacattctaatcgagtagtgtttgggttcccaagaaccgaataaagtaacatcctctattaagtcatttcaattacattcactagttttgattttacaaatcaaacaatataatctaaaatgattttacacaagatctacttaactctttaatacaatcaagaacacggatctaagctcgcttagatccaagaagacaagctccacttgctttcaccaagttgaaatctctccagcaggtcagtctgaactcttttcagacattgtaaattcgcactccttcaacctttaaagatccaatgaattacgatatgcaagtcataatcaaagaaacagaggaaagtattttgccctagattcactagaagattctatcaaaaaatagagagttagttagaaagagtaatatcagcttaatatatctcatacttcggtaaaaccgactcaactaattaactcaacaactcaagccaggtggccccaactgaactgattaaagacaaactaaaaagctaacctagcaaacgataaatgaaaccagactaagcggatgcaactaagacaaacttaaatgaataacccaatcagccaaatagcaaccagaacacaatacacttaaaccggtaaaaagcaacataatttttcatacaaaacatggcacttacaatctcttccttgacaaattatgatcaacgtccaagcacaatattcaggaagagagacacgaaagaacaaatcacataaaaaaaataccaacaatccaaaagataatatcaagatagtttatcaacagcaaggttaagttcaacagacaagaaaacaaccagacaaaaactaaacccaaaatatgaacaatgtttagtgtatttatacaaaagatgaaacactaaatctccccttcgatgatcaaaattagttgctgctagaataggcaacaagagacacagagggaacatgtactaaagtagcatcattatcaggaacaaaggagagaacatgggtggaatgttctcgctggacaccagcagttgttgatcccttctaaacatttgcaagaacctgctccccctagagattaggaacaatggacacccgtagaaactggctccccatggacagtaggatacctagaaggaccttgatcaatacccatagaagaaggttgaacattagaattagggatagaaagaccatggacgtcaacaacagatctgcatccatatgagttggagagatcattgaggaatgtatagagaaggcaccatcaacatctggagaactagaaaaattaccatcagcaggaacatcaggaggagcctcaaaattttgaaaccttagtcatagcaaacaacacatcaattatagccttctcaaaacaacgctggctgagctgatcacgcataagattcaacaaaattatttacaagagagaacatctgactttgccaagttacaggactaaacccttcaagaggagctgaaggagcagtcgaggaagaagtgacatcagaggtaagagccccaccagtagcaagaacatccataactgataagggaggcttgccacacttaggagagaaattttttccaagagtaggggcatgcaaaatcttctcatgctcaaacatagtaggaaaccccttttttaccacacgattaatcaaactgagctaaggcaacatgtgtttcacccttttggcagtagcagagttcactattcgatcatacatgagtgagggaacatcaatactgacactagtacccaatgcaaataaaacattttctatgctatagttgatagtagagatgtatgaattaggccaccagtttgatagtgcaattttgtaaagaactctataaaacttagttagtagtgtgataggtaaccccttttcattctagacaaactcagagttgcctatgctctcaaatcctatttgtttaataaaaggtttataatcctcattaaaaacatgattgtaatggttttgatcttcaagacacaactaatagtggaaggggcaaaccgaaatcgattttcccaaatataagcaagatatagaaattttcttttcttgttcaaaatgctctcgtcaaggttagcctagaactctctgactaaattctcatttggcggctgcaaatgagtgacagacagcaacaacactctttgtttaatcaactcacaaatttttggaaaggaattcagtttaactcgatattcaggccacaaaggatgaagacagacattatcttgaagcctaagcaacttgtgattcgaatagaaaggtgcagtcgatttgtttggctcaaacacactagggtttgaggatgaacctagttgtgaacttttagctttcatagggacaaggatgtgaggagaaccatatgaaactattttccattaggccgaggacgctatgaggtttggatggaacaactcaataggttccactgatgctttagcagggaaagtagtggtggaatgaggttcagccaaaaggaagagacatagaatgtgtaaaacgccttggtaagctagaagaagagaacttacctggtctggtctgtaaagggacaagtcagacccaactggtgaggaacaaggactcacagccttcaacaatgacgatgaagcatcaccagaaagagatgatgttttgactttgtgacaggcccttttcccataactgaaccttcaagtaaacacccatgaacacacacaaagaagatgaacagtaccatgaagtggttgaagattgacgtaacgaggaagaaatgaaaaatgtgaagtgaaaacacgatgataacttcatatatttatcaaccataagaggattaatgattaaattacccttcagcccatttaaagaaaaacaacccaagcctattaacacttttgttatcttaatttttatcctcatgacatggcatgcttacattgacaaaatcagtgccatgtggtattacaattcaccaataggaaggccaagttagcacctgaataaaagaacaccccgacactcaaatgggcatcaagtgacagaccagctccctcccaggaactggccgatgttgggttttatgccctaaataaaactcatttcaatataattagatttacttattaatataaatcagaaataacatttaatgttgcatggctcagatgatttacttttatgaaatatgaattaaaacgatgttatgtgttgatttggatggtttcatgtggtttatgtgctaatttgatgatagtttagaaatcgc

SEQ ID NO: 295096 - DNA, 2556 bp, Cannabis indica
tacttggttcaagattgtcgtactttactttcttctctcaatagtgtgtctttgaattttgttaaacggtctgcaaatagggctgctcattgtgttgctagagcgtcttgtttaagctcagatcgtatttttaaggagcataatgctccgattgatcttttgtctattgttgatgcggaacgttattgaataaattaaatcaacttttgctcaaaaaaaaaaaaaaacgagagccatcgtaaaaaaactggtgaaatgtgattaacaaccattatttatatattttctccaacaatagttatcccctttctttgcttttattattataacggcttttggtcgtgatataatactaaaataactgatcggagtaacagtatcatgttgcgacttgtatcacaaactaagatatttttctttgaaaaaaaaaaaacaaacgaacatgacgtgagtaaacagtgatgaacttggaattttattttagttaaggccttaaaaataaaagttgtacatatattagtaagtataaaaattatttttttcttattctaaaaaaattacattagttggatgtgttggtcctggatgtgtcaacataagcatatgggtggtttggagttttgtaacctttgagattttaatcttactttgttgggtaagcagtggtggaggttactcaaaaatctttcttggtgagaagaattttctaggtgtgttattaccctattggttcatttcttgatgctccagttgaagccaatccaagctatatatttggcgcagtatgatagaagcaaaacaactagctcttgctggtgctagaagaactttggtgatggatctaatattagtattttgccttgtgaagataatacaattattatttgtgatcatcatgctatcataagaaccctgttagtaattttatgagaacagatacacgtgattggaacttggatattgtgtcaaatcttctcatcccaagagatcaggagcttattttgtcaatacaatttagttcttctttggtgaattataggttgtcttggaagtttgataaatggtgttaacctacgcaatcaataagaaaagaacaacaaggaagaaagaaagaacagagaaagagtaaagacagagagaaaggaaaatggagaagaaagaatctcattgattgaaagagagattacagaatatatacaacaagtctaactcaaccaattaacaaccaagaatgagaaggctaacaaccaagacagctggcaaaactgaataacagaaaatacagttagaaacaacaacagattaactaacagattaactaactcctttaacaaatggggtttatatactgtaaaaaatatttatcattatctagcagagcttagaggtgagtagtctgaaaataatgctattgacttttggagaaaattgtagaatttaaaaattcctcccaaagttagtaatcaggttcggcgagtatatatagtttcaagtatattgccaacatgttttcaattgtccaagaacatgtcactgtgaataccttttgtcaaatttgttgtacacatgatgaaactttttcatgctctcttcgatttttctgtgatggatagccataattagcccagtactaattttggcacatggtttatggagttcacgactaggcatggtaataaagttttagagcaagtaatgatggtagtgtaaatattatggtgtgaacggaatgatgccatttagcaacagaagttattaacaagatgttttattgttctttaagctagatctctacttgataaatttttatatgcacaatcaaggactcattatagttccttgtcttcacctacggctggtgtaagtgctcgtgtgcattgaactttacctgatatttctcaaatcaaagtatatgttaatggagctttatttgaatcaataatttgtgaagggtttcttagtgcgtgataatggtagccaattccatgaaacttttaccgtgggcaagaggggctacgttaaaccagaaatagacaccaatgggaaacttagtttgtgtccaaactattatgagtaattttcatatgcttttagaatttagtgtgttggttcatgactgtaagagttttttgaataatcttaataatatttttttatattttgttgaacaatttgaacaatcctcctattgtaaaattttattttaaatgactttttgtgaagttataaaaaattaaaaagagtttataatatacatttatctctctttttttctttttgagtttatactgtaatcacatttgaggttttgtgtgacggtttctgccttttaacttctcaaggaactttaaaagcccaaaaacaacttttaaaacccatgccaaagtgtgtttttactttcatgaaaaaaaaatagaaaatttacataaattactatttttgattaaatatttacacttttacgtttaaaattttttttatatatatatttataatattttaagaatacaacaaaaaaaaaacgaaaataatattaaaacaacaataaaataatat

SEQ ID NO: 295097 - DNA, 7502 bp, Cannabis indica
tctctcctcctcttctctctcttctttctctctctacacacaaataataatacgctctccatctcatacgcttccacgcgttcttcttcttattatttactcatacaaatcagccattttctctttctctctctatttgtttttatttttcactggtaactgcccagttgactcgtttcttcaccccattatatatagtggatttatgggtttgggttaaataatcagaccagaggtggagttctttttgggggtgttttgatgtgtgaaacttgttcttcttgtttttgtgtttcgagatttggggtcgtgaatttggaagacacccaggttggttggttggttggtttttactgtttatttatttgtttttactagtatttatttttcaatctgaaatgctggtaactggcgttgtatatatctgggcgatgaacttatattgggttgctgattcaaagctgggtttttaatcaaaaaggggttttagggatttgattttgatttctttgttttgtttggttcaaagggtattggaaaagattccaatttggcttaatggggactaggatttgcatgaatgcttcgtgcggttcgaccaggacgctggaatggaagaaggggtggactctgcgatctggtggatatgctcatctctgccattcttgcgggtatttatacaaatatgtttacttttatcctccattataagttgttagattttcaaattttgatatatcagataatttcggggatttatgtgcatcatgtttatggtttttttttccctcgaatccgagattctatgcgtattatgggtttgtttataattgactattgattttgtgacatctgatatttatcaagttgagaatttgggtcgttgggtcgttgcctatttgcgtctaaccgttacaaactttattttgattttacaacaaggaattaacaacgttttagttgataattgtaaatattatgtaaccatttatttttttggggcagattagtattagtattaggattttacgttttatttttgtttaaaaaagagattctaaaaatgtgaactttttatgattggagtagaactccaattcacgtacggtctgagcaagtgaaattgttggctccaagcaattttttttctaatttataatctttaactactgattgactccatttatgcaaatgaattagctaatttctcaggagtcggataatgtagccggtctaaacttgggacaacccaaaacaacctacattccttcttatttgattatctggatcatcttcttttgtttgttgtatgtatttgttctcactttgatttgaactttttggtttcaattgttacactgaacttcttgctgatcgatattattatgatgttcaattgttacactaatttgtgttatatttgtaatatgctaacgctactttggtaagagacacttgtctacttacccgtgttgatctatatcctcttggtggtgttgaagtatgtataatgcacaaaattgcctgaatgttgttggaaattgtttggtatttatatcttttttgcttctatttggctggtgctggtgtggcgggcatgcttctcagatctgcctatgaaaattctattttttgtgaaagatatcatttagacgaaactggttggagagattgcagttcatgtggcaaggtgagttggtggtgtttattgatttgatctcggtagtcctcttattttgctttagatcttaatttttgaaaactcaattgtctgttgcagcgtatccactgtggatgcatagcctccaagtccttgttcgagtgcctcgactttgggggcgttggatgtattaattgtgcaactagttctagacaccgcctagtaagatttactagatcatattatgtattatctatggctctgtttgaatttataaaattacatctgttcaaacttcgtgaatctaagcaaataagtgcgcgtatttcttatctagccaaaatctctcctatgtttagtaaaacatcataacttgaacaaactatgtgtttacaattttattatttactagttgattccattattatgtcttctgactgcctcttggtattcttaagtataacaatgattagctatattggtacattttttagaattttctattgccatgcatacacttttctgctttgcatgcataaatgcattccatttatgtcatgcagattcagattgatgaagcagctaaaggatttggtggatcaaatgatgccggtgagtcacaatcgactatagttcagactaggatagtcggcgatgctgttgatgagggaagattgatgcaactgtgtaaaataatggaagctaatgaacccaacatcttgcctcgatttcagcaggctgagataaatgcttttagtcaaacaaagcgagatgacatgatgcatcaattgggagatgttggccgggaattttcgagtttgactcagtcatccattggatcattaacattttccaaaccaaataataataaaacattgctagaggttaaagatagtcacgagtctcatcttcaaccatctttgaatataactttaggaaccccctcaaggacctcaagctttgttcttccttatactggtggcgctgttgatgggaaagaactgagcaaaactccctctccctcttttgaaccacatagaagtcgtccgatactgcctaaaccttttaaatctggcatcaatgcgagttcagagtcaaataaaactgttgttcctcatatgcgcatagctaggccacccggtgatggtcggggcaaaaaccagctacttccacgatactggccaaggattactgatcaggagctggagcaactatctggagagtatccttaattggtacttgctgtattttgtttccttttttccatttatttggttagatagtatctttcccagtgggattagtaggcttctgtttataaagtttaccttaatatgttatctttaagtttgaactccactattgtgccactgtttgagaaggtgctaagtgcaagtgatgctggtcgtattggtcgattggttcttccaaaagcatgtgccgaggtatatttatgaactcacaactatttcttagtcttgtttattaattttcagtggaggggtgaaagattttcactttatgttttgcctattacgtgtttcgtacattcatttattgaactggtatttatgcaggcatattttcctcctatttctcaatcagaaggccttcccttaaaaattcaagatgtgaagggaaatgaatggacttttcagttcagattttggcccaataacaacagcagaatgtatgttttagaaggagtgactccttgtatgcagtctatgcaacttcaggctggtgatactggtatatttctgctttgtaatattcttgcttagagcttaatatatgaagtaccaaacatacataaattgtcattttctatataatttacttctttacatgtatcttagaaacttacaaattacacagtgaccttcagatcgttctgtgaccccatatttacactgtgtgatgtaaattcaatgtggttattttgcaaatttcactttcctcaagatgaaatgtgttattccttcaattttgataacaagtctgaggacttaaaatttgttattctcctccctttctatgcagtaacatttagtcggatagatcctggaggcaagcttgttatgggatatcgaaaggcattgaacacagaagatgcgcaggttagctacattcccatgcattgcaatatattattttatctttttagtataaatttgagatgactgaataattaggaagcacaaacacctattcttcccaacggcactcttggagagacttccaattctggtggtggaacagagaatttgtcgaccggaaatgggtgttctggtctcctccagactaacaaaggaagcaaggactctcgtgtaaatgctatgccagaacagttgcatttgactgatgaagatcttgggcttcgaaaaactgaaactaatggttgcaacacaaatgaagattcactacagcagcaagtaactaagttggagaaaaagaagactcgcaatatagggtctaaaagtaagaggttgcttatgcataatgaagacgcgctagagctgagattgacatgggaagaagcacaagacttgcttcgtccaccaccaagtgtgaagccaagcattgtgaccattgatgaccatgactttgaagaatatgatgtacgtataagtcactgtcttttttgattcaaaattagaaatgacactgcttttatgataagcactaaagctggtattttcttctttttctttccttccctcattaattatgtttatatcatttaggagccaccagtttttggaaagagaacgatatttgtttccaggccaactgggtaagtataaatatgacatgtttattgggatgatcatgttttctgtccgctgtttgttcctcgtaaatagtaaatagaaacttctataagcttcagaattgggtagattcaattgtttgaagtgtttcttggaagatctcgacatattttcccatcatttattttaaacctctggaaaatccaaatttaaagcttttgtaacttttcaatgggagtgtacatggcgttttttcttgtacttctaaactacaacgaatttgtgttttactggctttccagttatgccattttaacacaatcagtttttccttcttccacgttctcttttggaaattttcagctagtgttagacacccttgtatccaccaacttggttattcaccatttgatcaatatacatagcttgagtgcatcaaatactaactatattttaatttgtgcatgtatggctaagggtattcttagtgctgaacataggaaatttgtgatttagggaccaagaacaatgggcacagtgtgatgattgctctaaatggcggaagctgcctctggaagtgctcctcccttcgaagtggacttgtccagacaatgcttgggattcaaacaggtgaatattaatatcttataaccatgagatgagggcttgttgcttggttttggtcttcttagttttccaatgtgctttatagggcttcatgttctgcacatgaggagataagcttgaaggaattggagaatcttttaagatcaagtaaaggtagatctatatcctcttcaaccttcacttgatttttcgtttatggagttttacagtctgttgtgtaaatatatatgtcattaaatagttaacctaggcttgtaccacaactaatactaataataaccaagaccaaactcatgttattatacttctaagaagtgatgtaaattgtctggttccagtaggctttttgtagttctagagtattacttgaatacaataagttgtttagatggatgatttgtgtaattcttaagatttttctaactttttttcttataatattggaactaaaactatgatgtctagaaccctggttgccatctcattcctcttacttttttgagatttgtgatgaatattttgagtggccttccccatattgggttttgctgtgtctttttttaattaatgttattgcttatgctttaaggtctggtacattataccccttgttaattaaaatgcagtttgaagaaatatatatgtacttgtatgtgtaaaagaaaccgaaatggttttttttttgtccctcttcctctcttttgactctcgtaaacgttctctgaatatagaatttaaaaagcgaagaaccacagaaaacaataaaatggcccaggaacacgagccttctggcttagatgctctggcaagtgctgcagtgctaggagataatgttggtgactctggtgaaccttcagttggagctaccactagacatccccgacaccgcccaggctgcacttgtattgtttgtattcaacccccaagtggaaagggtaaacacaaaccaacatgcacatgcaatgtctgcatgaccgtgaagcgtcgattcaaaaccctcatgttgcggaagaagaagcgccaatcagaacgtgatacagaggctgcacaaaaggatgataaccaatgcaaagaagatagaggtgcattgttgattacaaattatatggagaacgagggtatccattgccgagttcaagctgatgttgccgagagcagtgcaggccaaattgacttgaactgtcaccctagtcgtgaagacatgcaaccggaggttccagaactgatgatgatgggtattgtccaagcagctagttgtcagttagaaaattacatgaaacaaattcctagtatgatgtatgaacagcagcctactcttggctcttctttgctcagtaaagctaccggagaaggtggtagagacctgtccgatgaggggtgtcgtgcatctgcttgggagcgagagagtagagtcgatggaatttaccgtgatcctaaattagactgaaacacagttagtaatgttcttcgccgaaaatgaaagtaagtttgttttcttatttatttttatactactataaacatgaagcgtatacacaatctgtcagtggttagagagaatacatataatcgttctttggttctttttcgatcatgtgttaatttttttatttatttttctatatatcagtaaacaatgctagcagaacgaaaatggcattttaaaagagtgcttattgagccacattgtgtataaatccatattatgtattgtagcactgattacttggaaaaatttcttgctaaaaagagagctcatagaaagtacttattatggagaaaagtcactaatttttcttcttctcatgagaaaacctttatttatgccaattttgaaccatataatgttcccaaaccaggagtgaagaagattgtttagtgtttggttttttcttctgtaaaaccataaaattaaggtaagaacaaactgcaatggtgtttgtttcactgtttcttagatcattacgcgtgacagatcttaagttgtcattaatttaaaatctgaaagttgagagctttggttctaccaaggaacaacacttaaaaaggtaatgaatcaactacagctagtaagaaagtgttgtaataataattaattaaataattgttaataagaccggccagctgaatcttactaatttgttttactactcatgacctggtcgttattatatcataatgcatattccattaataagtgagttttagacttgtctaagtttgttttaataagaatcataatggaatcaaattatttattatattgttagttttgcttttaaaaatggtgtaatgggattatattgtaatttgcattgtaattataattacattataaaagataatttcctttaattagaaaagctatgtaatataatgaggattaccctaaaatgattgtaatacttttttttatatataaatataaaaattaaagtatg

SEQ ID NO: 295098 - DNA, 4279 bp, Cannabis indica
actggaaatgatactgaagacatttcatctcataagtctttcattcatacctagtttcacacgaaaaatttaggagagctcaagtatttcttgggtattgaaattactcagagtaaacaaggtatttttctgtcttaaaggaagtatgtacttaatttgttaactgagacaggaaattgggagcaaaaccttgtaatgctccaatgaatccagctatgcatcttacatgtgatggaaaaccaattgaagatcctgagaaatatcgcagattggttgaaaaattgaattatcaaactgtgactcgtccagatattgcattcccggttagtgtcattaatcagttcatgtcttctccaacaattcatcattgggcaatactagaataaagctatgcatcttacacgtgatggggaaccatttgaagatcctgagaaatattgcagattggttggaaaattgaattatctaactgtgactcgtccagatattgcattcccggttagtgtcatttgtcagtttatgccttctccaacaattcatcattgggcagcactggagcaaattttatgttacttgaaaggagcaccagaacaaggtataatttacaaggatcatggacatactcagattgagtgtttctctgatgcagatttggcaggctccaaggtagataaacgatccatttcaggaaattatgtatttgttgggggcaatttgatctcttggaagagtaaaaaacaaaatgttgtgtctagatccagtgctgaatcagaatatagagttatggcacagtctatgtgtgagctaatatggatttctgagcttttgactgaatttgggtttaagacttctattctagcaaaatagtggtgtgataatcaagctgctcttcatattgcctaaaatctcgtgttccacgagcgaactaagcacattgacactgattgtcattttgttcgtgagaaaattcaacaaggtttgatctccacaggatatgtgaagacctgagaacaactaggacatatttttacaaaggctttgaatggggtgcgagttgattatcgttgtaacaagttgtgcataattaacatctatgctccagcatgaggggagtgttagaatattagttgtaaagaaatagggtaacttgtattttagtagtttccctttgagtctcctagctttgtatataaatatgtactattctacgaaatacaatacacaattcgattcactattgtctacaatagaaaatcgagaaatcaaacgcctgacattttggttatctactttaatttattcaatgtatatctagtttcttaatttataggattggtattgttttttatttattgtattatataccctaatacctataaatgcattctgttatgttgacaaataaaatatatcaaaatattaaaaactcaaatatatcattatggtgtcaaacgtttcttatctctgaaagttctcaatcacccaacaccattttttccgacaatcattcaagaaatctcaggcaacactccaataacacgaagactagtcgcacgtctctgaccaggcacacggcagtcgactttccttatttctatcagacctatgacttggcgcagaaaaagctcaaggacccaatcacacacttaatgtcacacttcacgtttctctgttcttttttaggatgtcgaccagtgaagatacctcttccagcccagtgaagcaacaactcagtccccgacaactccaacactctctaaagtcatgacaatggttccatccagataacaactcataaacttgaagggaaaaattacttgcagtgggctcaatttgtcaaaattgtcgtatgtgtcgcgacaaactcggctacattatcgttgatcttcccacaccttctataactgatccactctataaggtatggcaggctgaaaattcaattgtacttgcttggcttattaattctatggattcaaaaatcagtcgcaagtatctgttttacaaaacggctaaagaagtgtggaatgttgctcgaaaaatgtattctgacattgggaatgcatcacaaatatttgagattcaaacaaaactcattgaaatcaaacagggtaatagtactgtcactcaatatttcttagacttacaagatttgtagcaagaactcttgtagcaagaactcgatttgtatctcgagacaatgcctctttgtcctagttgtagtattatacaccgaaaacagttggaaaaagaacgtgttttcaaatttcttactgggttaaataataatcttgatgaagtacgtggacatttggttggtcgcttaccatttcttgacaccgaggaagccttctttgaagttcgtcgtgaagaatctcgtcgccgacgccgtgttatgctcactaattcagaggctaaaaattctcaaatgtctgaaagtcagccctcgcttccaataagtacaaacatccatcgaataataagcctcatcttgaccctcggctaaattggaagggtaaaaatccacggtgtgatcactatcagcatcaaggacattctcgctctacttgttgggaaatacatggaaaaccagtcatctagactcctcgacgtcctaatgattgcaaggcatatcaagctcgggacacaaataaccctaaaattctaccacttaatgcatcatctcaattcaacaaggaacaacttcaccatttacatgctcttttgaatcaatcatcccgaaaatctttatctagtttgggatcacatagtgcatcttgctcagttgtacactctagtaatttttcttctacccaaaaagactctcaaacattatggattattgatccaggtgcttttgatcatatgacaagcttatattttgtgtgaatcataatactccgtctcctaagcgttctagtgtcagaatagcaaatagcacgctttcccctattgcaggaattggtaccattaaattgtccaatgattctcaaatcagcccttcatgtggccattatttctttgaaaatcgtcaataaataatacaacaacctagtttcccttattcgacttctaatttatctaataatctcttcctattttaaattctgtttctattgataaacttatgttatggcattttttacttggacatccaaattttttatatttaaaacatttgtttccatcgttatttgtcaatcatacatttgattcattacaatgtgatataggtcaattagctaagcatacacgggctatttttcctccaaaatggtatacaccaaccaaccctttctctttagaccacagtgacctatggagaccttcaaaggtaaccacctctcatgtatccctgatttgctggttcattgcatttattgatgatcacacacgtcttacttgggtctatctactcaaacacaaatctgatatcatgtgtttcaaacctttcatgtcatgatttagacacaatttcagacgtctattcgtgtgctaaaaatcaataatggcaccaaatattttattaggaccctacctgtctcaaaaatgtatcattcaccagagttcatgtgttgatactccccaacaaaatgctacttttgaatgcaagaatatcacaccacaattttgttggaaaaaaagtcttaaacccgaattcagtcaaaagctaataaattcatattacctcatacacagactgtgtcatagctctatattctgattcagcactggatctagacacaacattttgattcttactcttttaagagatcagattgctcccaacaaatacacaatatcctaaagtggatcgtctatctaccttggagcctgcccaatctacatcagagaaacactcaatctaggtatgtccatgattcttgtaaactatacctcgtcttggtgctccttttaagtaacataaaatttgctctagtgttgcccaatgatgaattgttggaaaagacataaattgactaatgacactaactgggatgcaatatctggacgagtcacaggtaaataattccactttcaaaccaatctacgatatttttcaagatcttcaaatggtttcccatcacgtgtaagatgcacagctggatttattggagcattacaaggttgtgctcccaattttcctgtctcagttaacaaatcaagtacatacttcttttgagacagaaaaatacattatttactacaagtaacttcaataccctagaaatccttgagctcccctaaatccttcatgtgaaattgggtatgaatgaaa

SEQ ID NO: 295099 - DNA, 2337 bp, Cannabis indica
cttctgttctttacaagatattgaaggtttaggggtatctatcataagtgacaggaatcccggttaacataatcaaagacaataatccaaccgaatgcttcaattatcatctggccatattttgaataaattgcttatggagttacgttcgttacttcactggttttttaaacaatattgtattctgatttctggcatagttaagagcaaatagtaaaaccagtattaaagtgaagcatgatggtaataataaggtaagaatacataatgcttaatcaataatatccaagtgttttttgctaaaataccatacatttttaaaaataatcaaagctcgaaatacccctgatcttcactcaaacccatcaataagcaataaaatgttcaaaacccattttgtcaatctcaatgggcagtagttcgacaagggatgcaaaaaacccatttggcttaaatgtctatagttcaataacggaaacaatacgttgaaagagatgtatagtacattctcaaatgggttcatacataaacaagtcttgatcaggcttattattgcgttcgcatccggctgctttctgctgccctcacttgagaaaaatatggatgagcctgcacaaataagaatatcagcaaattgaaaaggatggtaaaatgccccaaagcagaaaagaattcaatgaagaacgatactaatgaagtttgaaagagtgaagattaaattggtgataccaacataaaaggtatgcaactgatcaagaaggctgtccttcagtttaatgatacgagtagatgctataagtaaaaccattgaagtatgagtaaaattaccattgcttctcttgcagtaagcctgtcctgatgatcataccggagaagcttatcaagaaaatcaattgcctgcagattgaataccttaacaatcagtacaaataaaataagagttcttactcatctgccagagcctaaatcaagcagtaaaacatgtacaagggaagagacaaatgacctctggggaaactaggtgctgattatctgcattaatgaatttagaccagggtttcctgctgtgcctgtagggaaaacacaagaagttcatcaacacaagttttaagctaataaagcattcaccaccagaaatcaaatcatagtaagctctgcactaaattggggaataagatgaatttccagcattgaaccactaagatataagcaagaaatttcagattaccaatctaataactgaacacaagaattgttacacatcttacctcccaacaagtgcatcaagttgtgagtcaagctccaattgatatttgtttaaatatgcatttagctcatcagtcccaagtacctgaaaatggaagcaaatcataattttatgaatataactttgcagacaattaaccgtgtatcttgcatacatttacataactgtttcacaccaatactgattataatgaaagaaaaattataataggtaagggtaacataaatggcagaagggtcataacatagctgtttttttatttattttttcattttgaacttaacacactataggattgtttatttcattctttttggaggttaagtcctccctctaaacctacaatttttgaaaggcaagaatcctaaacacttacaaggttggtaattatgacaattcgaaccccattataagatcccatttagcggaatcaatagttcttactgcttggaagttgcacaggttgtcttagtatgcatacaatatagattgaattcatttaagctataaaagcaagtaaaattaccttggcaattttaacaagctgatcatggttgtcatgaccatagaagaatggttccttgcgaaatatctgcatacattacaagtacattgagcaaagcaagcataaacaatctcacttaagctaaaagaatatgtagtaactataatctcaccattccagcaaacatgcaaccaaggctccacatgtctaaagagtagtcgtaatcttgaaggtcaactaagagttcaggacccttaaagtatctgaaacatgaaagtgaaagatgattataccatgataatcaaccatgtgtggtaatttcattaaacaaaaaaattttaagatttcaaaaatttaccttgaagccacgcgaacattatactccttcccgggatggtaaaattctgcaagaccccagtctatcaagcggagttttcgcaactcgtggtctatcataacattgtgaggctttacatcgcgatgcattattccttgtgaatggcagtagtctagtgcctgtatgcaaggaaagttgggtcatttagctaaacatcaagtgtaaaaa

SEQ ID NO: 295100 - DNA, 1660 bp, Cannabis indica
atatgaaataatattaatatttggtagagtataaaaaagtacaaaattatttatatacctattatagtagtacatgtctaacccaacttttggattgagggtttataaactttatatatatagaaagaagaccctgcctcggttctcaaaaatgtgtatatggtttttatttaaagaaattgataataaatgttaagtgaaagaggtggtatgtatcttttaaaaaaaaaaaaaaggtgggtatatacaaaaggatccatgtaatttatttattattgtataaaagagaaaccaataggtaataataataatgatgttactatcattgtagattggacagaccagcctttcttcttactcagtttcagacagctagctttgctatatatatatatatttaatttttatttaatccacagtaaaaaaatattttgaaaataattttgtggtcctttaattttggtctgtccacaaagagaaacaaaaggggtctcgtgagccttcattatccttcaccatcacattttatctggcaaatttttgtctcatgttttgaatatctttgtttccttatgattaaaccttacttcatttctatatatctaactagtctctttgcaccacaagtgttactcttaattacacacaaatatatatatatgtatatgtgtgtaactcttatttgttatcttattcaaattgtggtatttatcaagtgaaaatcataatatgacctttttgttttgtcttcttatatatccttattaaaaagaatttgatttctttgattaaacatgttattattataataatatgaattatcatgaaaagcctaatctatttttttttaagattgtggtcttagtagaactacttggttaatccaatgccacccaatggttttgttggtcacttgtagtccatatatttataaataaatataaattctgcttttcttttttcctttgttatctttttattagatttggatgtacacagcaaacacatacctgactcaaattgatgtaattatatgttgttattttataatttatttatttaaaaaaaacaaactaataactgaataattaatcgttaattttttaaaaaatatatttatgaagagtcattttttaataagttgaaaggaattgtttttgggtataattgtcaacagataatggtaaagtaaaaagcttttatcatgatttttctttcagttaaaatttttatgtgtattttacttcactcaaatcttatacagctatttccctttgtacctatattttgactttttgtattaggtttatgtagttgtaaaatattaactattttacttttttgtacagatcatgagaggagttactgtgatttggcggccatgaacattgtaggcagctaaaaacattcaattttaaaccaaaaaaaaaaatatgtattgtgtaacactaccgtacgcacatttgtctttaagcaataattgtttttattttaagagtaatttactctatatatatttgaatttaatttttacttacaaataaatatttgagtaattttgtgaggtaataattcttaagttatttttttttggaataagtatttttccattaaatatcaaatcattattcatttgtcatttttttattagtatatttaa

SEQ ID NO: 295101 - DNA, 4025 bp, Cannabis indica
tttttttttcttttaatagaacccctttctagtgtaatctgacttgcatagtcatccaatgcagctcctgcatcagatttggcgttggttactcttttctctggttgggcatgcaaaggtcatcctacaaatgtttgtatatcttcaagtataattggttttcgctctacaaataagctgaagggaactgatggaggtcttggcgaagcagtttctatgtgcaaccctgtttgtttcaccaaggaggaatcgttaaataatcaagcagataggggagattacagtgtaaggcctgccaagtgtcgacacttgacatccttagaagatgctgtttcttgttttccagcagaaaccgcaaagctgcctgaattatcttgcagtaaccagtcatgccatgtacctacgctaggtgtaaatgggagtgatctaggagtgagttctctagcttcgggaaaatcaatgcgttcattggcttttggaccatctgccccatccctaaactcgagtctgtttagctggggaacagatataagctctagtgaggatgggtgtgccaaacgaccaattgataacatatttaaatttcataaagccatctgcaaggacttggagtatttggatgttgaatccggaaaacttactgattgtgatgagtcttttcttcggcagtttactggaaggttccaattgttatggggtctatacaaggctcatagcaatgcagaggatgacatagtttttccagcattagagtctagagaggcacttcataatgttagccactcatacactctggaccacaagcaagaagaaaagctatttgaggatatttcttctgtacttaataagcttacacaactaaatgaatgtttgaatggggaatatgcatctgtcgatcgtagtgatactcgaagagaatataatgagctagcgacgaagcttcaggctatgtgcaaatctataagagtaacactagatcagcatgttttcagggaagaacttgaattgtggccattatttgataaacatttttcagtggaagaacaagataaaattgttggtcaaatcattggtacaactggggctgaagttctccaatcaatgttgccatgggtaacttctgctcttactcaggaggagcaaaataaaatgatggacacatggaagcaggctaccaaaaacacgatgttcaatgagtggcttaatgaatggtggaatacaactcctgcttcttcacatactgcagtgtcagataattgtctatcaggttgggaagtttataaatttttgagttaaattattctttattgtcttgtattttctctaagagatttcacatgcaataaattcttatcatttgaactccgatttttgaatttcagggtccagtgtcagtgaaagcttggagcgtagtgacatcactttcaagcctggatggaaagatatttttaggatgaatgaaaatgagattcgatcagaaattagaaaagtctctcatgtttcaactcttgatccgagaagaaaaacttatctaactcaaaatctgatgaccaggtatgtttgtgtattaaccactttgatcactttttgcacacaatttcacatgtttatgataattttatgggttatatgccagtggatacatagcctctcagcagaaatcaactctagcagctgattgtttgaacggtgaagacttacttggatgctctccttcgtttcgtgatttagagaaacaagtttttgggtgtgagcattacaagagaaattgcaaactccgggctgcttgttgtggccagttatttacatgcaggttttgccatgacaaagtcagcgaccattcgatggatcggtaaccttctattttttgtttcatctggcatcttcaattattgtgcaatatatatatgtttgattgaggatgttatgtaattaatgtgcaggaaggccacaaccgaaatgatgtgtatgcagtgcttgcaaatacagcctgttggaccattctgcaaaacaccttcctgcaacgaattctcaatggcaacgtactattgtagtatttgcaaatttttcgatgatgaaaggttttctccttgactataacctttccacttatagaaataaaaacattactagatttaagatatgacgatatgaattatcattgtcctttctgcaacttatgtcttccttttgtcatatcagggaagtttatcattgtcctttctgcaacttatgtcgagttggaaagggacttggtactgaccagtttcattgcatgaactgcaattgttgcctggggatgaaagtcccagaacacaaatgttgggagaaaagtctggaaataaactgtcccatttgttgtgactttttgttcacgtcaagcgcaactgtgagagctcttccttgtggccactacatgcattcagattgctttcgggttggtttttttcctttcaacatattcgtttttgattccagttctcatggttgttccatattttttccatttcttgaaaccttttgaaaatggttgatatgtgattaagctatttttttcatcctgtcaggcatatacttgcagtcactacatttgtccaatctgtagcaaatctatgggagatatgtcggtacgaataattttaactttaacacattcattcacattacaaatgtcttgtgctaaaatgtgttatttctggctttcgttttctttcaaggtttactttggcatgctcgatgcgctaatggcttccgaggaacttccagacgaatacaaggatctctgtcaggtaaatatttcggaatgaccccaatgctttatcctcattttcatcagctgaatccccgataactgacttgttattggcgtttttacaggaaatactctgcaatgattgtgataagaaggggaatgctccctttcactggctctaccataagtgtaagttttgtggttcatataacaccaaggtaattaaggccgaacccgattccctctgctcgttgccaaaccagtgaaaccgggttttgtcgaggcttttatctgttctgttcatcatcccacaataagggctggtgaaaccttggcccctttgtatgatcattagatgtacccccaacatctatatagaaaatggaagagttcttgcataattacgaaaatctttttcgtatacgaaattatcaatctaagcttttgagctgagagacttgaacttacaaaaatggtggaatcccatggatttagtttttgttatataggctaactatgaggaaaaaggttaagttgaacttcacctatagaaattttcatacatctaatctaagtagttgagtttctaatgtaaactttaaaaaaggaaaatgattttatggagtatggaccatcattgatacttataagattggattggtacatactcacaagattttataaggtgataaataaatcactatagtatctcttctcctatcatactcaataatagttgtaaaatattcctcaaaaggacagcttatcaaatattcctcctcacaaaaatgtaaaatcgtacatgtattaatttaattccatttcttccacagtcccactatcacactactatcttttttgtggtgtttcaatcaactttctttagtataactagtcttagttgaaacttgggtataaaaacttgggattataatgcatttgtagtttttatgacttttcaatgggaagtgttgaaatcaaacaatttggctatttaaatttttgaaagagcaccaattctatgtacaataataagagatggaaattggatgggtaatgagcgggaaatgcagtctccaatctcgttctcaccccctatttatgtccccgccccactaaatccctagcaacaagaccggccttgagttaaaatgggatgtaggcaaaaaaaaaaaataggacttttactataaagataaatagtatttttaaaaattattgaaaaaatgtgtatattttttaaaagacaatttttttattttggctcctaaaa

SEQ ID NO: 295102 - DNA, 3154 bp, Cannabis indica
tgccatcacagtgggtattggtagctgaagaggatctcctttattccaagagaggtcactgattgtaacgtgaatgaagaattccatgattacttgtgagaacctggagattgcaattgaaatagaggaatagtgaagatgagaaaacgtacttgtagctccccgaaaactgttagctgggcagaggaagtagagaaatcaaactttcagtcaaatgccaaggatctatggagtaaatttaaatcaatctaggtacctactgcctcttctagactctcttttactgaaccgatcagagtaggtgatcaactggttactaaacttgacctagatgagattgaagttgaagcttcttattggtgaaatgcaattgtctgtattgtgttgggtgctaatcctccctttaaggtatttgaaagatttgtcaagaggatctatggtaatctaggaatcgaaaaggtggtaagaatgcacttaggctgcactctagttaactttcgagatgaagccacaagggatttaaccctagaagctggtgttattcattttgataaaaaaaaaaacctgtggtcctacatccatggagaactgatatagattcggtctgaatggtcaaccctgttcctgtttggattcgattgaatgggctgggattacaatattggaacaagaataatcttagtgctttcgtgagcacaataggcaagcctattatgattgacaaagtgactcaagatcgtacaatggtgaaatttgctcgagtcctggtggaagttgagatatcgaataactccccccccccaaactatatcctttatcaatgaaaggaatcatctagttgaacagaaggtggagtatggatggctcccttccaaatattcggcttgtgctaatttggggcatatagtggctaattgcaacaaggagaaaaaggtggcttggaagaaaaacaaacagttgaaaaagagacaaagatggaaatgaaatctactgatgtaaaccaagaagcaggggaaattgcagaaaagagtttgtcgacagaaaccacaatcaataaaacaaagcagaatgcaaagcgagttaatgaagctcaggagacaatagtggagaaggaatcaggttgtaatgatactgaaagcaattggattacacctaaaaggtgagatcaaaaacaaatggtagcttccaagtctatggaagttattaataaaacaagtagtagcaatgggtatgcagtcctacaaggagctggtgaagagactttggctcttaattctaaacaaattcctaatggaagtctgtaacatgataggatggaatgtgagggtaaaaagaaaaaaaatagaataaaattagttttggagccttgtttgagactaaggtgaaacatgataaaactcaagacattatggagaataattttcctaattggaatttgtatttaagtagtgtcacctcagggagaattctctttattttggcaagccatgtatgttcaggttgaagctatttgcaatgaatctcagctggtgcactacagaatcaaattatgtggtcaaaacaaatcttttcttgttacggttgtatatggtagtaactctatggaggttcgtaaaagcctttggagtaaacttgctagttttggtagctgaatgaatcatgggttatatttggtgattttaatgcaatgttcacctatcgagataggagttgaggaagacctattcaggctaaggaaatagaggatgcgcaggcttggctttctttggggcaagttgaggaatttagatgttcgagttctttttacacttggaccaacaaacatgagattgaagataggattttctccaaacttgatagagtttgtgttaataacagtttgttagaagactttcccaaagctgaagcctactgcaaatgggaggtaatctcggattatggcttttgtcttattcgtatccatgagcacaataaaattggggtgaaactatttaggtctggcaatcattggccttcctatcctggttatatgcaagctgtcattgagtgctaggaaaaacttatttcaagtgttggtctcaattttctggtgtagaagatgttttgtgtcaagcatgccttgaaaaaattcaatagacaagaagtgggagatgtagcaatggaatacaagaaagccaaaaagaactattgtgtcattcaagaagaggctgcttcgaatcctcttgatatttctctgcaaaactcagtcatgaaaatgcagtaggatttccttgttgcaaaggacaagtattctcagatgcttagacaacaaagcaaaattaactggatcaagtttaatgacaaaaattctagttattttcatgctgtcatgcggaaaagaagattggaaaataaaatcggtacttacatgaagggggactctattgttgataattttgaggaagtggtcaaacactttattaatcattttaagagtttcatgggcaacaagagctctgccactatcacgatagatgaagactgtattttgcagggtaactgcctaaggctggagcaacaagtcaaattgattacgcctttcaaaaaggaagatgttaagaaagccatgttcattattcactcttctaagagccctggattagatggctttggctctggtttttacaaggatctgtggagcaaaattggtaatgatgtcttaaaaccagtgttggattttttttataaatggcatcttgcctaaaaatttgaatgaaacagttatatccttaatccgcaaagtagacaacctgacaatagctaaagactacagacctatagcctgttgcaacacaatctataaatgcatatcaaagatgatttgttctaaactttcagaagtgctccctaccattgttcatagcaatcaaggtgcttttatcaaaaatagactgcaggctcacaatgttatgatattttaagacctccttaaaggttattcgagaacgaatatttcagctagatgcttcatgaaaatagacctcagcaaggtatatgatactatggattggcagtttgtggaggacttgcttagatctctccattttccttcccggttcatcaaatggataatggcctgtatgaagggtactcacgttgggttttatgccctaaa

SEQ ID NO: 295103 - DNA, 573 bp, Cannabis indica
agtaaattttaatttttagctttttaaaaaaaatcctttaaccgttgccatttttaggaaattatgacaatgtatcataactattttttgagtaaaattataaaattacgatcggaagagtgtgggaggtagtgccaatgcaattatgcatgtgtccttcgttttccagagctactacacctgattgcttttattgaacgaattcttgcttatgttattgtcatataagcaagaatcaaatcttaaaatgaaaagaaattatttagttcatgacctttttctaaatgatagttaagcaatgactattagttaatagagaactaagtcatgtggacatgatccaacatttcttataaatatattatatataatccatccgcaacaaactactatcttttacaaacacaccaatgaagaagagaaaaaaaactgaacaagacatctgaacgagtccccaacatattatttctcatcacaactaagtgcattagccatagcaacagacataaaaaagacaccaaaaaacacacaaagttaagctagcattatccatatatgagagagagagagaga

SEQ ID NO: 295104 - DNA, 6314 bp, Cannabis indica
aaaatgtaaaaattttacgaaaagtaatacttcatgtaactatccatatatattatatattaataaaaaaaacaaatcattctttttcttaaaataaatcagcaaaacacatcaattagggagaggcttctctccactaacaatagagaaggaacccccccacccccatcccaaacactagagctcttacataaaagaacctacttagcaataacatgagccacaacattagaatctcttggactgaagagaactcccaacacagccgcctcttctacttcagttgtcacttgtttgaccaacaattctaacgccccactctaatttggcggacgacccaacatgcccacaacctcgttacaatcgaaaaccacccaacagttttgtaatcccaaccgcgccaccagactcgcaccatccttgatttccaccagttccgcaacaagaggggtaaaaggaagttcaacgaacatacctttcgatgttatgaccctcccattatggtcttgtatgacaatacccgagctacaacttccttcacttgaattaattgtcgcatcaacattcacaaacaactctccttcctctggaggttcctatcggtgctttccatagtcttctttctcttatgtttgcgtcccccattcctattccaataatcttgcacatatgtggccgtccattccactgtcaactttacaactggtacaaattttttatgcaaagcatagttcatcacatgctaggcttgccaagtcaaagtcataaggaagtcaaatttttccttctcaaccttctcagcaactctcataaggaaccccatagcatcctcctccctctctctagttataaactcctccaacccaacttctttccaaattttcttactctctcgacacccccaaatagcatagtacaaattcttaagattctcatcaaccccacatctataatttttccccacgtgtattttacacttttgtagaagctttctcgatgggagccagtcatgggaaagcttccaaataaaattcttaacctttagagggacttaaggtgagaaaaatttattctaccaggactcaactcccctcatacaagatccttccctcagtttcttgtttgagtagccaccttatatccatttctaactgagtattctccatccttagaatagtgctaaataagtttatcttagcactccaaagagccaacaggtaacagcaagatgagatcaccatcatccttaataaactccacatccaagatgagatcaccatcatccttaatattatcttgataaactccacatccaattcccccaaagccaatcttaggtccaccactctcagctccttcaagagaaaaagtttatcataaaaatcaaaagtagtcagccgtgaattctgccgatcctccaccaccctcacgccatctccaaaccctattctccatctactcctcttaaatataacctctctaccccacactagcccactctatatagttgataggaatctaccttttttagtctctaaaacatcacaatttggaaagtagctacgtttgaggaccctagccagtagtgactctttatttttgacaagatgctaaacttgttttgccatcatctctttattgaacaagtcagatccttgaaccccatcaccctctattttttcttgtgaataactcttcccatttgcacaaatgaatacgacccttcttggctgacgacccccacaaaaatttggccgccacactatgaatacagttaataaaatttttcgggatcctaaagcaattcacagtgtaggttggcatagcttgaatcaccgccttaatgagaatttctttcccagccgtggagaataaagatcatttccagcctcaaatcttattccaaatcctattcttaacatattggaaaatatccttcttcctccatccaacaaagcaagtttgacctagatattattgaaatctatttgagactttaacaccaaaaatgttagcaagaggaccatgtgaataatagttgacctttttcacaaagcaaccctcaaatttgctaaaattcacctcttgtcctgacaccaacgagtacttccttaaaatatcctttaaacgaaaacactccttgctaatagcattccaaaaatatcatactaccatccaaaaaaaaacaaatgtgtgacagtaaccccatgttaaccccaatatctgaccattttccttcacatctctagtcatagaagagagcgcctccccacataaaagaaagagaaaaggagatagtgggtcgccttgtctcagccctctactaggagaaacccttcccttcacctcactattaatcaaaaagtagaaagacacagacttgatacagttcataatcttctaaatctatctcgcatcataccccaacttatgcatcaccatttctacaaatccccattctaccctatcataagccttagacatgtccaatttaagagccatctttttcctattcccaatcctattcttccccatacagaacatcccttcgaatccaataatcgcattatcatggatgagtctccccttaatgaaggcactttgggtcttcaaaatcacctcctttaaactcaaccaaagcctatttgccaggcatttggacataattttctagaccacattacatgagctcggaggtctatattgttccactttgcaagatttgtcaatcctgggtataagagtaatgagcgtctcatgcacttgatatagcggtatatcttcattcagaacctacagacaaacccaaagaatatccacatgcaccacatcccaatactattgataaaatagagctagaagaccatctttacctagtgtttttagagggttcatccccaacacaacccatctcacctcctcaatagtgaactctattagtaagcaatcattcatttctgtagtcaccctaatctacatcgtcctagtcacctccaaaatactttcctccatcgcgttggaagaagtaaatagcgaggcataatatctctcaacaatattagaaatctcactactctgagcgtactccaccccctgctcatcaatcaacttctcagttatgttcttctttttccttagtgttgccttatatatggtgaaaatacttggtatttttatctgcacactttagccatatagctctgcttctttgtctccaatatacttccttcttctcaagcagtggattaagattcctttcttctctctttaataaatcccaatttcgcggtgtcatatgcaaacttaactctgcaatcctcatttgtatatcttttttttttttccattaagctcatttcttttagaatttgatcagtcctttagggacttcccacatctactagttttagctttgatcatactcggattactacaatccaaaccatttttctaatgacgttcaataatctccctacattccccttcctcacattaggcctcctcaaagtgaaatttagacttatttttggctccatccgcatcatatctctcctcctcccaaagggcaataaacatgtctttatggtctgaattgtcctaatccaaatattgaatgtagtatttaggaaaaccatccatccaatccattctatctaacttctccaaaataaaattattcttttttccattacaccagaaggtcttcaaatctttagattaatcctccaaagagcaatcatctaaagccctcctgaaccttcccatagcctctcatttcctataattaacccctatttctcatagtcccataaaatctcattaaaatcctcagcacataaccaaggcccttacactgcatccctaactctccccattaattcccaagttagttcccgcaaaaaagcctcaagattcccataaatcccaataaaatggaaccactaaatatttccaccacacaccaccacatcaatatgaaatctcgatgatgatctaacacgcactgaaacaatatccttccatcccagcaaaagaccccactcagccccactctcttaaccacaaaacattaatcatacccacatgatcaactaacctccatatcacaatcattatatagtttacactcggatagaaaaatcatatcaggttaaaacaccacaatatgagatttcaaagttttgaatgtgcaagagtttctcaaaccttgcatattccagctaaagatttttattgttctcggtgaccttgcttagcaaggcttgcttcatcagtattctcagtagaaagagagaaattagcatcccaagaaatactttcttttagatcatccaccctagagatggttcccttaaatgtaccttttttgatagccgacttagattctttgttaagggctcccaatctcctagctttctctttgatcgactcttttttaccacgtttactcgtttaattagtgacgttgtcgcttcacctctgaaatatactcccaaaacctcccaaagaaaactcatcacctccatctttccaagagatcccttgtcttcttgttctctcctcttccccctatcatcaacctccatatccacctggacattatccccatccctcttcttctcataactctctgcctcttaataaaatctctaatgtctactttcccctgtctcaaagctcacttccaccaactcttagtgtttctcgttccacctactacaatgttatttaaaatccctaccacaggtttgttttctcgtgggtcgggtcaccaactccatctcccaagctaataaactcagcacccatttagactttagaatacccatcacaaccgtctagcctaataactggtctcacatcaatctccgacccattaccagttttacccccattagtcaaaggcccaccaatcccattaaacttacttaactttcccattgtcccatatgcaactttaccttccataaagctgccacttggctgttgaccatcagaaataagtcctagattcaactttcccaccacttttagttctgcagatcgtgccttagtaaccgccccaaccatttgagacagttgtctcctactgcttgttccattgtgattttctctctttggcctgtagatattgcgggatccttaacggactagcaaaaactactacaagcctcattcaaactaaaaccatccctcctatcaacatctcttttaagccactccccatacaaaggtatattatccccttttaggtcctccatcaatactgctggtttcgcacacaccttctggtcatgcccccacactccacatttataacataaccgtggtagaaaattaaatttaaactgcacccactgtttagccccctccactagaataaaccttccaacaaaggccctcttatttatagggaaattagtttttgctctaacttcgatctttattatgaccagtttaggattgtcccattaagctctataaccttcccagccattccccttggcgtataacattattaatcgttagtgccttcgggtaaaagttcgtcatacggatttaacatgaaagcgaatcaaggttagcatctgttcataatcctaactttgaccattcctcacccagcaataaccctccattgaaagaccgcgacaatgtgtccataatcttcttcttgaacttgtcctcctcgaaggagaacccaacataggtgctttgtccttcttcctatgccaaaatcactacatcccacccaatctttctctctcaaattctcccaaataatatcttcaaaaagttacatttataagcacgattggcaataatgcacccccaccatcgacaactttccaataactttagtcggcgcatcaatattctcccactcttcctcttccgtaacaaaagataagttttctatcctattaacaatctcctccacaaaatcattattctcctctttagccatagcaactctccaacatatcacacaaaccacaaaaacctaagggtgcagaacaccactgaacaaatatggtgaaaaccaacaactcataataaactacattaaaaaacaaattcaaaaattaagaaagaaataaagaaataaatatctaagaaatatgtatacatatttaagaaacaaattcttatataaaaagaagtcaataataagaaaaaaaacatttatgaaaaaaaaaaagactttaattttaaaatataaatccttaccttatataaaagaagactttaataaagaaaaaaaaggagttttatttgcaccgtttaaacttataaatacaccacattattaa

SEQ ID NO: 295105 - DNA, 1932 bp, Cannabis indica
tacagatttgacagtttccaattcaaagccaacgagcgatttcctatcgagaaactaattacagattcattcaaaaaaaatctcaggtgaaaatgaaaaagtgaacaaatacctcatgaccgaatttgaatatccaaaaggtatggaaatcatatcaatccacattcaaattatttatttatgtttttgaaaagaaaaatgaagaagaaacttgatgctgcttgcttagaaaatgcaagtctcccgcaatttcatgagaaagttttgttgggaaaatgcggaggagaaacaaagaaaacgaaatgcaggacggatcaaatgaaaacaatagaaaaaagaaaaagaaaaagaggaagtgaaaacgagagattaaagaagcgacattgatcgctttttaagatgataagaataggttctggttgtctgagaacgaatacctttccatcacagaataatcacctctgcctttgctctctctctctcttcgtccctttaagcagagagacacagagcgaatggggtttcctttcagatacacgcgaagtccgttggatgacaaagagagtgagattgggatcgggtgtcacgcggcgtacgataaaaagggtgttccctcactctcctctactttcctccttttacagttggtcttcttttattttctttctatatctacccacctcatatgtgtataattagagggtatcccaactattttccaactatgaatttgttgtttataattttttgtttaatattatatttaaaatacaattatttttatagctgagaagcctgagattattatgttaataatttatagttctatatcaaacaggtgtcgaaattgaattttttttcacaataatacatttttgcaattgcaaatgtaccactcatgggtttgggtttagatccaactctaaacattatttagataaataaggttatccactactttaccacagaagtcgttgttatttataaatctttataatactaataatagtataataaggatttcaaaaaaaaaatatatagtttaataagaacatggactaattaaaaaaattagtacactatattactttaccattctgtattttggttaatgatctttcgaataggatagttgaaaattgagataaagttctacaaagtttttttatcacgaagggtgttaggactgttttaaaggggtatttcgtaaagaagagaaaaatatataagacaagattaatatacaaaatgattatgttcgtaaatttataccatattattcacatcacatgtacctatagtatcattttatcatttaatccttttttctttttttgatgaatatttgttatgtatttgatatttagtttatgaacgaaatcttgcaactcaactggtctatgttaccgactagaggagagccatgttaaacatacataaaaggtgtacatatatacagtgacggatttagaatttttattttgtcggagcttatttatcataaaaaaatatttatagctatattataattactcttattaaatttatctaattttataagggcttttctaatattttgatctataattattaaattaaaaaatttatatttaattttttaaaagataatatttttgtttgtgggggctataaccccacatcaatgttaatgggtccgtctctccatgtatatattatatactagtaaaaaactacgtgcgaggcacgtatactaaatttatgctagtttttttctatgttatttgaaagtgatacaattaaaaattaaagaaaaaatattattaattattaggtgatattattattatgtgtatctaaataatatattttataatgttgtcaattaaaaagtgaataccgaatgcaatatattagtggttaagaaagcttgatgatttaaatatgttttaa

SEQ ID NO: 295106 - DNA, 684 bp, Cannabis indica
tccttttcagaaataaatgtttcatttctcttttcgcattaaaaagcactttatgatctcttttgcttcccctacattggctcttgtaaagaggatggtgtcatctgcaaacatcaagtgagatatagggggcgcttctcttgatattttgatgccatgaatcctcccttcatgttctgctcgaagaataagcttggataagacttcttggcataggaggaataagaaaggtgataaatgatcgccttgacgaagctctctttgagggaagaactttttgtgcggacttccattcaagagtacagagtaagatacactagtaatacagttcataatcaaattccttgctcgagagtcgaaaccattatgcagcaaaacactttcaatgaagccccatctgatagagctaatttttgtcatttttcacttttctctactatattttgaagaaaacaacattataactcatttaataagtatagattttcatgattttgtttggtctagatttctatttttttcgaaccaaaccagcaatattggttttttaaaattcaaaatcgaaccaaaccaatcaacttaagaaaggattggtttggtttgaaaccgtggtttgtaatttgtaaatgttttaatattttttgactgaattatttttactttaaagcttataatacataaata
